United States Patent Application Publication US 2025/0320254 A1 - sequence listing, part 10

SEQ ID NO: 46862 - protein, 3562 aa, Homo sapiens
MKNIMAGLQQTNSEKILLSWVRQSTRNYPQVNVINFTTSWSDGLALNALIHSHRPDLFDWNSVVCQQSATQRLEHAFNIARYQLGIEKLLDPEDVDTTYPDKKSILMYITSLFQVLPQQVSIEAIQEVEMLPRPPKVTKEEHFQLHHQMHYSQQITVSLAQGYERTSSPKPRFKSYAYTQAAYVTTSDPTRSPFPSQHLEAPEDKSFGSSLMESEVNLDRYQTALEEVLSWLLSAEDTLQAQGEISNDVEVVKDQFHTHEGYMMDLTAHQGRVGNILQLGSKLIGTGKLSEDEETEVQEQMNLLNSRWECLRVASMEKQSNLHRVLMDLQNQKLKELNDWLTKTEERTRKMEEEPLGPDLEDLKRQVQQHKVLQEDLEQEQVRVNSLTHMVVVVDESSGDHATAALEEQLKVLGDRWANICRWTEDRWVLLQDILLKWQRLTEEQCLFSAWLSEKEDAVNKIHTTGFKDQNEMLSSLQKLAVLKADLEKKKQSMGKLYSLKQDLLSTLKNKSVTQKTEAWLDNFARCWDNLVQKLEKSTAQISQAVTTTQPSLTQTTVMETVTTVTTREQILVKHAQEELPPPPPQKKRQITVDSEIRKRLDVDITELHSWITRSEAVLQSPEFAIFRKEGNFSDLKEKVNAIEREKAEKFRKLQDASRSAQALVEQMVNEGVNADSIKQASEQLNSRWIEFCQLLSERLNWLEYQNNIIAFYNQLQQLEQMTTTAENWLKIQPTTPSEPTAIKSQLKICKDEVNRLSDLQPQIERLKIQSIALKEKGQGPMFLDADFVAFTNHFKQVFSDVQAREKELQTIFDTLPPMRYQETMSAIRTWVQQSETKLSIPQLSVTDYEIMEQRLGELQALQSSLQEQQSGLYYLSTTVKEMSKKAPSEISRKYQSEFEEIEGRWKKLSSQLVEHCQKLEEQMNKLRKIQNHIQTLKKWMAEVDVFLKEEWPALGDSEILKKQLKQCRLLVSDIQTIQPSLNSVNEGGQKIKNEAEPEFASRLETELKELNTQWDHMCQQVYARKEALKGGLEKTVSLQKDLSEMHEWMTQAEEEYLERDFEYKTPDELQKAVEEMKRAKEEAQQKEAKVKLLTESVNSVIAQAPPVAQEALKKELETLTTNYQWLCTRLNGKCKTLEEVWACWHELLSYLEKANKWLNEVEFKLKTTENIPGGAEEISEVLDSLENLMRHSEDNPNQIRILAQTLTDGGVMDELINEELETFNSRWRELHEEAVRRQKLLEQSIQSAQETEKSLHLIQESLTFIDKQLAAYIADKVDAAQMPQEAQKIQSDLTSHEISLEEMKKHNQGKEAAQRVLSQIDVAQKKLQDVSMKFRLFQKPANFEQRLQESKMILDEVKMHLPALETKSVEQEVVQSQLNHCVNLYKSLSEVKSEVEMVIKTGRQIVQKKQTENPKELDERVTALKLHYNELGAKVTERKQQLEKCLKLSRKMRKEMNVLTEWLAATDMELTKRSAVEGMPSNLDSEVAWGKATQKEIEKQKVHLKSITEVGEALKTVLGKKETLVEDKLSLLNSNWIAVTSRAEEWLNLLLEYQKHMETFDQNVDHITKWIIQADTLLDESEKKKPQQKEDVLKRLKAELNDIRPKVDSTRDQAANLMANRGDHCRKLVEPQISELNHRFAAISHRIKTGKASIPLKELEQFNSDIQKLLEPLEAEIQQGVNLKEEDFNKDMNEDNEGTVKELLQRGDNLQQRITDERKREEIKIKQQLLQTKHNALKDLRSQRRKKALEISHQWYQYKRQADDLLKCLDDIEKKLASLPEPRDERKIKEIDRELQKKKEELNAVRRQAEGLSEDGAAMAVEPTQIQLSKRWREIESKFAQFRRLNFAQIHTVREETMMVMTEDMPLEISYVPSTYLTEITHVSQALLEVEQLLNAPDLCAKDFEDLFKQEESLKNIKDSLQQSSGRIDIIHSKKTAALQSATPVERVKLQEALSQLDFQWEKVNKMYKDRQGRFDRSVEKWRRFHYDIKIFNQWLTEAEQFLRKTQIPENWEHAKYKWYLKELQDGIGQRQTVVRTLNATGEEIIQQSSKTDASILQEKLGSLNLRWQEVCKQLSDRKKRLEEQKNILSEFQRDLNEFVLWLEEADNIASIPLEPGKEQQLKEKLEQVKLLVEELPLRQGILKQLNETGGPVLVSAPISPEEQDKLENKLKQTNLQWIKVSRALPEKQGEIEAQIKDLGQLEKKLEDLEEQLNHLLLWLSPIRNQLEIYNQPNQEGPFDVKETEIAVQAKQPDVEEILSKGQHLYKEKPATQPVKRKLEDLSSEWKAVNRLLQELRAKQPDLAPGLTTIGASPTQTVTLVTQPVVTKETAISKLEMPSSLMLEVPALADFNRAWTELTDWLSLLDQVIKSQRVMVGDLEDINEMIIKQKATMQDLEQRRPQLEELITAAQNLKNKTSNQEARTIITDRIERIQNQWDEVQEHLQNRRQQLNEMLKDSTQWLEAKEEAEQVLGQARAKLESWKEGPYTVDAIQKKITETKQLAKDLRQWQTNVDVANDLALKLLRDYSADDTRKVHMITENINASWRSIHKRVSEREAALEETHRLLQQFPLDLEKFLAWLTEAETTANVLQDATRKERLLEDSKGVKELMKQWQDLQGEIEAHTDVYHNLDENSQKILRSLEGSDDAVLLQRRLDNMNFKWSELRKKSLNIRSHLEASSDQWKRLHLSLQELLVWLQLKDDELSRQAPIGGDFPAVQKQNDVHRAFKRELKTKEPVIMSTLETVRIFLTEQPLEGLEKLYQEPRELPPEERAQNVTRLLRKQAEEVNTEWEKLNLHSADWQRKIDETLERLRELQEATDELDLKLRQAEVIKGSWQPVGDLLIDSLQDHLEKVKALRGEIAPLKENVSHVNDLARQLTTLGIQLSPYNLSTLEDLNTRWKLLQVAVEDRVRQLHEAHRDFGPASQHFLSTSVQGPWERAISPNKVPYYINHETQTTCWDHPKMTELYQSLADLNNVRFSAYRTAMKLRRLQKALCLDLLSLSAACDALDQHNLKQNDQPMDILQIINCLTTIYDRLEQEHNNLVNVPLCVDMCLNWLLNVYDTGRTGRIRVLSFKTGIISLCKAHLEDKYRYLFKQVASSTGFCDQRRLGLLLHDSIQIPRQLGEVASFGGSNIEPSVRSCFQFANNKPEIEAALFLDWMRLEPQSMVWLPVLHRVAAAETAKHQAKCNICKECPIIGFRYRSLKHFNYDICQSCFFSGRVAKGHKMHYPMVEYCTPTTSGEDVRDFAKVLKNKFRTKRYFAKHPRMGYLPVQTVLEGDNMETPVTLINFWPVDSAPASSPQLSHDDTHSRIEHYASRLAEMENSNGSYLNDSISPNESIDDEHLLIQHYCQSLNQDSPLSQPRSPAQILISLESEERGELERILADLEEENRNLQAEYDRLKQQHEHKGLSPLPSPPEMMPTSPQSPRDAELIAEAKLLRQHKGRLEARMQILEDHNKQLESQLHRLRQLLEQPQAEAKVNGTTVSSPSTSLQRSDSSQPMLLRVVGSQTSDSMGEEDLLSPPQDTSTGLEEVMEQLNNSFPSSRGRNTPGKPMREDTM

SEQ ID NO: 46863 - protein, 1741 aa, Homo sapiens
MNSERVRMCGASEDRKILVNDGDASKARLELREENPLNHNVVDASTAHRIDGLAALSMDRTGLIREGLRVPGNIVYSSLCGLGSEKGREAATSTLGGLGFSSERNPEMQFKPNTPETVEASAVSGKPPNGFSAIYKTPPGIQKSAVATAEALGLDRPASDKQSPLNINGASYLRLPWVNPYMEGATPAIYPFLDSPNKYSLNMYKALLPQQSYSLAQPLYSPVCTNGERFLYLPPPHYVGPHIPSSLASPMRLSTPSASPAIPPLVHCADKSLPWKMGVSPGNPVDSHAYPHIQNSKQPRVPSAKAVTSGLPGDTALLLPPSPRPSPRVHLPTQPAADTYSEFHKHYARISTSPSVALSKPYMTVSSEFPAARLSNGKYPKAPEGGEGAQPVPGHARKTAVQDRKDGSSPPLLEKQTVTKDVTDKPLDLSSKVVDVDASKADHMKKMAPTVLVHSRAGSGLVLSGSEIPKETLSPPGNGCAIYRSEIISTAPSSWVVPGPSPNEENNGKSMSLKNKALDWAIPQQRSSSCPRMGGTDAVITNVSGSVSSAGRPASASPAPNANADGTKTSRSSVETTPSVIQHVGQPPATPAKHSSSTSSKGAKASNPEPSFKANENGLPPSSIFLSPNEAFRSPPIPYPRSYLPYPAPEGIAVSPLSLHGKGPVYPHPVLLPNGSLFPGHLAPKPGLPYGLPTGRPEFVTYQDALGLGMVHPMLIPHTPIEITKEEKPERRSRSHERARYEDPTLRNRFSEILETSSTKLHPDVPTDKNLKPNPNWNQGKTVVKSDKLVYVDLLREEPDAKTDTNVSKPSFAAESVGQSAEPPKPSVEPALQQHRDFIALREELGRISDFHETYTFKQPVFTVSKDSVLAGTNKENLGLPVSTPFLEPPLGSDGPAVTFGKTQEDPKPFCVGSAPPSVDVTPTYTKDGADEAESNDGKVLKPKPSKLAKRIANSAGYVGDRFKCVTTELYADSSQLSREQRALQMEGLQEDSILCLPAAYCERAMMRFSELEMKEREGGHPATKDSEMCKFSPADWERLKGNQDKKPKSVTLEEAIAEQNESERCEYSVGNKHRDPFEAPEDKDLPVEKYFVERQPVSEPPADQVASDMPHSPTLRVDRKRKVSGDSSHTETTAEEVPEDPLLKAKRRRVSKDDWPEREMTNSSSNHLEDPHYSELTNLKVCIELTGLHPKKQRHLLHLRERWEQQVSAADGKPGRQSRKEVTQATQPEAIPQGTNITEEKPGRKRAEAKGNRSWSEESLKPSDNEQGLPVFSGSPPMKSLSSTSAGGKKQAQPSCAPASRPPAKQQKIKENQKTDVLCADEEEDCQAASLLQKYTDNSEKPSGKRLCKTKHLIPQESRRGLPLTGEYYVENADGKVTVRRFRKRPEPSSDYDLSPAKQEPKPFDRLQQLLPASQSTQLPCSSSPQETTQSRPMPPEARRLIVNKNAGETLLQRAARLGYEEVVLYCLENKICDVNHRDNAGYCALHEACARGWLNIVRHLLEYGADVNCSAQDGTRPLHDAVENDHLEIVRLLLSYGADPTLATYSGRTIMKMTHSELMEKFLTDYLNDLQGRNDDDASGTWDFYGSSVCEPDDESGYDVLANPPGPEDQDDDDDAYSDVFEFEFSETPLLPCYNIQVSVAQGPRNWLLLSDVLKKLKMSSRIFRCNFPNVEIVTIAEAEFYRQVSASLLFSCSKDLEAFNPESKELLDLVEFTNEIQTLLGSSVEWLHPSDLASDNYW

SEQ ID NO: 46864 - protein, 1707 aa, Homo sapiens
MNSERVRMCGASEDRKILVNDGDASKARLELREENPLNHNVVDASTAHRIDGLAALSMDRTGLIREGLRVPGNIVYSSLCGLGSEKGREAATSTLGGLGFSSERNPEMQFKPNTPETVEASAVSGKPPNGFSAIYKTPPGIQKSAVATAEALGLDRPASDKQSPLNINGASYLRLPWVNPYMEGATPAIYPFLDSPNKYSLNMYKALLPQQSYSLAQPLYSPVCTNGERFLYLPPPHYVGPHIPSSLASPMRLSTPSASPAIPPLVHCADKSLPWKMGVSPGNPVDSHAYPHIQNSKQPRVPSAKAVTSGLPGDTALLLPPSPRPSPRVHLPTQPAADTYSEFHKHYARISTSPSVALSKPYMTVSSEFPAARLSNGKYPKAPEGGEGAQPVPGHARKTAVQDRKDGSSPPLLEKQTVTKDVTDKPLDLSSKVVDVDASKADHMKKMAPTVLVHSRAGSGLVLSGSEIPKETLSPPGNGCAIYRSEIISTAPSSWVVPGPSPNEENNGKSMSLKNKALDWAIPQQRSSSCPRMGGTDAVITNVSGSVSSAGRPASASPAPNANADGTKTSRSSVETTPSVIQHVGQPPATPAKHSSSTSSKGAKASNPEPSFKANENGLPPSSIFLSPNEAFRSPPIPYPRSYLPYPAPEGIAVSPLSLHGKGPVYPHPVLLPNGSLFPGHLAPKPGLPYGLPTGRPEFVTYQDALGLGMVHPMLIPHTPIEITKEEKPERRSRSHERARYEDPTLRNRFSEILETSSTKLHPDVPTDKNLKPNPNWNQGKTVVKSDKLVYVDLLREEPDAKTDTNVSKPSFAAESVGQSAEPPKPSVEPALQQHRDFIALREELGRISDFHETYTFKQPVFTVSKDSVLAGTNKENLGLPVSTPFLEPPLGSDGPAVTFGKTQEDPKPFCVGSAPPSVDVTPTYTKDGADEAESNDGKVLKPKPSKLAKRIANSAGYVGDRFKCVTTELYADSSQLSREQRALQMEGLQEDSILCLPAAYCERAMMRFSELEMKEREGGHPATKDSEMCKFSPADWERLKGNQDKKPKSVTLEEAIAEQNESERCEYSVGNKHRDPFEAPEDKDLPVEKYFVERQPVSEPPADQVASDMPHSPTLRVDRKRKVSGDSSHTETTAEEVPEDPLLKAKRRRVSKGLHPKKQRHLLHLRERWEQQVSAADGKPGRQSRKEVTQATQPEAIPQGTNITEEKPGRKRAEAKGNRSWSEESLKPSDNEQGLPVFSGSPPMKSLSSTSAGGKKQAQPSCAPASRPPAKQQKIKENQKTDVLCADEEEDCQAASLLQKYTDNSEKPSGKRLCKTKHLIPQESRRGLPLTGEYYVENADGKVTVRRFRKRPEPSSDYDLSPAKQEPKPFDRLQQLLPASQSTQLPCSSSPQETTQSRPMPPEARRLIVNKNAGETLLQRAARLGYEEVVLYCLENKICDVNHRDNAGYCALHEACARGWLNIVRHLLEYGADVNCSAQDGTRPLHDAVENDHLEIVRLLLSYGADPTLATYSGRTIMKMTHSELMEKFLTDYLNDLQGRNDDDASGTWDFYGSSVCEPDDESGYDVLANPPGPEDQDDDDDAYSDVFEFEFSETPLLPCYNIQVSVAQGPRNWLLLSDVLKKLKMSSRIFRCNFPNVEIVTIAEAEFYRQVSASLLFSCSKDLEAFNPESKELLDLVEFTNEIQTLLGSSVEWLHPSDLASDNYW

SEQ ID NO: 46865 - protein, 241 aa, Homo sapiens
MVMVKGVNKLALPPGSVISYPLENRVYMVGKANSVFEDLSVTLRQLRNRLFQENSVLSSLPLNSLSRNNEVDLLFLSELQVLHDISSLLSRHKHLAKDHSPDLYSLELAGLDEIGKRYGEDSEQFRDASKILVDALQKFADDMYSLYGGNAVVELVTVKSFDTSLIRKTRTILEAKQANPASPYNLAYKYNFEYSVVFNMVLWIMIALALAVIITSYNIWNMDPGYDSIIYRMTNQKIRMD

SEQ ID NO: 46866 - protein, 2379 aa, Homo sapiens
MALNPHCKFHIYNGTRPCESVSSSVQLPEDELFARSPDPRSPKGWLVDLLNKFGTLNGFQILHDRFINGSALNVQIIAALIKPFGQCYEFLTLHTVKKYFLPIIEMVPQFLENLTDEELKKEAKNEAKNDALSMIIKSLKNLASRVPGQEETVKNLEIFRLKMILRLLQISSFNGKMNALNEVNKVISSVSYYTHRHGNPEEEEWLTAERMAEWIQQNNILSIVLRDSLHQPQYVEKLEKILRFVIKEKALTLQDLDNIWAAQAGKHEAIVKNVHDLLAKLAWDFSPEQLDHLFDCFKASWTNASKKQREKLLELIRRLAEDDKDGVMAHKVLNLLWNLAHSDDVPVDIMDLALSAHIKILDYSCSQDRDTQKIQWIDRFIEELRTNDKWVIPALKQIREICSLFGEAPQNLSQTQRSPHVFYRHDLINQLQHNHALVTLVAENLATYMESMRLYARDHEDYDPQTVRLGSRYSHVQEVQERLNFLRFLLKDGQLWLCAPQAKQIWKCLAENAVYLCDREACFKWYSKLMGDEPDLDPDINKDFFESNVLQLDPSLLTENGMKCFERFFKAVNCREGKLVAKRRAYMMDDLELIGLDYLWRVVIQSNDDIASRAIDLLKEIYTNLGPRLQVNQVVIHEDFIQSCFDRLKASYDTLCVLDGDKDSVNCARQEAVRMVRVLTVLREYINECDSDYHEERTILPMSRAFRGKHLSFVVRFPNQGRQVDDLEVWSHTNDTIGSVRRCILNRIKANVAHTKIELFVGGELIDPADDRKLIGQLNLKDKSLITAKLTQISSNMPSSPDSSSDSSTGSPGNHGNHYSDGPNPEVESCLPGVIMSLHPRYISFLWQVADLGSSLNMPPLRDGARVLMKLMPPDSTTIEKLRAICLDHAKLGESSLSPSLDSLFFGPSASQVLYLTEVVYALLMPAGAPLADDSSDFQFHFLKSGGLPLVLSMLTRNNFLPNADMETRRGAYLNALKIAKLLLTAIGYGHVRAVAEACQPGVEGVNPMTQINQVTHDQAVVLQSALQSIPNPSSECMLRNVSVRLAQQISDEASRYMPDICVIRAIQKIIWASGCGSLQLVFSPNEEITKIYEKTNAGNEPDLEDEQVCCEALEVMTLCFALIPTALDALSKEKAWQTFIIDLLLHCHSKTVRQVAQEQFFLMCTRCCMGHRPLLFFITLLFTVLGSTARERAKHSGDYFTLLRHLLNYAYNSNINVPNAEVLLNNEIDWLKRIRDDVKRTGETGIEETILEGHLGVTKELLAFQTSEKKFHIGCEKGGANLIKELIDDFIFPASNVYLQYMRNGELPAEQAIPVCGSPPTINAGFELLVALAVGCVRNLKQIVDSLTEMYYIGTAITTCEALTEWEYLPPVGPRPPKGFVGLKNAGATCYMNSVIQQLYMIPSIRNGILAIEGTGSDVDDDMSGDEKQDNESNVDPRDDVFGYPQQFEDKPALSKTEDRKEYNIGVLRHLQVIFGHLAASRLQYYVPRGFWKQFRLWGEPVNLREQHDALEFFNSLVDSLDEALKALGHPAMLSKVLGGSFADQKICQGCPHRYECEESFTTLNVDIRNHQNLLDSLEQYVKGDLLEGANAYHCEKCNKKVDTVKRLLIKKLPPVLAIQLKRFDYDWERECAIKFNDYFEFPRELDMEPYTVAGVAKLEGDNVNPESQLIQQSEQSESETAGSTKYRLVGVLVHSGQASGGHYYSYIIQRNGGDGERNRWYKFDDGDVTECKMDDDEEMKNQCFGGEYMGEVFDHMMKRMSYRRQKRWWNAYILFYERMDTIDQDDELIRYISELAITTRPHQIIMPSAIERSVRKQNVQFMHNRMQYSMEYFQFMKKLLTCNGVYLNPPPGQDHLLPEAEEITMISIQLAARFLFTTGFHTKKVVRGSASDWYDALCILLRHSKNVRFWFAHNVLFNVSNRFSEYLLECPSAEVRGAFAKLIVFIAHFSLQDGPCPSPFASPGPSSQAYDNLSLSDHLLRAVLNLLRREVSEHGRHLQQYFNLFVMYANLGVAEKTQLLKLSVPATFMLVSLDEGPGPPIKYQYAELGKLYSVVSQLIRCCNVSSRMQSSINGNPPLPNPFGDPNLSQPIMPIQQNVADILFVRTSYVKKIIEDCSNSEETVKLLRFCCWENPQFSSTVLSELLWQVAYSYTYELRPYLDLLLQILLIEDSWQTHRIHNALKGIPDDRDGLFDTIQRSKNHYQKRAYQCIKCMVALFSNCPVAYQILQGNGDLKRKWTWAVEWLGDELERRPYTGNPQYTYNNWSPPVQSNETSNGYFLERSHSARMTLAKACELCPEEEPDDQDAPDEHESPPPEDAPLYPHSPGSQYQQNNHVHGQPYTGPAAHHMNNPQRTGQRAQENYEGSEEVSPPQTKDQ

SEQ ID NO: 46867 - protein, 308 aa, Homo sapiens
MGFEPQIRRIVEQDTMPPKGVRHTMMFSATFPKEIQMLARDFLDEYIFLAVGRVGSTSENITQKVVWVEESDKRSFLLDLLNATGKDSLTLVFVETKKGADSLEDFLYHEGYACTSIHGDRSQRDREEALHQFRSGKSPILVATAVAARGLDISNVKHVINFDLPSDIEEYVHRIGRTGRVGNLGLATSFFNERNINITKDLLDLLVEAKQEVPSWLENMAYEHHYKGSSRGRSKSSRFSGGFGARDYRQSSGASSSSFSSSRASSSRSGGGGHGSSRGFGGGGYGGFYNSDGYGGNYNSQGVDWWGN

SEQ ID NO: 46868 - protein, 307 aa, Homo sapiens
MGFEPQIRRIVEQDTMPPKGVRHTMMFSATFPKEIQMLARDFLDEYIFLAVGRVGSTSENITQKVVWVEESDKRSFLLDLLNATGKDSLTLVFVETKKGADSLEDFLYHEGYACTSIHGDRSQRDREEALHQFRSGKSPILVATAVAARGLDISNVKHVINFDLPSDIEEYVHRIGRTGRVGNLGLATSFFNERNINITKDLLDLLVEAKQEVPSWLENMAYEHHYKGSSRGRSKSRFSGGFGARDYRQSSGASSSSFSSSRASSSRSGGGGHGSSRGFGGGGYGGFYNSDGYGGNYNSQGVDWWGN

SEQ ID NO: 46869 - protein, 823 aa, Homo sapiens
MLYMVFEFMDGADLCFEIVKRADAGFVYSEAVASHYMRQILEALRYCHDNNIIHRDVKPHCVLLASKENSAPVKLGGFGVAIQLGESGLVAGGRVGTPHFMAPEVVKREPYGKPVDVWGCGVILFILLSGCLPFYGTKERLFEGIIKGKYKMNPRQWSHISESAKDLVRRMLMLDPAERITVYEALNHPWLKERDRYAYKIHLPETVEQLRKFNARRKLKGAVLAAVSSHKFNSFYGDPPEELPDFSEDPTSSGAVSQVLDSLEEIHALTDCSEKDLDFLHSVFQDQHLHTLLDLYDKINTKSSPQIRNPPSDAVQRAKEVLEEISCYPENNDAKELKRILTQPHFMALLQTHDVVAHEVYSDEALRVTPPPTSPYLNGDSPESANGDMDMENVTRVRLVQFQKNTDEPMGITLKMNELNHCIVARIMHGGMIHRQGTLHVGDEIREINGISVANQTVEQLQKMLREMRGSITFKIVPSYRTQSSSCERDSPSTSRQSPANGHSSTNNSVSIYVRAQFEYDPAKDDLIPCKEAGIRFRVGDIIQIISKDDHNWWQGKLENSKNGTAGLIPSPELQEWRVACIAMEKTKQEQQASCTWFGKKKKQYKDKYLAKHNAVFDQLDLVTYEEVVKLPAFKRKTLVLLGAHGVGRRHIKNTLITKHPDRFAYPIPHTTRPPKKDEENGKNYYFVSHDQMMQDISNNEYLEYGSHEDAMYGTKLETIRKIHEQGLIAILDVEPQALKVLRTAEFAPFVVFIAAPTITPGLNEDESLQRLQKESDILQRTYAHYFDLTIINNEIDETIRHLEEAVELVCTAPQWVPVSWVY

SEQ ID NO: 46870 - protein, 524 aa, Homo sapiens
MALLQTHDVVAHEVYSDEALRVTPPPTSPYLNGDSPESANGDMDMENVTRVRLVQFQKNTDEPMGITLKMNELNHCIVARIMHGGMIHRQGTLHVGDEIREINGISVANQTVEQLQKMLREMRGSITFKIVPSYRTQSSSCERDSPSTSRQSPANGHSSTNNSVSDLPSTTQPKGRQIYVRAQFEYDPAKDDLIPCKEAGIRFRVGDIIQIISKDDHNWWQGKLENSKNGTAGLIPSPELQEWRVACIAMEKTKQEQQASCTWFGKKKKQYKDKYLAKHNADLVTYEEVVKLPAFKRKTLVLLGAHGVGRRHIKNTLITKHPDRFAYPIPHTTRPPKKDEENGKNYYFVSHDQMMQDISNNEYLEYGSHEDAMYGTKLETIRKIHEQGLIAILDVEPQGLEKSSGQGWLEAKSQSWSWSSTSSPWVPHWSSPERRFLLALKVLRTAEFAPFVVFIAAPTITPGLNEDESLQRLQKESDILQRTYAHYFDLTIINNEIDETIRHLEEAVELVCTAPQWVPVSWVY

SEQ ID NO: 46871 - protein, 835 aa, Homo sapiens
MLYMVFEFMDGADLCFEIVKRADAGFVYSEAVASHYMRQILEALRYCHDNNIIHRDVKPHCVLLASKENSAPVKLGGFGVAIQLGESGLVAGGRVGTPHFMAPEVVKREPYGKPVDVWGCGVILFILLSGCLPFYGTKERLFEGIIKGKYKMNPRQWSHISESAKDLVRRMLMLDPAERITVYEALNHPWLKERDRYAYKIHLPETVEQLRKFNARRKLKGAVLAAVSSHKFNSFYGDPPEELPDFSEDPTSSGAVSQVLDSLEEIHALTDCSEKDLDFLHSVFQDQHLHTLLDLYDKINTKSSPQIRNPPSDAVQRAKEVLEEISCYPENNDAKELKRILTQPHFMALLQTHDVVAHEVYSDEALRVTPPPTSPYLNGDSPESANGDMDMENVTRVRLVQFQKNTDEPMGITLKMNELNHCIVARIMHGGMIHRQGTLHVGDEIREINGISVANQTVEQLQKMLREMRGSITFKIVPSYRTQSSSCERDSPSTSRQSPANGHSSTNNSVSDLPSTTQPKGRQIYVRAQFEYDPAKDDLIPCKEAGIRFRVGDIIQIISKDDHNWWQGKLENSKNGTAGLIPSPELQEWRVACIAMEKTKQEQQASCTWFGKKKKQYKDKYLAKHNAVFDQLDLVTYEEVVKLPAFKRKTLVLLGAHGVGRRHIKNTLITKHPDRFAYPIPHTTRPPKKDEENGKNYYFVSHDQMMQDISNNEYLEYGSHEDAMYGTKLETIRKIHEQGLIAILDVEPQALKVLRTAEFAPFVVFIAAPTITPGLNEDESLQRLQKESDILQRTYAHYFDLTIINNEIDETIRHLEEAVELVCTAPQWVPVSWVY

SEQ ID NO: 46872 - protein, 812 aa, Homo sapiens
MLYMVFEFMDGADLCFEIVKRADAGFVYSEAVASHYMRQILEALRYCHDNNIIHRDVKPHCVLLASKENSAPVKLGGFGVAIQLGESGLVAGGRVGTPHFMAPEVVKREPYGKPVDVWGCGVILFILLSGCLPFYGTKERLFEGIIKGKYKMNPRQWSHISESAKDLVRRMLMLDPAERITVYEALNHPWLKERDRYAYKIHLPETVEQLRKFNARRKLKGAVLAAVSSHKFNSFYGDPPEELPDFSEDPTSSGAVSQVLDSLEEIHALTDCSEKDLDFLHSVFQDQHLHTLLDLYDKINTKSSPQIRNPPSDAVQRAKEVLEEISCYPENNDAKELKRILTQPHFMALLQTHDVVAHEVYSDEALRVTPPPTSPYLNGDSPESANGDMDMENVTRVRLVQFQKNTDEPMGITLKMNELNHCIVARIMHGGMIHRQGTLHVGDEIREINGISVANQTVEQLQKMLREMRGSITFKIVPSYRTQSSSCEDLPSTTQPKGRQIYVRAQFEYDPAKDDLIPCKEAGIRFRVGDIIQIISKDDHNWWQGKLENSKNGTAGLIPSPELQEWRVACIAMEKTKQEQQASCTWFGKKKKQYKDKYLAKHNAVFDQLDLVTYEEVVKLPAFKRKTLVLLGAHGVGRRHIKNTLITKHPDRFAYPIPHTTRPPKKDEENGKNYYFVSHDQMMQDISNNEYLEYGSHEDAMYGTKLETIRKIHEQGLIAILDVEPQALKVLRTAEFAPFVVFIAAPTITPGLNEDESLQRLQKESDILQRTYAHYFDLTIINNEIDETIRHLEEAVELVCTAPQWVPVSWVY

SEQ ID NO: 46873 - protein, 493 aa, Homo sapiens [sequence omitted]

SEQ ID NO: 46874 - protein, 690 aa, Homo sapiens
METRKKDGTWPSAQLHVMNNNMSEEDEDFKGQPGICGLTNLGNTCFMNSALQCLSNVPQLTEYFLNNCYLEELNFRNPLGMKGEIAEAYADLVKQAWSGHHRSIVPHVFKNKVGHFASQFLGYQQHDSQELLSFLLDGLHEDLNRVKKKEYVELCDAAGRPDQEVAQEAWQNHKRRNDSVIVDTFHGLFKSTLVCPDCGNVSVTFDPFCYLSVPLPISHKRVLEVFFIPMDPRRKPEQHRLVVPKKGKISDLCVALSKHTGISPERMMVADVFSHRFYKLYQLEEPLSSILDRDDIFVYEVSGRIEAIEGSREDIVVPVYLRERTPARDYNNSYYGLMLFGHPLLVSVPRDRFTWEGLYNVLMYRLSRYVTKPNSDDEDDGDEKEDDEEDKDDVPGPSTGGSLRDPEPEQAGPSSGVTNRCPFLLDNCLGTSQWPPRRRRKQLFTLQTVNSNGTSDRTTSPEEVHAQPYIAIDWEPEMKKRYYDEVEAEGYVKHDCVGYVMKKAPVRLQECIELFTTVETLEKENPWYCPSCKQHQLATKKLDLWMLPEILIIHLKRFSYTKFSREKLDTLVEFPIRDLDFSEFVIQPQNESNPELYKYDLIAVSNHYGGMRDGHYTTFACNKDSGQWHYFDDNSVSPVNENQIESKAAYVLFYQRQDVARRLLSPAGSSGAPASPACSSPPSSEFMDVN

SEQ ID NO: 46875 - protein, 584 aa, Homo sapiens
MLETYSNLVFVGQQVTKPNLILKLEVEECPAEGKIPFWNFPEVCQVDEQIERQHQDDQDKCLLMQVGFSDKKTIITKSARDCHEFGNILHLSTNLVASIQRPDKHESFGNNMVDNLDLFSRSSAENKYDNGCAKLFFHTEYEKTNPGMKPYGYKECGKGLRRKKGLSLHQRIKNGEKPFECTACRKTFSKKSHLIVHWRTHTGEKPFGCTECGKAFSQKSQLIIHLRTHTGERPFECPECGKAFREKSTVIIHYRTHTGEKPYECNECGKAFTQKSNLIVHQKTHTGEKTYECTKCGESFIQKLDLIIHHSTHTGKKPHECNECKKTFSDKSTLIIHQRTHTGEKPHKCTECGKSFNEKSTLIVHQRTHTGEKPYECDVCGKTFTQKSNLGVHQRTHSGEKPFECNECEKAFSQKSYLMLHQRGHTGEKPYECNECEKAFSQKSYLIIHQRTHTEEKPYKCNECGKAFREKSKLIIHQRIHTGEKPYECPVCWKAFSQKSQLIIHQRTHTGEKPYACTECGKAFREKSTFTVHQRTHTGEKPYKCTECGKAFTQKSNLIVHQRTHAGKKAHGRGHTRKSKFMAH

SEQ ID NO: 46876 - protein, 348 aa, Homo sapiens
MGEMHMVDTVTWHKMRGAQMIVAMKAVSLGFDLDRGEVGTVPSPVEFMGYLYFVGTIVFGPWISFHSYLQAVQGRPLSCRWLQKVARSLALALLCLVLSTCVGPYLFPYFIPLNGDRLLRNKKRKARWLRAYESAVSFHFSNYFVGFLSEATATLAGAGFTEEKDHLEWDLTVSKPLNVELPRSMVEVVTSWNLPMSYWLNNYVFKNALRLGTFSAVLVTYAASALLHGFSFHLAAVLLSLAFITYVEHVLRKRLARILSACVLSKRCPPDCSHQHRLGLGVRALNLLFGALAIFHLAYLGSLFDVDVDDTTEEQGYGMAYTVHKWSELSWASHWVTFGCWIFYRLIG

SEQ ID NO: 46877 - protein, 342 aa, Homo sapiens
MGEMHMVDTVTWHKMRGAQMIVAMKAVSLGFDLDRGEVGTVPSPVEFMGYLYFVGTIVFGPWISFHSYLQAVQGRPLSCRWLQKVARSLALALLCLVLSTCVGPYLFPYFIPLNGDRLLRKWLRAYESAVSFHFSNYFVGFLSEATATLAGAGFTEEKDHLEWDLTVSKPLNVELPRSMVEVVTSWNLPMSYWLNNYVFKNALRLGTFSAVLVTYAASALLHGFSFHLAAVLLSLAFITYVEHVLRKRLARILSACVLSKRCPPDCSHQHRLGLGVRALNLLFGALAIFHLAYLGSLFDVDVDDTTEEQGYGMAYTVHKWSELSWASHWVTFGCWIFYRLIG

SEQ ID NO: 46878 - protein, 338 aa, Homo sapiens
MAGDTSLSENYAFAGMYHVFDQHVDEAVPRVRFANDDRHRLACCSLDGSISLCQLVPAPPTVLRVLRGHTRGVSDFAWSLSNDILVSTSLDATMRIWASEDGRCIREIPDPDSAELLCCTFQPVNNNLTVVGNAKHNVHVMNISTGKKVKGGSSKLTGRVLALSFDAPGRLLWAGDDRGSVFSFLFDMATGKLTKAKRLVVHEGSPVTSISARSWVSREARDPSLLINACLNKLLLYRVVDNEGTLQLKRSFPIEQSSHPVRSIFCPLMSFRQGACVVTGSEDMCVHFFDVERAAKAAVNKLQGHSAPVLDVSFNCDESLLASSDASGMVIVWRREQK

SEQ ID NO: 46879 - protein, 1153 aa, Homo sapiens
MEEDLIVGLQGMDLNLEAEALAGTGLVLDEQLNEFHCLWDDSFPEGPERLHAIKEQLIQEGLLDRCVSFQARFAEKEELMLVHSLEYIDLMETTQYMNEGELRVLADTYDSVYLHPNSYSCACLASGSVLRLVDAVLGAEIRNGMAIIRPPGHHAQHSLMDGYCMFNHVAVAARYAQQKHRIRRVLIVDWDVHHGQGTQFTFDQDPSVLYFSIHRYEQGRFWPHLKASNWSTTGFGQGQGYTINVPWNQVGMRDADYIAAFLHVLLPVALEFQPQLVLVAAGFDALQGDPKGEMAATPAGFAQLTHLLMGLAGGKLILSLEGGYNLRALAEGVSASLHTLLGDPCPMLESPGAPCRSAQASVSCALEALEPFWEVLVRSTETVERDNMEEDNVEESEEEGPWEPPVLPILTWPVLQSRTGLVYDQNMMNHCNLWDSHHPEVPQRILRIMCRLEELGLAGRCLTLTPRPATEAELLTCHSAEYVGHLRATEKMKTRELHRESSNFDSIYICPSTFACAQLATGAACRLVEAVLSGEVLNGAAVVRPPGHHAEQDAACGFCFFNSVAVAARHAQTISGHALRILIVDWDVHHGNGTQHMFEDDPSVLYVSLHRYDHGTFFPMGDEGASSQIGRAAGTGFTVNVAWNGPRMGDADYLAAWHRLVLPIAYEFNPELVLVSAGFDAARGDPLGGCQVSPEGYAHLTHLLMGLASGRIILILEGGYNLTSISESMAACTRSLLGDPPPLLTLPRPPLSGALASITETIQVHRRYWRSLRVMKVEDREGPSSSKLVTKKAPQPAKPRLAERMTTREKKVLEAGMGKVTSASFGEESTPGQTNSETAVVALTQDQPSEAATGGATLAQTISEAAIGGAMLGQTTSEEAVGGATPDQTTSEETVGGAILDQTTSEDAVGGATLGQTTSEEAVGGATLAQTTSEAAMEGATLDQTTSEEAPGGTELIQTPLASSTDHQTPPTSPVQGTTPQISPSTLIGSLRTLELGSESQGASESQAPGEENLLGEAAGGQDMADSMLMQGSRGLTDQAIFYAVTPLPWCPHLVAVCPIPAAGLDVTQPCGDCGTIQENWVCLSCYQVYCGRYINGHMLQHHGNSGHPLVLSYIDLSAWCYYCQAYVHHQALLDVKNIAHQNKFGEDMPHPH

SEQ ID NO: 46880 - protein, 144 aa, Homo sapiens [sequence omitted]

SEQ ID NO: 46881 - protein, 152 aa, Homo sapiens
MAEVLKGLTCLLLLFAQKRGNVKHLVLFLHEAVLVQYVDTLKLAVPSLIYTLQNNLQYVAISNLPAATFQPSPRCSQSHSLCLCLRLRALRSPAASRAATTTAAVFPPWRPHHGALSAKVAHQGEGFLAAGIEDIGLASFSLLALGPAGTKL

SEQ ID NO: 46882 - protein, 170 aa, Homo sapiens
MAEVLKGLTCLLLLFAQKRGNVKHLVLFLHEAVLVQYVDTLKLAVPSLIYTLQNNLQYVAISNLPAATFQPSPRCSQSHSLCLCLRLRALRSPAASRAATTTAAVFPPWRPHHGALSAKVSAGEVRAGSNGGTQGRGTGVEGVGHLQDPSRHPPGPGSSGFGRWSFLPGH

SEQ ID NO: 46883 - protein, 321 aa, Homo sapiens
MAEVLKGLTCLLLLFAQKRGNVKHLVLFLHEAVLVQYVDTLKLAVPSLIYTLQNNLQYVAISNLPAATFQVTYQLKILTTALFSVLMLNRSLSRLQWASLLLLFTGVAIVQAQQAGGGGPRPLDQNPGAGLAAVVASCLSSGFAGVYFEKILKGSSGSVWLRNLQLGLFGTALGLVGLWWAEGTAVATRGFFFGYTPAVWGVVLNQAFGGLLVAVVVKYADNILKGFATSLSIVLSTVASIRLFGFHVDPLFALGAGLVIGAVYLYSLPRGAAKAIASASASASGPCVHQQPPGQPPPPQLSSHRGDLITEPFLPKSVLVK

SEQ ID NO: 46884 - protein, 546 aa, Homo sapiens
MPPAPRRGGGVGVGGGGTGVGGGDRDRDSGVVGARPRASPPPQGPLPGPPGALHRWALAVPPGAVAGPRPQQASPPPCGGPGGPGGGPGDALGAAAAGVGAAGVVVGVGGAVGVGGCCSGPGHSKRRRQAPGVGAVGGGSPEREEVGAGYNSEDEYEAAAARIEAMDPATVEQQEHWFEKALRDKKGFIIKQMKEDGACLFRAVADQVYGDQDMHEVVRKHCMDYLMKNADYFSNYVTEDFTTYINRKRKNNCHGNHIEMQAMAEMYNRPVEVYQYSTGTSAVEPINTFHGIHQNEDEPIRVSYHRNIHYNSVVNPNKATIGVGLGLPSFKPGFAEQSLMKNAIKTSEESWIEQQMLEDKKRATDWEATNEAIEEQVARESYLQWLRDQEKQARQVRGPSQPRKASATCSSATAAASSGLEEWTSRSPRQRSSASSPEHPELHAELGMKPPSPGTVLALAKPPSPCAPGTSSQFSAGADRATSPLVSLYPALECRALIQQMSPSAFGLNDWDDDEILASVLAVSQQEYLDSMKKNKVHRDPPPDKS

SEQ ID NO: 46885 - protein, 558 aa, Homo sapiens
MFRHVLNFYRTGRLHCPRQECIQAFDEELAFYGLVPELVGDCCLEEYRDRKKENAERLAEDEEAEQAGDGPALPAGSSLRQRLWRAFENPHTSTAALVFYYVTGFFIAVSVIANVVETIPCRGSARRSSREQPCGERFPQAFFCMDTACVLIFTGEYLLRLFAAPSRCRFLRSVMSLIDVVAILPYYIGLLVPKNDDVSGAFVTLRVFRVFRIFKFSRHSQGLRILGYTLKSCASELGFLLFSLTMAIIIFATVMFYAEKGTNKTNFTSIPAAFWYTIVTMTTLGYGDMVPSTIAGKIFGSICSLSGVLVIALPVPVIVSNFSRIYHQNQRADKRRAQQKVRLARIRLAKSGTTNAFLQYKQNGGLEDSGSGEEQALCVRNRSAFEQQHHHLLHCLEKTTCHEFTDELTFSEALGAVSPGGRTSRSTSVSSQPVGPGSLLSSCCPRRAKRRAIRLANSTASVSRGSMQELDMLAGLRRSHAPQSRSSLNAKPHDSLDLNCDSRDFVAAIISIPTPPANTPDESQPSSPGGGGRAGSTLRNSSLGTPCLFPETVKISSL

SEQ ID NO: 46886 - protein, 19 aa, Homo sapiens
MHQLPFQIHEGGLTLLCFP

SEQ ID NO: 46887 - protein, 735 aa, Homo sapiens
MEQLEQENQQLKEGAAGAGVAQAGPLVDGELLRLQAENTALQKNVAALQERYGKEAGKFSAVSEGQGDPPGGLAPTVLAPMPLAEVELKWEMEKEEKRLLWEQLQGLESSKQAETSRLQEELAKLSEKLKKKQESFCRLQTEKETLFNDSRNKIEELQQRKEADHKAQLARTQKLQQELEAANQSLAELRDQRQGERLEHAAALRALQDQVSIQSADAQEQVEGLLAENNALRTSLAALEQIQTAKTQELNMLREQTTGLAAELQQQQAEYEDLMGQKDDLNSQLQESLRANSRLLEQLQEIGQEKEQLTQELQEARKSAEKRKAMLDELAMETLQEKSQHKEELGAVRLRHEKEVLGVRARYERELRELHEDKKRQEEELRGQIREEKARTRELETLQQTVEELQAQVHSMDGAKGWFERRLKEAEESLQQQQQEQEEALKQCREQHAAELKGKEEELQDVRDQLEQAQEERDCHLKTISSLKQEVKDTVDGQRILEKKGSAALKDLKRQLHLERKRADKLQERLQDILTNSKSRSGLEELVLSEMNSPSRTQTGDSSSISSFSYREILREKESSAVPARSLSSSPQAQPPRPAELSDEEVAELFQRLAETQQEKWMLEEKVKHLEVSSASMAEDLCRKSAIIETYVMDSRIDVSVAAGHTDRSGLGSVLRDLVKPGDENLREMNKKLQNMLEEQLTKNMHLHKDMEVLSQEIVRLSKECVGPPDPDLEPGETS

SEQ ID NO: 46888 - protein, 455 aa, Homo sapiens [sequence omitted]

SEQ ID NO: 46889 - protein, 347 aa, Homo sapiens
METGVRIYNVEPLMEKGHLDHEQVGSMGLVEMLHRSNLLALVGGGSSPKFSEISVLIWDDAREGKDSKEKLVLEFTFTKPVLSVRMRHDKIVIVLKNRIYVYSFPDNPRKLFEFDTRDNPKAAHPTPHLHTLGLCDLCPSLEKQLLVFPGHKCGSLQLVDLASTKPGTSSAPFTINAHQSDIACVSLNQPGTVVASASQKGTLIRLFDTQSKEKLVELRRGTDPATLYCINFSHDSSFLCASSDKGTVHIFALKDTRLNRRSALARVGKVGPMIGQYVDSQWSLASFTVPAESACICAFGRNTSKNVNSVIAICVDGTFHKYVFTPDGNCNREAFDVYLDICDDDDF

SEQ ID NO: 46890 - protein, 280 aa, Homo sapiens
MGLVEMLHRSNLLALVGGGSSPKFSEISVLIWDDAREGKDSKEKLVLEFTFTKPVLSVRMRHDKIVIVLKNRIYVYSFPDNPRKLFEFDTRDNPKGLCDLCPSLEKQLLVFPGHKCGSLQLVPGTVVASASQKGTLIRLFDTQSKEKLVELRRGTDPATLYCINFSHDSSFLCASSDKGTVHIFALKDTRLNRRSALARVGKVGPMIGQYVDSQWSLASFTVPAESACICAFGRNTSKNVNSVIAICVDGTFHKYVFTPDGNCNREAFDVYLDICDDDDF

SEQ ID NO: 46891 - protein, 336 aa, Homo sapiens [sequence omitted]

SEQ ID NO: 46892 - protein, 809 aa, Homo sapiens [sequence omitted]

SEQ ID NO: 46893 - protein, 392 aa, Homo sapiens
MSTSELISELFNDCGLLDSSKLCDYENRFNTSKGGELPDRPAGVGVYSAMWQLALTLILKIVITIFTFGMKAQFLPPVLCWSGEFRLLPDGPRIRIPSGLFIPSMAVGAIAGRLLGVGMEQLAYYHQEWTVFNSWCSQGADCITPGLYAMVGAAACLGGVTRMTVSLVVIMFELTGGLEYIVPLMAAAMTSKWVADALGREGIYDAHIRLNGYPFLEAKEEFAHKTLAMDVMKPRRNDPLLTVLTQDSMTVEDVETIISETTYSGFPVVVSRESQRLVGFVLRRDLIISIENARKKQDGVVSTSIIYFTEHSPPLPPYTPPTLKLRNILDLSPFTVTDLTPMEIVVDIFRKLGLRQCLVTHNGRLLGIITKKDVLKHIAQMANQDPDSILFN

SEQ ID NO: 46894 - protein, 1392 aa, Homo sapiens
MYQSGANLVQCNTRPFDNEEKDKEYKPHSIPLRQSVQPSKFNSYGRRAKRLQPDPEPTEEDIEKNPELKKLQIYGAGPKMMGLGLMAKDKTLRKKDKEGPECPPTVVVKEELGGDVKVESTSPKTFLESKEELSHSPEPCTKMTMRLRRNHSNAQFIESYVCRMCSRGDEDDKLLLCDGCDDNYHIFCLLPPLPEIPKGVWRCPKCVMAECKRPPEAFGFEQATREYTLQSFGEMADSFKADYFNMPVHMVPTELVEKEFWRLVNSIEEDVTVEYGADIHSKEFGSGFPVSDSKRHLTPEEEEYATSGWNLNVMPVLEQSVLCHINADISGMKVPWLYVGMVFSAFCWHIEDHWSYSINYLHWGEPKTWYGVPSLAAEHLEEVMKKLTPELFDSQPDLLHQLVTLMNPNTLMSHGVPVVRTNQCAGEFVITFPRAYHSGFNQGYNFAEAVNFCTADWLPAGRQCIEHYRRLRRYCVFSHEELICKMAACPEKLDLNLAAAVHKEMFIMVQEERRLRKALLEKGITEAEREAFELLPDDERQCIKCKTTCFLSALACYDCPDGLVCLSHINDLCKCSSSRQYLRYRYTLDELPAMLHKLKVRAESFDTWANKVRVALEVEDGRKRSLEELRALESEARERRFPNSELLQQLKNCLSEAEACVSRALGLVSGQEAGPHRVAGLQMTLTELRAFLDQMNNLPCAMHQIGDVKGVLEQVEAYQAEAREALASLPSSPGLLQSLLERGRQLGVEVPEAQQLQRQVEQARWLDEVKRTLAPSARRGTLAVMRGLLVAGASVAPSPAVDKAQAELQELLTIAERWEEKAHLCLEARQKHPPATLEAIIREAENIPVHLPNIQALKEALAKARAWIADVDEIQNGDHYPCLDDLEGLVAVGRDLPVGLEELRQLELQVLTAHSWREKASKTFLKKNSCYTLLEVLCPCADAGSDSTKRSRWMEKELGLYKSDTELLGLSAQDLRDPGSVIVAFKEGEQKEKEGILQLRRTNSAKPSPLASSSTASSTTSICVCGQVLAGAGALQCDLCQDWFHGRCVSVPRLLSSPRPNPTSSPLLAWWEWDTKFLCPLCMRSRRPRLETILALLVALQRLPVRLPEGEALQCLTERAISWQGRARQALASEDVTALLGRLAELRQRLQAEPRPEEPPNYPAAPASDPLREGSGKDMPKVQGLLENGDSVTSPEKVAPEEGSDLELLSSLLPQLTGPVLELPEATRAPLEELMMEGDLLEVTLDENHSIWQLLQAGQPPDLERIRTLLELEKAERHGSRARGRALERRRRRKVDRGGEGDDPAREELEPKRVRSSGPEAEEVQEEEELEEETGGEGPPAPIPTTGSPSTQENQNGLEPAEGTTSGPSAPFSTLTPRLHLPCPQQPPQQQL

SEQ ID NO: 46895 - protein, 1395 aa, Homo sapiens
MYQSGANLVQCNTRPFDNEEKDKEYKPHSIPLRQSVQPSKFNSYGRRAKRLQPDPEPTEEDIEKNPELKKLQIYGAGPKMMGLGLMAKDKTLRKKDKEGPECPPTVVVKEELGGDVKVESTSPKTFLESKEELSHSPEPCTKMTMRLRRNHSNAQFIESYVCRMCSRGDEDDKLLLCDGCDDNYHIFCLLPPLPEIPKGVWRCPKCVMAECKRPPEAFGFEQATREYTLQSFGEMADSFKADYFNMPVHMVPTELVEKEFWRLVNSIEEDVTVEYGADIHSKEFGSGFPVSDSKRHLTPEEEEYATSGWNLNVMPVLEQSVLCHINADISGMKVPWLYVGMVFSAFCWHIEDHWSYSINYLHWGEPKTWYGVPSLAAEHLEEVMKKLTPELFDSQPDLLHQLVTLMNPNTLMSHGVPVVRTNQCAGEFVITFPRAYHSGFNQGYNFAEAVNFCTADWLPAGRQCIEHYRRLRRYCVFSHEELICKMAACPEKLDLNLAAAVHKEMFIMVQEERRLRKALLEKGITEAEREAFELLPDDERQCIKCKTTCFLSALACYDCPDGLVCLSHINDLCKCSSSRQYLRYRYTLDELPAMLHKLKVRAESFDTWANKVRVALEVEDGRKRSLEELRALESEARERRFPNSELLQQLKNCLSEAEACVSRALGLVSGQEAGPHRVAGLQMTLTELRAFLDQMNNLPCAMHQIGDVKGVLEQVEAYQAEAREALASLPSSPGLLQSLLERGRQLGVEVPEAQQLQRQVEQARWLDEVKRTLAPSARRGTLAVMRGLLVAGASVAPSPAVDKAQAELQELLTIAERWEEKAHLCLEARQKHPPATLEAIIREAENIPVHLPNIQALKEALAKARAWIADVDEIQNGDHYPCLDDLEGLVAVGRDLPVGLEELRQLELQVLTAHSWREKASKTFLKKNSCYTLLEVLCPCADAGSDSTKRSRWMEKELGLYKSDTELLGLSAQDLRDPGSVIVAFKEGEQKEKEGILQLRRTNSAKPSPLASSSTASSTTSICVCGQVLAGAGALQCDLCQDWFHGRCVSVPRLLSSPRPNPTSSPLLAWWEWDTKFLCPLCMRSRRPRLETILALLVALQRLPVRLPEGEALQCLTERAISWQGRARQALASEDVTALLGRLAELRQRLQAEPRPEEPPNYPAAPASDPLREGSGKDMPKVQGLLENGDSVTSPEKVAPEEGSGKRDLELLSSLLPQLTGPVLELPEATRAPLEELMMEGDLLEVTLDENHSIWQLLQAGQPPDLERIRTLLELEKAERHGSRARGRALERRRRRKVDRGGEGDDPAREELEPKRVRSSGPEAEEVQEEEELEEETGGEGPPAPIPTTGSPSTQENQNGLEPAEGTTSGPSAPFSTLTPRLHLPCPQQPPQQQL

SEQ ID NO: 46896 - protein, 921 aa, Homo sapiens [sequence omitted]

SEQ ID NO: 46897 - protein, 4300 aa, Homo sapiens
MSWMLVCDRPEREQLKMLLLAVLNFTALLIEYSFSRHLYSSIEHLTTLLASSDMQVVLAVLNLLYVFSKRSNYITRLGSDKRTPLLTRLQHLAESWGGKENGFGLAECCRDLHMMKYPPSATTLHFEFYADPGAEVKIEKRTTSNTLHYIHIEQLDKISESPSEIMESLTKMYSIPKDKQMLLFTHIRLAHGFSNHRKRLQAVQARLHAISILVYSNALQESANSILYNGLIEELVDVLQITDKQLMEIKAASLRTLTSIVHLERTPKLSSIIDCTGTASYHGFLPVLVRNCIQAMIDPSMDPYPHQFATALFSFLYHLASYDAGGEALVSCGMMEALLKVIKFLGDEQDQITFVTRAVRVVDLITNLDMAAFQSHSGLSIFIYRLEHEVDLCRKECPFVIKPKIQRPNTTQEGEEMETDMDGVQCIPQRAALLKSMLNFLKKAIQDPAFSDGIRHVMDGSLPTSLKHIISNAEYYGPSLFLLATEVVTVFVFQEPSLLSSLQDNGLTDVMLHALLIKDVPATREVLGSLPNVFSALCLNARGLQSFVQCQPFERLFKVLLSPDYLPAMRRRRSSDPLGDTASNLGSAVDELMRHQPTLKTDATTAIIKLLEEICNLGRDPKYICQKPSIQKADGTATAPPPRSNHAAEEASSEDEEEEEVQAMQSFNSTQQNETEPNQQVVGTEERIPIPLMDYILNVMKFVESILSNNTTDDHCQEFVNQKGLLPLVTILGLPNLPIDFPTSAACQAVAGVCKSILTLSHEPKVLQEGLLQLDSILSSLEPLHRPIESPGGSVLLRELACAGNVADATLSAQATPLLHALTAAHAYIMMFVHTCRVGQSEIRSISVNQWGSQLGLSVLSKLSQLYCSLVWESTVLLSLCTPNSLPSGCEFGQADMQKLVPKDEKAGTTQGGKRSDGEQDGAAGSMDASTQGLLEGIGLDGDTLAPMETDEPTASDSKGKSKITPAMAARIKQIKPLLSASSRLGRALAELFGLLVKLCVGSPVRQRRSHHAASTTTAPTPAARSTASALTKLLTKGLSWQPPPYTPTPRFRLTFFICSVGFTSPMLFDERKYPYHLMLQKFLCSGGHNALFETFNWALSMGGKVPVSEGLEHSDLPDGTGEFLDAWLMLVEKMVNPTTVLESPHSLPAKLPGGVQNFPQFSALRFLVVTQKAAFTCIKNLWNRKPLKVYGGRMAESMLAILCHILRGEPVIRERLSKEKEGSRGEEDTGQEEGGSRREPQVNQQQLQQLMDMGFTREHAMEALLNTSTMEQATEYLLTHPPPIMGGVVRDLSMSEEDQMMRAIAMSLGQDIPMDQRAESPEEVACRKEEEERKAREKQEEEEAKCLEKFQDADPLEQDELHTFTDTMLPGCFHLLDELPDTVYRVCDLIMTAIKRNGADYRDMILKQVVNQVWEAADVLIKAALPLTTSDTKTVSEWISQMATLPQASNLATRILLLTLLFEELKLPCAWVVESSGILNVLIKLLEVVQPCLQAAKEQKEVQTPKWITPVLLLIDFYEKTAISSKRRAQMTKYLQSNSNNWRWFDDRSGRWCSYSASNNSTIDSAWKSGETSVRFTAGRRRYTVQFTTMVQVNEETGNRRPVMLTLLRVPRLNKNSKNSNGQELEKTLEESKEMDIKRKENKGNDTPLALESTNTEKETSLEETKIGEILIQGLTEDMVTVLIRACVSMLGVPVDPDTLHATLRLCLRLTRDHKYAMMFAELKSTRMILNLTQSSGFNGFTPLVTLLLRHIIEDPCTLRHTMEKVVRSAATSGAGSTTSGVVSGSLGSREINYILRVLGPAACRNPDIFTEVANCCIRIALPAPRGSGTASDDEFENLRIKGPNAVQLVKTTPLKPSPLPVIPDTIKEVIYDMLNALAAYHAPEEADKSDPKPGVMTQEVGQLLQDMGDDVYQQYRSLTRQSSDFDTQSGFSINSQVFAADGASTETSASGTSQGEASTPEESRDGKKDKEGDRASEEGKQKGKGSKPLMPTSTILRLLAELVRSYVGIATLIANYSYTVGQSELIKEDCSVLAFVLDHLLPHTQNAEDKDTPALARLFLASLAAAGSGTDAQVALVNEVKAALGRALAMAESTEKHARLQAVMCIISTIMESCPSTSSFYSSATAKTQHNGMNNIIRLFLKKGLVNDLARVPHSLDLSSPNMANTVNAALKPLETLSRIVNQPSSLFGSKSASSKNKSEQDAQGASQDSSSNQQDPGEPGEAEVQEEDHDVTQTEVADGDIMDGEAETDSVVIAGQPEVLSSQEMQVENELEDLIDELLERDGGSGNSTIIVSRSGEDESQEDVLMDEAPSNLSQASTLQANREDSMNILDPEDEEEHTQEEDSSGSNEDEDDSQDEEEEEEEDEEDDQEDDEGEEGDEDDDDDGSEMELDEDYPDMNASPLVRFERFDREDDLIIEFDNMFSSATDIPPSPGNIPTTHPLMVRHADHSSLTLGSGSSTTRLTQGIGRSQRTLRQLTANTGHTIHVHYPGNRQPNPPLILQRLLGPSAAADILQLSSSLPLQSRGRARLLVGNDDVHIIARSDDELLDDFFHDQSTATSQAGTLSSIPTALTRWTEECKVLDAESMHDCVSVVKVSIVNHLEFLRDEELEERREKRRKQLAEEETKITDKGKEDKENRDQSAQCTASKSNDSTEQNLSDGTPMPDSYPTTPSSTDAATSESKETLGTLQSSQQQPTLPTPPALGEVPQELQSPAGEGGSSTQLLMPVEPEELGPTRPSGEAETTQMELSPAPTITSLSPERAEDSDALTAVSSQLEGSPMDTSSLASCTLEEAVGDTSAAGSSEQPRAGSSTPGDAPPAVAEVQGRSDGSGESAQPPEDSSPPASSESSSTRDSAVAISGADSRGILEEPLPSTSSEEEDPLAGISLPEGVDPSFLAALPDDIRREVLQNQLGIRPPTRTAPSTNSSAPAVVGNPGVTEVSPEFLAALPPAIQEEVLAQQRAEQQRRELAQNASSDTPMDPVTFIQTLPSDLRRSVLEDMEDSVLAVMPPDIAAEAQALRREQEARQRQLMHERLFGHSSTSALSAILRSPAFTSRLSGNRGVQYTRLAVQRGGTFQMGGSSSHNRPSGSNVDTLLRLRGRLLLDHEALSCLLVLLFVDEPKLNTSRLHRVLRNLCYHAQTRHWVIRSLLSILQRSSESELCIETPKLTTSEEKGKKSSKSCGSSSHENRPLDLLHKMESKSSNQLSWLSVSMDAALGCRTNIFQIQRSGGRKHTEKHASGGSTVHIHPQAAPVVCRHVLDTLIQLAKVFPSHFTQQRTKETNCESDRERGNKACSPCSSQSSSSGICTDFWDLLVKLDNMNVSRKGKNSVKSVPVSAGGEGETSPYSLEASPLGQLMNMLSHPVIRRSSLLTEKLLRLLSLISIALPENKVSEAQANSGSGASSTTTATSTTSTTTTTAASTTPTPPTAPTPVTSAPALVAATAISTIVVAASTTVTTPTTATTTVSISPTTKGSKSPAKVSDGGSSSTDFKMVSSGLTENQLQLSVEVLTSHSCSEEGLEDAANVLLQLSRGDSGTRDTVLKLLLNGARHLGYTLCKQIGTLLAELREYNLEQQRRAQCETLSPDGLPEEQPQTTKLKGKMQSRFDMAENVVIVASQKRPLGGRELQLPSMSMLTSKTSTQKFFLRVLQVIIQLRDDTRRANKKAKQTGRLGSSGLGSASSIQAAVRQLEAEADAIIQMVREGQRARRQQQAATSESSQSEASVRREESPMDVDQPSPSAQDTQSIASDGTPQGEKEKEERPPELPLLSEQLSLDELWDMLGECLKELEESHDQHAVLVLQPAVEAFFLVHATERESKPPVRDTRESQLAHIKDEPPPLSPAPLTPATPSSLDPFFSREPSSMHISSSLPPDTQKFLRFAETHRTVLNQILRQSTTHLADGPFAVLVDYIRVLDFDVKRKYFRQELERLDEGLRKEDMAVHVRRDHVFEDSYRELHRKSPEEMKNRLYIVFEGEEGQDAGGLLREWYMIISREMFNPMYALFRTSPGDRVTYTINPSSHCNPNHLSYFKFVGRIVAKAVYDNRLLECYFTRSFYKHILGKSVRYTDMESEDYHFYQGLVYLLENDVSTLGYDLTFSTEVQEFGVCEVRDLKPNGANILVTEENKKEYVHLVCQMRMTGAIRKQLAAFLEGFYEIIPKRLISIFTEQELELLISGLPTIDIDDLKSNTEYHKYQSNSIQIQWFWRALRSFDQADRAKFLQFVTGTSKVPLQGFAALEGMNGIQKFQIHRDDRSTDRLPSAHTCFNQLDLPAYESFEKLRHMLLLAIQECSEGFGLA

SEQ ID NO: 46898 - protein, 137 aa, Homo sapiens [sequence omitted]

SEQ ID NO: 46899 - protein, 1290 aa, Homo sapiens
MKRVTAKAAQGSQSPTGHEGGTIQLKSPLQVLKLPVISQNIHAPIANESASSQALITSIKPKKASKAKKAANKAIASATEVSLAATATHTATTQGQITNETASIHTTAASIRTKKASKARKTIAKVINTDTEHIEALNVTDAATRQIEASVVAIRPKKSKGKKAASRGPNSVSEISEAPLATQIVTNQALAATLRVKRGSRARKAATKARATESQTPNADQGAQAKIASAQTNVSALETQVAAAVQALADDYLAQLSLEPTTRTRGKRNRKSKHLNGDERSGSNYRRIPWGRRPAPPRDVAILQERANKLVKYLLVKDQTKIPIKRSDMLRDVIQEYDEYFPEIIERASYTLEKMFRVNLKEIDKQSSLYILISTQESSAGILGTTKDTPKLGLLMVILSVIFMNGNKASEAVIWEVLRKLGLRPGVRHSLFGEVRKLITDEFVKQKYLEYKRVPNSRPPEYEFFWGLRSYHETSKMKVLKFACRVQKKDPKDWAVQYREAVEMEVQAAAVAVAEAEARAEARAQMGIGEEAVAGPWNWDDMDIDCLTREELGDDAQAWSRFSFEIEARAQENADASTNVNFSRGASTRAGFSDGASISFNGAPSSSGGFSGGPGITFGVAPSTSASFSNTASISFGGTLSTSSSFSSAASISFGCAHSTSTSFSSEASISFGGMPCTSASFSGGVSSSFSGPLSTSATFSGGASSGFGGTLSTTAGFSGVLSTSTSFGSAPTTSTVFSSALSTSTGFGGILSTSVCFGGSPSSSGSFGGTLSTSICFGGSPCTSTGFGGTLSTSVSFGGSSSTSANFGGTLSTSICFDGSPSTGAGFGGALNTSASFGSVLNTSTGFGGAMSTSADFGGTLSTSVCFGGSPGTSVSFGSALNTNAGYGGAVSTNTDFGGTLSTSVCFGGSPSTSAGFGGALNTNASFGCAVSTSASFSGAVSTSACFSGAPITNPGFGGAFSTSAGFGGALSTAADFGGTPSNSIGFGAAPSTSVSFGGAHGTSLCFGGAPSTSLCFGSASNTNLCFGGPPSTSACFSGATSPSFCDGPSTSTGFSFGNGLSTNAGFGGGLNTSAGFGGGLGTSAGFSGGLSTSSGFDGGLGTSAGFGGGPGTSTGFGGGLGTSAGFSGGLGTSAGFGGGLVTSDGFGGGLGTNASFGSTLGTSAGFSGGLSTSDGFGSRPNASFDRGLSTIIGFGSGSNTSTGFTGEPSTSTGFSSGPSSIVGFSGGPSTGVGFCSGPSTSGFSGGPSTGAGFGGGPNTGAGFGGGPSTSAGFGSGAASLGACGFSYG

SEQ ID NO: 46900 - protein, 403 aa, Homo sapiens [sequence omitted]

SEQ ID NO: 46901 - protein, 139 aa, Homo sapiens
MRSIIFANYIARDTRRLGATIDVEHSHVRFLGNLVLNLWDCGGQDTFMENYFTSQRDNIFRNVEVLIYVFDVESRELEKDMHYYQSCLEAILQNSPDAKIFCLVHKMDLVQEDQRDLVRNRRSAAPNARHALQTYFVEV

SEQ ID NO: 46902 - protein, 232 aa, Homo sapiens
MIKRKAAHKKHRSRPTSQPRGNIVGCRIQHGWKDGDEPLTQWKGTVLDQVPVNPSLYLIKYDGFDCVYGLELHRDERVSSLEVLPNRVASSRISDTHLAEIMVGKAVEHIFETEEGSKNEWRGMVLAQAPVMNTWFYITYEKDPVLYMYQLLDDYKDGDLRILQDSNDSPLAEREPGEVIDSLVGKQVEYAKDDGSKRTGMVIHQVEAKPSVYFIKFDDDFHIYVYDLVKTS

SEQ ID NO: 46903 - protein, 378 aa, Homo sapiens [sequence omitted]

SEQ ID NO: 46904 - protein, 702 aa, Homo sapiens
MDLVWSAWYGKCVKGKGSLPLSAHGIVVAWLSRAEWDQVTVYLFCDDHKLQRYALNRITVWRSRSGNELPLAVASTADLIRCKLLDVTGGLGTDELRLLYGMALVRFVNLISERKTKFAKVPLKCLAQEVNIPDWIVDLRHELTHKKMPHINDCRRGCYFVLDWLQKTYWCRQLENSLRETWELEEFREGIEEEDQEEDKNIVVDDITEQKPEPQDDGKSTESDVKADGDSKGSEEVDSHCKKALSHKELYERARELLVSYEEEQFTVLEKFRYLPKAIKAWNNPSPRVECVLAELKGVTCENREAVLDAFLDDGFLVPTFEQLAALQIEYEENVDLNDVLVPKPFSQFWQPLLRGLHSQNFTQALLERMLSELPALGISGIRPTYILRWTVELIVANTKTGRNARRFSAGQWEARRGWRLFNCSASLDWPRMVESCLGSPCWASPQLLRIIFKAMGQGLPDEEQEKLLRICSIYTQSGENSLVQEGSEASPIGKSPYTLDSLYWSVKPASSSFGSEAKAQQQEEQGSVNDVKEEEKEEKEVLPDQVEEEEENDDQEEEEEDEDDEDDEEEDRMEVGPFSTGQESPTAENARLLAQKRGALQGSAWQVSSEDVRWDTFPLGRMPGQTEDPAELMLENYDTMYLLDQPVLEQRLEPSTCKTDTLGLSCGVGSGNCSNSSSSNFEGLLWSQGQLHGLKTGLQLF

SEQ ID NO: 46905 - protein, 1146 aa, Homo sapiens
MQSLWPQLTDGATRVYYLGIRDVQWNYAPKGRNVITNQPLDSDIVASSFLKSDKNRIGGTYKKTIYKEYKDDSYTDEVAQPAWLGFLGPVLQAEVGDVILIHLKNFATRPYTIHPHGVFYEKDSEGSLYPDGSSGPLKADDSVPPGGSHIYNWTIPEGHAPTDADPACLTWIYHSHVDAPRDIATGLIGPLITCKRGALDGNSPPQRQDVDHDFFLLFSVVDENLSWHLNENIATYCSDPASVDKEDETFQESNRMHAINGFVFGNLPELNMCAQKRVAWHLFGMGNEIDVHTAFFHGQMLTTRGHHTDVANIFPATFVTAEMVPWEPGTWLISCQVNSHFRDGMQALYKVKSCSMAPPVDLLTGKVRQYFIEAHEIQWDYGPMGHDGSTGKNLREPGSISDKFFQKSSSRIGGTYWKVRYEAFQDETFQEKMHLEEDRHLGILGPVIRAEVGDTIQVVFYNRASQPFSMQPHGVFYEKDYEGTVYNDGSSYPGLVAKPFEKVTYRWTVPPHAGPTAQDPACLTWMYFSAADPIRDTNSGLVGPLLVCRAGALGADGKQKGVDKEFFLLFTVLDENKSWYSNANQAAAMLDFRLLSEDIEGFQDSNRMHAINGFLFSNLPRLDMCKGDTVAWHLLGLGTETDVHGVMFQGNTVQLQGMRKGAAMLFPHTFVMAIMQPDNLGTFEIYCQAGSHREAGMRAIYNVSQCPGHQATPRQRYQAARIYYIMAEEVEWDYCPDRSWEREWHNQSEKDSYGYIFLSNKDGLLGSRYKKAVFREYTDGTFRIPRPRTGPEEHLGILGPLIKGEVGDILTVVFKNNASRPYSVHAHGVLESTTVWPLAAEPGEVVTYQWNIPERSGPGPNDSACVSWIYYSAVDPIKDMYSGLVGPLAICQKGILEPHGGRSDMDREFALLFLIFDENKSWYLEENVATHGSQDPGSINLQDETFLESNKMHAINGKLYANLRGLTMYQGERVAWYMLAMGQDVDLHTIHFHAESFLYRNGENYRADVVDLFPGTFEVVEMVASNPGTWLMHCHVTDHVHAGMETLFTVFSRTEHLSPLTVITKETEKAVPPRDIEEGNVKMLGMQIPIKNVEMLASVLVAISVTLLLVVLALGGVVWYQHRQRKLRRNRRSILDDSFKLLSFKQ

SEQ ID NO: 46906 - protein, 21 aa, Homo sapiens
MGLARSAASPRSSKYTEQGPR

SEQ ID NO: 46907 - protein, 96 aa, Homo sapiens
MSDTAVADTRRLNSKPQDLTDAYGPPSNFLEIDIFNPQTVGVGRARFTTYEVRMRTNLPIFKLKESCVRRRYSDFEWLKNELERDSKNCWAPTGSE

SEQ ID NO: 46908 - protein, 502 aa, Homo sapiens
MLSYVWPKDRPDLRARVAISLGFLGGAKAMNIVVPFMFKYAVDSLNQMSGNMLNLSDAPNTVATMATAVLIGYGVSRAGAAFFNEVRNAVFGKVAQNSIRRIAKNVFLHLHNLDLGFHLSRQTGALSKAIDRGTRGISFVLSALVFNLLPIMFEVMLVSGVLYYKCGAQFALVTLGTLGTYTAFTVAVTRWRTRFRIEMNKADNDAGNAAIDSLLNYETVKYFNNERYEAQRYDGFLKTYETASLKSTSTLAMLNFGQSAIFSVGLTAIMVLASQGIVAGTLTVGDLVMVNGLLFQLSLPLNFLGTVYRETRQALIDMNTLFTLLKVDTQIKDKVMASPLQITPQTATVAFDNVHFEYIEGQKVLSGISFEVPAGKKVAIVGGSGSGKSTIVRLLFRFYEPQKGSIYLAGQNIQDVSLESLRRAVGVVPQDAVLFHNTIYYNLLYGNISASPEEVYAVAKLAGLHDAILRMPHGYDTQVGERGLKLSGINVGLHIVIRRALD

SEQ ID NO: 46909 - protein, 246 aa, Homo sapiens
MAPPKNAPRDALVMAQILKDMGITEYEPRVINQMLEFAFRYVTTILDDAKIYSSHAKKPNVDADDVRLAIQCRADQSFTSPPPRDFLLDIARQKNQTPLPLIKPYAGPRLPPDRYCLTAPNYRLKSLIKKGPNQGRLVPRLSVGAVSSKPTTPTIATPQTVSVPNKVATPMSVTSQRFTVQIPPSQSTPVKPVPATTAVQNVLINPSMIGPKNILITTNMVSSQNTANEANPLKRKHEDDDDNDIM

SEQ ID NO: 46910 - protein, 484 aa, Homo sapiens
MTVPQKPSVCHRPCKIEPVGIQRSYKPEHTGPALHNLCGQKPTIRDPYCRTQNLEIREVFSLAVSDYPQRILGGNAPQKPSSAEGNCLSIAMETGDAEDEYAREEELASMRAQIPSYSRFYESGSSLRAENQSTTLPGPGRNMPNSQMVNIRDMSDNVLYQNRNYHLTPRTSLHTASSTMYSNTNPLRSNFSPHFASSNQLRLSQNQNNYQISGNLTVPWITGCSRKRALQDRTQFSDRDLATLKKYWDNGMTSLGSVCREKIEAVATELNVDCEIVRTWIGNRRRKYRLMGIEVPPPRGGPADFSEQPESGSLSALTPGEEAGPEVGEDNDRNDEVSICLSEGSSQEEPNEVVPNDARAHKEEDHHAVTTDNVKIEIIDDEESDMISNSEVEQVNSFLDYKNEEVKFIENELEIQKQKYFKLQTFVRSLILAMKADDKEQQQALLSDLPPELEEMDFNHASLEPDDTSFSVSSLSEKNVSESL

SEQ ID NO: 46911 - protein, 505 aa, Homo sapiens
MSCEMLTEQTPSSDPENALEVNGAEVTGEKENHCDDKTCVPSTSAEDMSENVPIAEDTTEQPKKNRITYSQIIKEGRRFNIDLVSKLLYSRGLLIDLLIKSNVSRYAEFKNITRILAFREGRVEQVPCSRADVFNSKQLTMVEKRMLMKFLTFCMEYEKYPDEYKGYEEITFYEYLKTQKLTPNLQYIVMHSIAMTSETASSTIDGLKATKNFLHCLGRYGNTPFLFPLYGQGELPQCFCRMCAVFGGIYCLRHSVQCLVVDKESRKCKAIIDQFGQRIISEHFLVEDSYFPENMCSRVQYRQISRAVLITDRSVLKTDSDQQISILTVPAEEPGTFAVRVIELCSSTMTCMKGTYLVHLTCTSSKTAREDLESVVQKLFVPYTEMEIENEQVEKPRILWALYFNMRDSSDISRSCYNDLPSNVYVCSGPDCGLGNDNAVKQAETLFQEICPNEDFCPPPPNPEDIILDGDSLQPEASESSAIPEANSETFKESTNLGNLEESSE

SEQ ID NO: 46912 - protein, 589 aa, Homo sapiens
MADDNIEDSTARLDTQHSEDMNATRSEEQFHVINHAEQTLRKMENYLKEKQLCDVLLIAGHLRIPAHRLVLSAVSDYFAAMFTNDVLEAKQEEVRMEGVDPNALNSLVQYAYTGVLQLKEDTIESLLAAACLLQLTQVIDVCSNFLIKQLHPSNCLGIRSFGDAQGCTELLNVAHKYTMEHFIEVIKNQEFLLLPANEISKLLCSDDINVPDEETIFHALMQWVGHDVQNRQGELGMLLSYIRLPLLPPQLLADLETSSMFTGDLECQKLLMEAMKYHLLPERRSMMQSPRTKPRKSTVGALYAVGGMDAMKGTTTIEKYDLRTNSWLHIGTMNGRRLQFGVAVIDNKLYVVGGRDGLKTLNTVECFNPVGKIWTVMPPMSTHRHGLGVATLEGPMYAVGGHDGWSYLNTVERWDPEGRQWNYVASMSTPRSTVGVVALNNKLYAIGGRDGSSCLKSMEYFDPHTNKWSLCAPMSKRRGGVGVATYNGFLYVVGGHDAPASNHCSRLSDCVERYDPKGDSWSTVAPLSVPRDAVAVCPLGDKLYVVGGYDGHTYLNTVESYDAQRNEWKEEVPVNIGRAGACVVVVKLP

SEQ ID NO: 46913 - protein, 157 aa, Homo sapiens
MLKLYAMFLTLVFLVELVAAIVGFVFRHEIKNSFKNNYEKALKQYNSTGDYRSHAVDKIQNTLHCCGVTDYRDWTDTNYYSEKGFPKSCCKLEDCTPQRDADKVNNEGCFIKVMTIIESEMGVVAGISFGVACFQLIGIFLAYCLSRAITNNQYEIV

SEQ ID NO: 46914 - protein, 689 aa, Homo sapiens
MAVGYFEKGPIKASQNKDKTLEKHLKTVENVAWKNGLASEEIDILLNIALSGKFGNAVNTRILKCMIPATVISEDSVVKAVSWLCVGKCSGSTKVLFYRWLVAMFDFIDRKEQINLLYGFFFASLQDDALCPYVCHLLYLLTKKENVKPFRVRKLLDLQAKMGMQPHLQALLSLYKFFAPALISVSLPVRKKIYFKNSENLWKTALLAVKQRNRGPSPEPLKLMLGPANVRPLKRKWNSLSVIPVLNSSSYTKECGKKEMSLSDCLNRSGSFPLEQLQSFPQLLQNIHCLELPSQMGSVLNNSLLLHYINCVRDEPVLLRFYYWLSQTLQEECIWYKVNNYEHGKEFTNFLDTIIRAECFLQEGFYSCEAFLYKSLPLWDGLCCRSQFLQLVSWIPFSSFSEVKPLLFDHLAQLFFTSTIYFKCSVLQSLKELLQNWLLWLSMDIHMKPVTNSPLETTLGGSMNSVSKLIHYVGWLSTTAMRLESNNTFLLHFILDFYEKVCDIYINYNLPLVVLFPPGIFYSALLSLDTSILNQLCFIMHRYRKNLTAAKKNELVQKTKSEFNFSSKTYQEFNHYLTSMVGCLWTSKPFGKGIYIDPEILEKTGVAEYKNSLNVVHHPSFLSYAVSFLLQESPEERTVNVSSIRGKKWSWYLDYLFSQGLQGLKLFIRSSVHHSSIPRAEGINCNNQY

SEQ ID NO: 46915 - protein, 379 aa, Homo sapiens
MCNLDCQEEPDSCISEKLFMEMAELMVSEGWKDAGYEYLCIDDCWMAPQRDSEGRLQADPQRFPHGIRQLANYVHSKGLKLGIYADVGNKTCAGFPGSFGYYDIDAQTFADWGVDLLKFDGCYCDSLENLADGYKHMSLALNRTGRSIVYSCEWPLYMWPFQKPNYTEIRQYCNHWRNFADIDDSWKSIKSILDWTSFNQERIVDVAGPGGWNDPDMLVIGNFGLSWNQQVTQMALWAIMAAPLFMSNDLRHISPQAKALLQDKDVIAINQDPLGKQGYQLRQGDNFEVWERPLSGLAWAVAMINRQEIGGPRSYTIAVASLGKGVACNPACFITQLLPVKRKLGFYEWTSRLRSHINPTGTVLLQLENTMQMSLKDLL

SEQ ID NO: 46916 - protein, 161 aa, Homo sapiens
MCNLDCQEEPDSCISEKLFMEMAELMVSEGWKDAGYEYLCIDDCWMAPQRDSEGRLQADPQRFPHGIRQLANYVHSKGLKLGIYADVGNKTCAGFPGSFGYYDIDAQTFADWGVDLLKFDGCYCDSLENLADGNVSFQRFSHKGKNFEAMVAEPKNQSSEF

SEQ ID NO: 46917 - protein, 158 aa, Homo sapiens
MVCRLDSAVQMAGLRLLTNMTVTNHYQHLLSYSFPDFFALLFLGNHFTKIQIMKLIINFTENPAMTRELVSCKVPSELISLFNKEWDREILLNILTLFENINDNIKNEGLASSRKEFSRSSLFFLFKESGVCVKKIKALANHNDLVVKVKVLKVLTKL

SEQ ID NO: 46918 - protein, 595 aa, Homo sapiens
MAKPKNRAVAGTGARARAGLRAGFTIDLGSGFSPPTPVRAEAEDRAQDEASALDTVGAEAVAPAASSAEAQSGAGSQAQEADGAGVGPKAESVVGAAMASAIAPPPGVTEALGAAEAPAMAGAPKVAEAPREAETSRAAVPPGTVVPTEAAAPTEVTEGPGVAAPTKVAEAPGVASPTEAAEAPVPATPTGAAAPTGAAESPGTSGSPRTAVVPGTSAAKKATPGAHTGAIPKATSATGAVPKGGGKGVTRSRNGGKGKGKKSKVEVDELGMGFRPGDGAAAAAAASANGGQAFLAEVPDSEEGESGWTDTESDSDSEPETQRRGRGRRPVAMQKRPFPYEIDEILGVRDLRKVLALLQKSDDPFIQQVALLTLSNNANYSCNQETIRKLGGLPIIANMINKTDPHIKEKALMAMNNLSENYENQGRLQVYMNKVMDDIMASNLNSAVQVVGLKFLTNMTITNDYQHLLVNSIANFFRLLSQGGGKIKVEILKILSNFAENPDMLKKLLSTQVPASFSSLYNSYVESEILINALTLFEIIYDNLRAEVFNYREFNKGSLFYLCTTSGVCVKKIRALANHHDLLVKVKVIKLVNKF

SEQ ID NO: 46919 - protein, 500 aa, Homo sapiens
MTRTHTVTYREAMAVTREVIKVEDTTKTRVMVETKTKPLAERSIVPQTKSKAMPMSRVSTVTKSEVKVVAVIEANIRSYAKSHDKANTGSRPDRREETSIGMKSSDEDEENICSWFWTGEEPSVGSWFWPEEETSLQVYKPLPKIQEKPKPTHKPTLTIKQKVIAWSRARYIVLVPVEGGEQSLPPEGNWTLVETLIETPLGIRPLTKIPPYHGPYYQTLAEIKKQIRQREKYGPNPKACHCKSRGFSLEPKEFDKLVALLKLTKDPFIHEIATMIMGISPAYPFTQDIIHDVGITVMIENLVNNPNVKEHPGALSMVDDSSESSEEPKSGESYIHQVCKGIISCPLNSPVQLAGLKLLGHLSIKFEDHYVITSYIPDFLTLLNKGSVKTKFYVLKVFSCLSKNHANTRELISAKVLSSLVAPFNKNESKANILNIIEIFENINFQFKTKAKLFTKEKFTKSELISIFQEAKQFGQKLQDLAEHSDPEVRDKVIRLILKL

SEQ ID NO: 46920 - protein, 43 aa, Homo sapiens
MIRGVDELERLREEIRRVRNKFVMMHWKQRHSRSRPYPVCFRP

SEQ ID NO: 46921 - protein, 35 aa, Homo sapiens
MFREVDEIDEIRRVRNKLIVMRWKVNRNHPYPYLM

SEQ ID NO: 46922 - protein, 198 aa, Homo sapiens
MENEEQPQDERKPEVTCTLEDKKLENEGKTENKGKTGDEEMLKDKGKPESEGEAKEGKSEREGESEMEGGSEREGKPEIEGKPESEGEPGSETRAAGKRPAEDDVPRKAKRKTNKGLAHYLKEYKEAIHDMNFSNEDMIREFDNMAKVQDEKRKSKQKLGAFLWMQRNLQDPFYPRGPREFRGGCRAPRRDIEDIPYV

SEQ ID NO: 46923 - protein, 61 aa, Homo sapiens [sequence omitted]

SEQ ID NO: 46924 - protein, 260 aa, Homo sapiens
MQRSKMRGASSGKKTAGPQQKNLEPALPGRWGGRSAENPPSGSVRKTRKNKQKTPGNGDGGSTSEAPQPPRKKRARADPTVESEEAFKNRMEVKVKIPEELKPWLVEDWDLVTRQKQLFQLPAKKNVDAILEEYANCKKSQGNVDNKEYAVNEVVAGIKEYFNVMLGTQLLYKFERPQYAEILLAHPDAPMSQVYGAPHLLRLFVRIGAMLAYTPLDEKSLALLLGYLHDFLKYLAKNSASLFTASDYKVASAEYHRKAL

SEQ ID NO: 46925 - protein, 1527 aa, Homo sapiens
MNARKTPLPEIGRRVRVNKYQKSVGWRYSDEEEDLRTELNLLRKYSFHKNIVSFYGAFFKLSPPGQRHQLWMVMELCAAGSVTDVVRMTSNQSLKEDWIAYICREILQGLAHLHAHRVIHRDIKGQNVLLTHNAEVKLVDFGVSAQVSRTNGRRNSFIGTPYWMAPEVIDCDEDPRRSYDYRSDVWSVGITAIEMAEGAPPLCNLQPLEALFVILRESAPTVKSSGWSRKFHNFMEKCTIKNFLFRPTSANMLQHPFVRDIKNERHVVESLTRHLTGIIKKRQKKGIPLIFEREEAIKEQYTVRRFRGPSCTHELLRLPTSSRCRPLRVLHGEPSQPRWLPDREEPQVQALQQLQGAARVFMPLQALDSAPKPLKGQAQAPQRLQGAARVFMPLQAQVKAKASKPLQMQIKAPPRLRRAARVLMPLQAQVRAPRLLQVQSQVSKKQQAQTQTSEPQDLDQVPEEFQGQDQVPEQQRQGQAPEQQQRHNQVPEQELEQNQAPEQPEVQEQAAEPAQAETEAEEPESLRVNAQVFLPLLSQDHHVLLPLHLDTQVLIPVEGQTEGSPQAQAWTLEPPQAIGSVQALIEGLSRDLLRAPNSNNSKPLGPLQTLMENLSSNRFYSQPEQAREKKSKVSTLRQALAKRLSPKRFRAKSSWRPEKLELSDLEARRQRRQRRWEDIFNQHEEELRQVDKDKEDESSDNDEVFHSIQAEVQIEPLKPYISNPKKIEVQERSPSVPNNQDHAHHVKFSSSVPQRSLLEQAQKPIDIRQRSSQNRQNWLAASESSSEEESPVTGRRSQSSPPYSTIDQKLLVDIHVPDGFKVGKISPPVYLTNEWVGYNALSEIFRNDWLTPAPVIQPPEEDGDYVELYDASADTDGDDDDESNDTFEDTYDHANGNDDLDNQVDQANDVCKDHDDDNNKFVDDVNNNYYEAPSCPRASYGRDGSCKQDGYDGSRGKEEAYRGYGSHTANRSHGGSAASEDNAAIGDQEEHAANIGSERRGSEGDGGKGVVRTSEESGALGLNGEENCSETDGPGLKRPASQDFEYLQEEPGGGNEASNAIDSGAAPSAPDHESDNKDISESSTQSDFSANHSSPSKGSGMSADANFASAILYAGFVEVPEESPKQPSEVNVNPLYVSPACKKPLIHMYEKEFTSEICCGSLWGVNLLLGTRSNLYLMDRSGKADITKLIRRRPFRQIQVLEPLNLLITISGHKNRLRVYHLTWLRNKILNNDPESKRRQEEMLKTEEACKAIDKLTGCEHFSVLQHEETTYIAIALKSSIHLYAWAPKSFDESTAIKVCIDQSADSEGDYMSYQAYIRILAKIQAADPVNRFKRPDELLHLLKLKVFPTLDHKPVTVDLAIGSEKRLKIFFSSADGYHLIDAESEVMSDVTLPKNPLEIIIPQNIIILPDCLGIGMMLTFNAEALSVEANEQLFKKILEMWKDIPSSIAFECTQRTTGWGQKAIEVRSLQSRVLESELKRRSIKKLRFLCTRGDKLFFTSTLRNHHSRVYFMTLGKLEELQSNYDV

SEQ ID NO: 46926 - protein, 802 aa, Homo sapiens
MDSPRQCVTPSEVVPVTVLAVQRYLLEDEPRDTVPKPPLYCYDVTISDGVYQEKCYLDPSLNSLVYQNILKVGIQMRISRVSCLYNEKRIGQGILCIDNVHCGETSDSISLETPFRNRAHQEKPERPLRGGKSHYLALWNNEDPYGDIWLTDKQPEEHNFSDTKIISLSHLEMTWTNRRNFPALLVRILHKSKLRYYGKPDKKMIEPYQTFLEVADSSGTVSVIMWNALCPEWYKSLRVGLVLLLQDYSVKKSYPFRIQPVPVDPQIKLISTMEICLNLRDPPTNIIIIPEKQVKPEWRLPKLNHRFTTRSELDDMPENCICDVIGLLVFVGRVQRSKKKENREDFWSYRWIHIADGTSEQPFIVELFSTSQPEIFENIYPMAYFVCTQLKVVRNDNQVPKLLYLTTTNESGVFITGHRGQPYTYDAKVKNFIQWIRTKSDSGEQKNMVIGGYYPYPPVPETFSKYSSSIKVESLLTAISEVRKEIEDLQYREQKRIAIQGIITAIKYIPHSSATESASASETLRNANRPSTSQAARVEIQERNGKRHQDDEPVNSQYFQTTSTNLSLSNKIRILQGPHANPVAVPQPGASVQTKGIKPGMPSIFNRRANINANLQGKARKTISDRWESQLWREKKFGLIDHLHYSRVYPESIPRKFMFEHRKFLSDQYNSQPAKYVPPEGRPPKLDDFKSARSLGHFEVTILGLNHEIAIDVAFLPMYCPEDIRTSQIDTLLTSMNYSCAYPQDTTGNDRLPGPRAVAGDIIKAATELDRVHIVGILDICNLGNNKVEVYLHKIYSPENTS

SEQ ID NO: 46927 - protein, 1102 aa, Homo sapiens [sequence omitted]

SEQ ID NO: 46928 - protein, 401 aa, Homo sapiens
MERSNDYFVLQRRRGYGEEGGGGLTGLLVGTLDSVLDSTAKVAPFRILHQTPDSQVYLSIACGANREEITKHWDWLEQNIMKTLSVFDSNEDITNFVQGKIRGLIAEEGKHCFAKEDDPEKFREALLKFEKCFGLPEKEKLVTYYSCSYWKGRVPCQGWLYLSTNFLSFYSFLLGSEIKLIISWDEVSKLEKTSNVILTESIHVCSQGENHYFSMFLHINQTYLLMEQLANYAIRRLFDKETFDNDPVLYNPLQITKRGLENRAHSEQFNAFFRLPKGESLKEVHECFLWVPFSHFNTHGKMCISENYICFASQDGNQCSVIIPLREVLAIDKTNDSSKSVIISIKGKTAFRFHEVKDFEQLVAKLRLRCGAASTQYHDISTEVINYTAIKSFGKKGVCLV

SEQ ID NO: 46929 - protein, 251 aa, Homo sapiens
MELLIMINACKIASASRVTAVIPCFPYARQDKKDKSRAPISAKLVANMLSVAGADHIITMDLHASQIQGFFDIPVDNLYAEPAVLKWIRENISEWRNCTIVSPDAGGAKRVTSIADRLNVDFALIHKERKKANEVDRMVLVGDVKDRVAILVDDMADTCGTICHAADKLLSAGATRVYAILTHGIFSGPAISRINNACFEAVVVTNTIPQEDKMKHCSKIQVIDISMILAEAIRRTHNGESVSYLFSHVPL

SEQ ID NO: 46930 - protein, 685 aa, Homo sapiens
METLESELTCPICLELFEDPLLLPCAHSLCFSCAHRILVSSCSSGESIEPITAFQCPTCRYVISLNHRGLDGLKRNVTLQNIIDRFQKASVSGPNSPSESRRERTYRPTTAMSSERIACQFCEQDPPRDAVKTCITCEVSYCDRCLRATHPNKKPFTSHRLVEPVPDTHLRGITCLDHENEKVNMYCVSDDQLICALCKLVGRHRDHQVASLNDRFEKLKQTLEMNLTNLVKRNSELENQMAKLIQICQQVEVNTAMHEAKLMEECDELVEIIQQRKQMIAVKIKETKVMKLRKLAQQVANCRQCLERSTVLINQAEHILKENDQARFLQSAKNIAERVAMATASSQVLIPDINFNDAFENFALDFSREKKLLEGLDYLTAPNPPSIREELCTASHDTITVHWISDDEFSISSYELQYTIFTGQANFISLYNSVDSWMIVPNIKQNHYTVHGLQSGTRYIFIVKAINQAGSRNSEPTRLKTNSQPFKLDPKMTHKKLKISNDGLQMEKDESSLKKSHTPERFSGTGCYGAAGNIFIDSGCHYWEVVMGSSTWYAIGIAYKSAPKNEWIGKNASSWVFSRCNSNFVVRHNNKEMLVDVPPHLKRLGVLLDYDNNMLSFYDPANSLHLHTFDVTFILPVCPTFTIWNKSLMILSGLPAPDFIDYPERQECNCRPQESPYVSGMKTCH

SEQ ID NO: 46931 - protein, 16 aa, Homo sapiens
MYATLWTDDAGSSPYL

SEQ ID NO: 46932 - protein, 717 aa, Homo sapiens
MHGSLLGLVHFLKLLKKYLGINQLQFSSFSLSFSNWCCVTCFWKKNAMAKRIKAKPTSDKPGSPYRSVTHFDSLAVIDIPGADTLDKLFDHAVSKFGKKDSLGTREILSEENEMQPNGKVFKKLILGNYKWMNYLEVNRRVNNFGSGLTALGLKPKNTIAIFCETRAEWMIAAQTCFKYNFPLVTLYATLGKEAVVHGLNESEASYLITSVELLESKLKTALLDISCVKHIIYVDNKAINKAEYPEGFEIHSMQSVEELGSNPENLGIPPSRPTPSDMAIVMYTSGSTGRPKGVMMHHSNLIAGMTGQCERIPGLGPKDTYIGYLPLAHVLELTAEISCFTYGCRIGYSSPLTLSDQSSKIKKGSKGDCTVLKPTLMAAVPEIMDRIYKNVMSKVQEMNYIQKTLFKIGYDYKLEQIKKGYDAPLCNLLLFKKVKALLGGNVRMMLSGGAPLSPQTHRFMNVCFCCPIGQGYGLTESCGAGTVTEVTDYTTGRVGAPLICCEIKLKDWQEGGYTINDKPNPRGEIVIGGQNISMGYFKNEEKTAEDYSVDENGQRWFCTGDIGEFHPDGCLQIIDRKKDLVKLQAGEYVSLGKVEAALKNCPLIDNICAFAKSDQSYVISFVVPNQKRLTLLAQQKGVEGTWVDICNNPAMEAEILKEIREAANAMKLERFEIPIKVRLSPEPWTPETGLVTDAFKLKRKELRNHYLKDIERMYGGK

SEQ ID NO: 46933 - protein, 449 aa, Homo sapiens [sequence omitted]

SEQ ID NO: 46934 - protein, 448 aa, Homo sapiens
MKYIFSLLFFLLLEGGKTEQVKHSETYCMFQDKKYRVGERWHPYLEPYGLVYCVNCICSENGNVLCSRVRCPNVHCLSPVHIPHLCCPRCPDSLPPVNNKVTSKSCEYNGTTYQHGELFVAEGLFQNRQPNQCTQCSCSEGNVYCGLKTCPKLTCAFPVSVPDSCCRVCRGDGELSWEHSDGDIFRQPANREARHSYHRSHYDPPPSRQAGGLSRFPGARSHRGALMDSQQASGTIVQIVINNKHKHGQVCVSNGKTYSHGESWHPNLRAFGIVECVLCTCNVTKQECKKIHCPNRYPCKYPQKIDGKCCKVCPGKKAKEELPGQSFDNKGYFCGEETMPVYESVFMEDGETTRKIALETERPPQVEVHVWTIRKGILQHFHIEKISKRMFEELPHFKLVTRTTLSQWKIFTEGEAQISQMCSSRVCRTELEDLVKVLYLERSEKGHC

SEQ ID NO: 46935 - protein, 985 aa, Homo sapiens
MQNNEELPTYEEAKVQSQYFRGQQHASVGAAFYVTGVTNQKMRTEGRPSVQRLNPGKMHQDEGLRDLKQGHVRSLSERLMQMSLATSGVKAHPPVTSAPLSPPQPNDLYKNPTSSSEFYKAQGPLPNQHSLKGMEHRGPPPEYPFKGMPPQSVVCKPQEPGHFYSEHRLNQPGRTEGQLMRYQHPPEYGAARPAQDISLPLSARNSQPHSPTSSLTSGGSLPLLQSPPSTRLSPARHPLVPNQGDHSAHLPRPQQHFLPNQAHQGDHYRLSQPGLSQQQQQQQQQHHHHHHHQQQQQQQPQQQPGEAYSAMPRAQPSSASYQPVPADPFAIVSRAQQMVEILSDENRNLRQELEGCYEKVARLQKVETEIQRVSEAYENLVKSSSKREALEKAMRNKLEGEIRRMHDFNRDLRERLETANKQLAEKEYEGSEDTRKTISQLFAKNKESQREKEKLEAELATARSTNEDQRRHIEIRDQALSNAQAKVVKLEEELKKKQVYVDKVEKMQQALVQLQAACEKREQLEHRLRTRLERELESLRIQQRQGNCQPTNVSEYNAAALMELLREKEERILALEADMTKWEQKYLEENVMRHFALDAAATVAAQRDTTVISHSPNTSYDTALEARIQKEEEEILMANKRCLDMEGRIKTLHAQIIEKDAMIKVLQQRSRKEPSKTEQLSCMRPAKSLMSISNAGSGLLSHSSTLTGSPIMEEKRDDKSWKGSLGILLGGDYRAEYVPSTPSPVPPSTPLLSAHSKTGSRDCSTQTERGTESNKTAAVAPISVPAPVAAAATAAAITATAATITTTMVAAAPVAVAAAAAPAAAAAPSPATAAATAAAVSPAAAGQIPAAASVASAAAVAPSAAAAAAVQVAPAAPAPVPAPALVPVPAPAAAQASAPAQTQAPTSAPAVAPTPAPTPTPAVAQAEVPASPATGPGPHRLSIPSLTCNPDKTDGPVFHSNTLERKTPIQILGQEPDAEMVEYLI

SEQ ID NO: 46936 - protein, 39 aa, Homo sapiens
MATTQISKDELDELKEAFAKVVETEFHRVSQDGLDLLTS

SEQ ID NO: 46937 - protein, 585 aa, Homo sapiens
MPLPGYKVREIIQKLMLDGDRNKDGKISFDEFVYIFQEVKSSDIAKTFRKAINRKEGICALGGTSELSSEGTQHSYSEEEKYAFVNWINKALENDPDCRHVIPMNPNTDDLFKAVGDGIVLCKMINLSVPDTIDERAINKKKLTPFIIQENLNLALNSASAIGCHVVNIGAEDLRAGKPHLVLGLLWQIIKIGLFADIELSRNEALAALLRDGETLEELMKLSPEELLLRWANFHLENSGWQKINNFSADIKDSKAYFHLLNQIAPKGQKEGEPRIDINMSGFNETDDLKRAESMLQQADKLGCRQFVTPADVVSGNPKLNLAFVANLFNKYPALTKPENQDIDWTLLEGETREERTFRNWMNSLGVNPHVNHLYADLQDALVILQLYERIKVPVDWSKVNKPPYPKLGANMKKLENCNYAVELGKHPAKFSLVGIGGQDLNDGNQTLTLALVWQLMRRYTLNVLEDLGDGQKANDDIIVNWVNRTLSEAGKSTSIQSFKDKTISSSLAVVDLIDAIQPGCINYDLVKSGNLTEDDKHNNAKYAVSMARRIGARVYALPEDLVEVKPKMVMTVFACLMGRGMKRV

SEQ ID NO: 46938 - protein, 2005 aa, Homo sapiens
MEDISISVIGRQRRTVQSTVPEDAEKRAQSLFVKECIKTYSTDWHVVNYKYEDFSGDFRMLPCKSLRPEKIPNHVFEIDEDCEKDEDSSSLCSQKGGVIKQGWLHKANVNSTITVTMKVFKRRYFYLTQLPDGSYILNSYKDEKNSKESKGCIYLDACIDVVQCPKMRRHAFELKMLDKYSHYLAAETEQEMEEWLITLKKIIQINTDSLVQEKKETVETAQDDETSSQGKAENIMASLERSMHPELMKYGRETEQLNKLSRGDGRQNLFSFDSEVQRLDFSGIEPDIKPFEEKCNKRFLVNCHDLTFNILGQIGDNAKGPPTNVEPFFINLALFDVKNNCKISADFHVDLNPPSVREMLWGSSTQLASDGSPKGSSPESYIHGIAESQLRYIQQGIFSVTNPHPEIFLVARIEKVLQGNITHCAEPYIKNSDPVKTAQKVHRTAKQVCSRLGQYRMPFAWAARPIFKDTQGSLDLDGRFSPLYKQDSSKLSSEDILKLLSEYKKPEKTKLQIIPGQLNITVECVPVDLSNCITSSYVPLKPFEKNCQNITVEVEEFVPEMTKYCYPFTIYKNHLYVYPLQLKYDSQKTFAKARNIAVCVEFRDSDESDASALKCIYGKPAGSVFTTNAYAVVSHHNQNPEFYDEIKIELPIHLHQKHHLLFTFYHVSCEINTKGTTKKQDTVETPVGFAWVPLLKDGRIITFEQQLPVSANLPPGYLNLNDAESRRQCNVDIKWVDGAKPLLKIKSHLESTIYTQDLHVHKFFHHCQLIQSGSKEVPGELIKYLKCLHAMEIQVMIQFLPVILMQLFRVLTNMTHEDDVPINCTMVLLHIVSKCHEEGLDSYLRSFIKYSFRPEKPSAPQAQLIHETLATTMIAILKQSADFLSINKLLKYSWFFFEIIAKSMATYLLEENKIKLPRGQRFPETYHHVLHSLLLAIIPHVTIRYAEIPDESRNVNYSLASFLKRCLTLMDRGFIFNLINDYISGFSPKDPKVLAEYKFEFLQTICNHEHYIPLNLPMAFAKPKLQRVQDSNLEYSLSDEYCKHHFLVGLLLRETSIALQDNYEIRYTAISVIKNLLIKHAFDTRYQHKNQQAKIAQLYLPFVGLLLENIQRLAGRDTLYSCAAMPNSASRDEFPCGFTSPANRGSLSTDKDTAYGSFQNGHGIKREDSRGSLIPEGATGFPDQGNTGENTRQSSTRSSVSQYNRLDQYEIRSLLMCYLYIVKMISEDTLLTYWNKVSPQELINILILLEVCLFHFRYMGKRNIARVHDAWLSKHFGIDRKSQTMPALRNRSGVMQARLQHLSSLESSFTLNHSSTTTEADIFHQALLEGNTATEVSLTVLDTISFFTQCFKTQLLNNDGHNPLMKKVFDIHLAFLKNGQSEVSLKHVFASLRAFISKFPSAFFKGRVNMCAAFCYEVLKCCTSKISSTRNEASALLYLLMRNNFEYTKRKTFLRTHLQIIIAVSQLIADVALSGGSRFQESLFIINNFANSDRPMKATAFPAEVKDLTKRIRTVLMATAQMKEHEKDPEMLIDLQYSLAKSYASTPELRKTWLDSMAKIHVKNGDFSEAAMCYVHVAALVAEFLHRKKLFPNGCSAFKKITPNIDEEGAMKEDAGMMDVHYSEEVLLELLEQCVDGLWKAERYEIISEISKLIVPIYEKRREFEKLTQVYRTLHGAYTKILEVMHTKKRLLGTFFRVAFYGQSFFEEEDGKEYIYKEPKLTGLSEISLRLVKLYGEKFGTENVKIIQDSDKVNAKELDPKYAHIQVTYVKPYFDDKELTERKTEFERNHNISRFVFEAPYTLSGKKQGCIEEQCKRRTILTTSNSFPYVKKRIPINCEQQINLKPIDVATDEIKDKTAELQKLCSSTDVDMIQLQLKLQGCVSVQVNAGPLAYARAFLNDSQASKYPPKKVSELKDMFRKFIQACSIALELNERLIKEDQVEYHEGLKSNFRDMVKELSDIIHEQILQEDTMHSPWMSNTLHVFCAISGTSSDRGYGSPRYAEV

SEQ ID NO: 46939 - protein, 376 aa, Homo sapiens
MDTLFNTKFEGEPATHTQPGVQLQSNTYDLQESNVRLKLTIVSTVGFGDQINKEDSYKPIVEFIDAQFEAYLQEELKIRRVLHTYHDSRIHVCLYFIAPTGHSLKSLDLVTMKKLDSKVNIIPIIAKADAISKSELTKFKIKITSELVSNGVQIYQFPTDDESVAEINGTMNAHLPFAVIGSTEELKIGNKMMRARQYPWGTVQVENEAHCDFVKLREMLIRVNMEDLREQTHTRHYELYRRCKLEEMGFKDTDPDSKPFSLQETYEAKRNEFLGELQKKEEEMRQMFVQRVKEKEAELKEAEKELHEKFDRLKKLHQDEKKKLEDKKKSLDDEVNAFKQRKTAAELLQSQGSQAGGSQTLKRDKEKKNNPWLCTE

SEQ ID NO: 46940 - protein, 373 aa, Homo sapiens
MDTLFNTKFEGEPATHTQPGVQLQSNTYDLQESNVRLKLTIVSTVGFGDQINKEDSYKPIVEFIDAQFEAYLQEELKIRRVLHTYHDSRIHVCLYFIAPTGHSLKSLDLVTMKKLDSKVNIIPIIAKADAISKSELTKFKIKITSELVSNGVQIYQFPTDDESVAEINGTMNAHLPFAVIGSTEELKIGNKMMRARQYPWGTVQVENEAHCDFVKLREMLIRVNMEDLREQTHTRHYELYRRCKLEEMGFKDTDPDSKPFSLQETYEAKRNEFLGELQKKEEEMRQMFVQRVKEKEAELKEAEKELHEKFDRLKKLHQDEKKKLEDKKKSLDDEVNAFKQRKTAAELLQSQGSQAGGSQTLKRDKEKKNLGFL

SEQ ID NO: 46941 - protein, 59 aa, Homo sapiens
MGVCLLIPGLATAYIHRFTNGGKEKRVAHFGYHWSLMERDRRISGVDRYYVSKGLENID

SEQ ID NO: 46942 - protein, 912 aa, Homo sapiens
MSQSSGSGDGNDDEATTSKDGGFSSPSPSAAAAAQEVRSATDGNTSTTPPTSAKKRKLNSSSSSSSNSSNEREDFDSTSSSSSTPPLQPRDSASPSTSSFCLGVSVAASSHVPIQKKLRFEDTLEFVGFDAKMAEESSSSSSSSSPTAATSQQQQLKNKSILISSVASVHHANGLAKSSTTVSSFANSKPGSAKKLVIKNFKDKPKLPENYTDETWQKLKEAVEAIQNSTSIKYNLEELYQAVENLCSYKISANLYKQLRQICEDHIKAQIHQFREDSLDSVLFLKKIDRCWQNHCRQMIMIRSIFLFLDRTYVLQNSMLPSIWDMGLELFRAHIISDQKVQNKTIDGILLLIERERNGEAIDRSLLRSLLSMLSDLQIYQDSFEQRFLEETNRLYAAEGQKLMQEREVPEYLHHVNKRLEEEADRLITYLDQTTQKSLIATVEKQLLGEHLTAILQKGLNNLLDENRIQDLSLLYQLFSRVRGGVQVLLQQWIEYIKAFGSTIVINPEKDKTMVQELLDFKDKVDHIIDICFLKNEKFINAMKEAFETFINKRPNKPAELIAKYVDSKLRAGNKEATDEELEKMLDKIMIIFRFIYGKDVFEAFYKKDLAKRLLVGKSASVDAEKSMLSKLKHECGAAFTSKLEGMFKDMELSKDIMIQFKQYMQNQNVPGNIELTVNILTMGYWPTYVPMEVHLPPEMVKLQEIFKTFYLGKHSGRKLQWQSTLGHCVLKAEFKEGKKELQVSLFQTLVLLMFNEGEEFSLEEIKQATGIEDGELRRTLQSLACGKARVLAKNPKGKDIEDGDKFICNDDFKHKLFRIKINQIQMKETVEEQASTTERVFQDRQYQIDAAIVRIMKMRKTLSHNLLVSEVYNQLKFPVKPADLKKRIESLIDRDYMERDKENPNQYNYIA

SEQ ID NO: 46943 - protein, 490 aa, Homo sapiens
MVEGFFDRGASIVEDKLVKDLRTQESEEQKRNRVRGILRIIKPCNHVLSLSFPIRRDDGSWEVIEGYRAQHSQHRTPCKGGIRYSTDVSVDEVKALASLMTYKCAVVDVPFGGAKAGVKINPKNYTENELEKITRRFTMELAKKGFIGPGVDVPAPDMNTGEREMSWIADTYASTIGHYDINAHACVTGKPISQGGIHGRISATGRGVFHGIENFINEASYMSILGMTPGFRDKTFVVQGFGNVGLHSMRYLHRFGAKCIAVGESDGSIWNPDGIDPKELEDFKLQHGSILGFPKAKPYEGSILEVDCDILIPAATEKQLTKSNAPRVKAKIIAEGANGPTTPEADKIFLERNILVIPDLYLNAGGVTVSYFEWLKNLNHVSYGRLTFKYERDSNYHLLLSVQESLERKFGKHGGTIPIVPTAEFQDSISGASEKDIVHSALAYTMERSARQIMHTAMKYNLGLDLRTAAYVNAIEKVFKVYSEAGVTFT

SEQ ID NO: 46944 - protein, 1199 aa, Homo sapiens
MNGHHQQNGVENMMLFEVVKMGKSAMQSVVDDWIESYKHDRDIALLDLINFFIQCSGCKGVVTAEMFRHMQNSEIIRKMTEEFDEDSGDYPLTMAGPQWKKFKSSFCEFIGVLVRQCQYSIIYDEYMMDTVISLLTGLSDSQVRAFRHTSTLAAMKLMTALVNVALNLSINMDNTQRQYEAERNKMIGKRANERLELLLQKRKELQENQDEIENMMNAIFKGVFVHRYRDAIAEIRAICIEEIGIWMKMYSDAFLNDSYLKYVGWTMHDKQGEVRLKCLTALQGLYYNKELNSKLELFTSRFKDRIVSMTLDKEYDVAVQAIKLLTLVLQSSEEVLTAEDCENVYHLVYSAHRPVAVAAGEFLYKKLFSRRDPEEDGMMKRRGRQGPNANLVKTLVFFFLESELHEHAAYLVDSMWDCATELLKDWECMNSLLLEEPLSGEEALTDRQESALIEIMLCTIRQAAECHPPVGRGTGKRVLTAKEKKTQLDDRTKITELFAVALPQLLAKYSVDAEKVTNLLQLPQYFDLEIYTTGRLEKHLDALLRQIRNIVEKHTDTDVLEACSKTYHALCNEEFTIFNRVDISRSQLIDELADKFNRLLEDFLQEGEEPDEDDAYQVLSTLKRITAFHNAHDLSKWDLFACNYKLLKTGIENGDMPEQIVIHALQCTHYVILWQLAKITESSSTKEDLLRLKKQMRVFCQICQHYLTNVNTTVKEQAFTILCDILMIFSHQIMSGGRDMLEPLVYTPDSSLQSELLSFILDHVFIEQDDDNNSADGQQEDEASKIEALHKRRNLLAAFCKLIVYTVVEMNTAADIFKQYMKYYNDYGDIIKETMSKTRQIDKIQCAKTLILSLQQLFNEMIQENGYNFDRSSSTFSGIKELARRFALTFGLDQLKTREAIAMLHKDGIEFAFKEPNPQGESHPPLNLAFLDILSEFSSKLLRQDKRTVYVYLEKFMTFQMSLRREDVWLPLMSYRNSLLAGGDDDTMSVISGISSRGSTVRSKKSKPSTGKRKVVEGMQLSLTEESSSSDSMWLSREQTLHTPVMMQTPQLTSTIMREPKRLRPEDSFMSVYPMQTEHHQTPLDYNTQVTWMLAQRQQEEARQQQERAAMSYVKLRTNLQHAIRRGTSLMEDDEEPIVEDVMMSSEGRIEDLNEGMDFDTMDIDLPPSKNRRERTELKPDFFDPASIMDESVLGVSMF

SEQ ID NO: 46945 - protein, 1162 aa, Homo sapiens
MNGHHQQNGVENMMLFEVVKMGKSAMQSVVDDWIESYKHDRDIALLDLINFFIQCSGCKGVVTAEMFRHMQNSEIIRKMTEEFDEDSGDYPLTMAGPQWKKFKSSFCEFIGVLVRQCQYSIIYDEYMMDTVISLLTGLSDSQVRAFRHTSTLAAMKLMTALVNVALNLSINMDNTQRQYEAERNKMIGKRANERLELLLQKRKELQENQDEIENMMNAIFKGVFVHRYRDAIAEIRAICIEEIGIWMKMYSDAFLNDSYLKYVGWTMHDKQGEVRLKCLTALQGLYYNKELNSKLELFTSRFKDRIVSMTLDKEYDVAVQAIKLLTLVLQSSEEVLTAEDCENVYHLVYSAHRPVAVAAGEFLYKKLFSRRDPEEDGMMKRRGRQGPNANLVKTLVFFFLESELHEHAAYLVDSMWDCATELLKDWECMNSLLLEEPLSGEEALTDRQESALIEIMLCTIRQAAECHPPVGRGTGKRVLTAKEKKTQLDDRTKITELFAVALPQLLAKYSVDAEKVTNLLQLPQYFDLEIYTTGRLEKHLDALLRQIRNIVEKHTDTDVLEACSKTYHALCNEEFTIFNRVDISRSQLIDELADKFNRLLEDFLQEGEEPDEDDAYQVLSTLKRITAFHNAHDLSKWDLFACNYKLLKTGIENGDMPEQIVIHALQCTHYVILWQLAKITESSSTKEDLLRLKKQMRVFCQICQHYLTNVNTTVKEQAFTILCDILMIFSHQIMSGGRDMLEPLVYTPDSSLQSELLSFILDHVFIEQDDDNNSADGQQEDEASKIEALHKRRNLLAAFCKLIVYTVVEMNTAADIFKQYMKYYNDYGDIIKETMSKTRQIDKIQCAKTLILSLQQLFNEMIQENGYNFDRSSSTFSGIKELARRFALTFGLDQLKTREAIAMLHKDGIEFAFKEPNPQGESHPPLNLAFLDILSEFSSKLLRQDKRTVYVYLEKFMTFQMSLRREDVWLPLMSYRNSLLAGGDDDTMSVISGISSRGSTVRSKKSKPSTGKRKVVEGMQLSLTEESSSSDSMWLSREQTLHTPVMMQTPQLTSTIMREPKRLRPEDSFMSVYPMQTEHHQTPLDYNRRGTSLMEDDEEPIVEDVMMSSEGRIEDLNEGMDFDTMDIDLPPSKNRRERTELKPDFFDPASIMDESVLGVSMF

SEQ ID NO: 46946 - protein, 736 aa, Homo sapiens [sequence omitted]

SEQ ID NO: 46947 - protein, 744 aa, Homo sapiens
MNLDKKINSQNQPTGIHREPPPPPFSVNKMLPREKEASNKEQPKVTNTMRKLFVPNTQSGQREGLIKHILAKREKEYVNIQTFRFFVGTWNVNGQSPDSGLEPWLNCDPNPPDIYCIGFQELDLSTEAFFYFESVKEQEWSMAVERGLHSKAKYKKVQLVRLVGMMLLIFARKDQCRYIRDIATETVGTGIMGKMGNKGGVAVRFVFHNTTFCIVNSHLAAHVEDFERRNQDYKDICARMSFVVPNQTLPQLNIMKHEVVIWLGDLNYRLCMPDANEVKSLINKKDLQRLLKFDQLNIQRTQKKAFVDFNEGEIKFIPTYKYDSKTDRWDSSGKCRVPAWCDRILWRGTNVNQLNYRSHMELKTSDHKPVSALFHIGVKVVDERRYRKVFEDSVRIMDRMENDFLPSLELSRREFVFENVKFRQLQKEKFQISNNGQVPCHFSFIPKLNDSQYCKPWLRAEPFEGYLEPNETVDISLDVYVSKDSVTILNSGEDKIEDILVLHLDRGKDYFLTISGNYLPSCFGTSLEALCRMKRPIREVPVTKLIDLEEDSFLEKEKSLLQMVPLDEGASERPLQVPKEIWLLVDHLFKYACHQEDLFQTPGMQEELQQIIDCLDTSIPETIPGSNHSVAEALLIFLEALPEPVICYELYQRCLDSAYDPRICRQVISQLPRCHRNVFRYLMAFLRELLKFSEYNSVNANMIATLFTSLLLRPPPNLMARQTPSDRQRAIQFLLGFLLGSEED

SEQ ID NO: 46948 - protein, 25 aa, Homo sapiens
MFDPAAGIAGNVISKLGSASVSSLV

SEQ ID NO: 46949 - protein, 550 aa, Homo sapiens
MRRAELQRARALQSYYEAKARREKKIKSKKYHKVVKKGKAKKALKEFEQLRKVNPAAALEELEKIEKARMMERMSLKHQNSGKWAKSKAIMAKYDLEARQAMQEQLSKNKELTQKLQVASESEEEEGGTEDVEELLVPDVVNEVQMNADGPNPWMLRSCTSDTKEAATQEDPEQLPELEAHGVSESEGEERPVAEEEILLREFEERRSLRKRSELSQDAEPAGSQETKDSGSQEVLSELRVLSQKLKENHQSRKQKASSEGTIPQVQREEPAPEEEEPLLLQRPERVQTLEELEELGKEECFQNKELPRPVLEGQQSERTPNNRPDAPKEKKKKEQMIDLQNLLTTQSPSVKSLAVPTIEELEDEEERNHRQMIKEAFAGDDVIRDFLKEKREAVEASKPKDVDLTLPGWGEWGGVGLKPSAKKRRRFLIKAPEGPPRKDKNLPNVIINEKRNIHAAAHQVRVLPYPFTHHWQFERTIQTPIGSTWNTQRAFQKLTTPKVVTKPGHIINPIKAEDVGYRSSSRSDLSVIQRNPKRITTRHKKQLKKCSVD

SEQ ID NO: 46950 - protein, 718 aa, Homo sapiens [sequence omitted]

SEQ ID NO: 46951 - protein, 434 aa, Homo sapiens [sequence omitted]

SEQ ID NO: 46952 - protein, 124 aa, Homo sapiens [sequence omitted]

SEQ ID NO: 46953 - protein, 495 aa, Homo sapiens
MGAMWETSGSVKENSSQSKKYSTKIENLGPESACRHFWSFRYHEATGPLETISQLQKLCHQWLRPEIHSKEQILEMLVLEQFLSILPKETQNWVQKHHPQNVKQALVLVEFLQREPDGTKNEVTAHELGKEAVLLGGTAVAPGFKWKPAEPQPMGVFQKEYWNTYRVLQEQLGWNTHKETQPVYERAVHDQQMLALSEQKRIKHWKMASKLILPESLSLLTFEDVAVYFSEEEWQLLNPLEKTLYNDVMQDIYETVISLGLKLKNDTGNDHPISVSTSEIQTSGCEVSKKTRMKIAQKTMGRENPGDTHSVQKWHRAFPRKKRKKPATCKQELPKLMDLHGKGPTGEKPFKCQECGKSFRVSSDLIKHHRIHTGEKPYKCQQCDRRFRWSSDLNKHFMTHQGIKPYRCSWCGKSFSHNTNLHTHQRIHTGEKPFKCDECGKRFIQNSHLIKHQRTHTGEQPYTCSLCKRNFSRRSSLLRHQKLHRRREACLVSPN

SEQ ID NO: 46954 - protein, 611 aa, Homo sapiens
MDSSRPSNSFAAQPWHSCHKLIYVRPNSKTGVPVGHWPIPESFWPDQNLPSLPPRTSHPVVRFSCVDCEPMVIDKLPFDKYELEPSPLTQYILERKSPHTCWQVFVTSSGKYNELGYPFGYLKASTTLTCVNLFVMPYNYPVLLPLLDDLFKVHKLKPNLKWRQAFDSYLKTLPPYYLLTKLESERILASVGKKPPQEIGIKVKNHSGGGMSLTHNKNFRKLLKEITGETALRLTELNTKEFAGFQIGLLNKDLKPQTYRNAYDIPRRGLLDQLTRMRSNLLKTHKFIVGQDEDSLHSVPVAQMGNYQEYLKTLASPLREIDPDQPKRLHTFGNPFKQDKKGMMIDEADEFVAGPQNKVKRPGEPNSPMSSKRRRSMSLLLRKPQTPPTVTNHVGGKGPPSASWFPSYPNLIKPTLVHTDATIIHDGHEEKMENGQITPDGFLSKSAPSELINMTGDLMPPNQVDSLSDDFTSLSKDGLIQKPGSNAFVGGAKNCSLSVDDQKDPVASTLGAMPNTLQITPAMAQGINADIKHQLMKEVRKFGRKYERIFILLEEVQGPLEMKKQFVEFTIKEAARFKRRVLIQYLEKVLEKINSHHLHNNISHINSRSSC

SEQ ID NO: 46955 - protein, 101 aa, Homo sapiens [sequence omitted]

SEQ ID NO: 46956 - protein, 854 aa, Homo sapiens
MVAAANEIAKERRKQDVVNRVATHSSNIRSTFKPVIDGSMLKNDIKQRLARERREEKRRQQDANKETQLLEKERKTKLQYEKQMEERQRKLKERKEKEEQRRIAAEEKRHQKDEAQKEKFTAILYRTLERRRLADDYQQKRWSWGGSAMANSESKTANKRSASTEKLEQGTSALIRQMPLSSAGLQNSVAKRKTDKERSSSLNRRDSNLHSSTDKEQAERKPRVTGVTNYVMQYVTVPLRKCTSDELRAVMFPMSTMKIPPQTKVEESPLEKVETPPKASVDAPPQVNVEVFCNTSMEASPKAGVGMAPEVSTDSFPVVSVDVSPVVSTYDSEMSMDASPELSIEALPKVDLETVPKVSIVASPEASLEAPPEVSLEALPEVSVEAAPEGSLEAPPKGSAEVAPKESVKGSPKESMEASPEAMVKASPKTSLEASMEASPKAKARDAPKKSEMDKQALIPIAKKRLSSYTECYKWSSSPENACGLPSPISTNRQIQKNCPPSPLPLISKQSPQTSFPYKIMPIQHTLSVQSASSTVKKKKETVSKTTNRCEALSQRHMIYEESGNKSTAGIMNAEAATKILTELRRLAREQREKEEEERQREEMQQRVIKKSKDMAKEAVGGQAEDHLKLKDGQQQNETKKKKGWLDQEDQEAPLQKGDAKIKAQEEADKRKKEHERIMLQNLQERLERKKRIEEIMKRTRKTDVNASKVTETSSHDIYEEAEADNEESDKDSLNEMFPSAILNGTGSPTKFKMPFNNAKKMTHKLVFLEDGTSQVRKEPKTYFNGDLKNFRQKSMKDTSIQEVVSRPSSKRMTSHTTKTRKADETNTTSRSSAQTKSEGFHDILPKSSDTFRQ

SEQ ID NO: 46957 - protein, 447 aa, Homo sapiens
MYLAYCANHPSAVNVLTQHSDELEQFMENQGASSPGILILTTNLSKPFMRLEKYVTLLQELERHMEDTHPDHQDILKAIVAFKTLMGQCQDLRKRKQLELQILSEPIQAWEGEDIKNLGNVIFMSQVMVQYGACEEKEERYLMLFSNVLIMLSASPRMSGFIYQGKIPIAGTVVTRLDEIEGNDCTFEITGNTVERIVVHCNNNQDFQEWLEQLNRLIRGPASCSSLSKTSSSSCSAHSSFSSTGQPRGPLEPPQIIKPWSLSCLRPAPPLRPSAALGYKERMSYILKESSKSPKTMKKFLHKRKTERKPSEEEYVIRKSTAALEEDAQILKVIEAYCTSANFQQGHGSSTRKDSIPQVLLPEEEKLIIEETRSNGQTIMEEKSLVDTVYALKDEVRELKQENKRMKQCLEEELKSRRDLEKLVRRLLKQTDECIRGESSSKTSILP

SEQ ID NO: 46958 - protein, 777 aa, Homo sapiens
MFTDFLSFMVLFNFIIPVSMYVTVEMQKFLGSFFISWDKDFYDEEINEGALVNTSDLNEELGQVDYVFTDKTGTLTENSMEFIECCIDGHKYKGVTQEVDGLSQTDGTLTYFDKVDKNREELFLRALCLCHTVEIKTNDAVDGATESAELTYISSSPDEIALVKGAKRYGFTFLGNRNGYMRVENQRKEIEEYELLHTLNFDAVRRRMSVIVKTQEGDILLFCKGADSAVFPRVQNHEIELTKVHVERNAMDGYRTLCVAFKEIAPDDYERINRQLIEAKMALQDREEKMEKVFDDIETNMNLIGATAVEDKLQDQAAETIEALHAAGLKVWVLTGDKMETAKSTCYACRLFQTNTELLELTTKTIEESERKEDRLHELLIEYRKKLLHEFPKSTRSFKKAWTEHQEYGLIIDGSTLSLILNSSQDSSSNNYKSIFLQICMKCTAVLCCRMAPLQKAQIVRMVKNLKGSPITLSIGDGANDVSMILESHVGIGIKGKEGRQAARNSDYSVPKFKHLKKLLLAHGHLYYVRIAHLVQYFFYKNLCFILPQFLYQFFCGFSQQPLYDAAYLTMYNICFTSLPILAYSLLEQHINIDTLTSDPRLYMKISGNAMLQLGPFLYWTFLAAFEGTVFFFGTYFLFQTASLEENGKVYGNWTFGTIVFTVLVFTVTLKLALDTRFWTWINHFVIWGSLAFYVFFSFFWGGIIWPFLKQQRMYFVFAQMLSSVSTWLAIILLIFISLFPEILLIVLKNVRRRSARNPNLELPMLLSYKHTDSGYS

SEQ ID NO: 46959 - protein, 790 aa, Homo sapiens
MFTDFLSFMVLFNFIIPVSMYVTVEMQKFLGSFFISWDKDFYDEEINEGALVNTSDLNEELGQVDYVFTDKTGTLTENSMEFIECCIDGHKYKGVTQEVDGLSQTDGTLTYFDKVDKNREELFLRALCLCHTVEIKTNDAVDGATESAELTYISSSPDEIALVKGAKRYGFTFLGNRNGYMRVENQRKEIEEYELLHTLNFDAVRRRMSVIVKTQEGDILLFCKGADSAVFPRVQNHEIELTKVHVERNAMDGYRTLCVAFKEIAPDDYERINRQLIEAKMALQDREEKMEKVFDDIETNMNLIGATAVEDKLQDQAAETIEALHAAGLKVWVLTGDKMETAKSTCYACRLFQTNTELLELTTKTIEESERKEDRLHELLIEYRKKLLHEFPKSTRSFKKAWTEHQEYGLIIDGSTLSLILNSSQDSSSNNYKSIFLQICMKCTAVLCCRMAPLQKAQIVRMVKNLKGSPITLSIGDGANDVSMILESHVGIGIKGKEGRQAARNSDYSVPKFKHLKKLLLAHGHLYYVRIAHLVQYFFYKNLCFILPQFLYQFFCGFSQQPLYDAAYLTMYNICFTSLPILAYSLLEQHINIDTLTSDPRLYMKISGNAMLQLGPFLYWTFLAAFEGTVFFFGTYFLFQTASLEENGKVYGNWTFGTIVFTVLVFTVTLKLALDTRFWTWINHFVIWGSLAFYVFFSFFWGGIIWPFLKQQRMYFVFAQMLSSVSTWLAIILLIFISLFPEILLIVLKNVRRRSARRNLSCRRASDSLSARPSVRPLLLRTFSDESNVL

SEQ ID NO: 46960 - protein, 571 aa, Homo sapiens
MEEAPLFPGESIKAIVKDVMYICPFMGAVSGTLTVTDFKLYFKNVERDPHFILDVPLGVISRVEKIGAQSHGDNSCGIEIVCKDMRNLRLAYKQEEQSKLGIFENLNKHAFPLSNGQALFAFSYKEKFPINGWKVYDPVSEYKRQGLPNESWKISKINSNYEFCDTYPAIIVVPTSVKDDDLSKVAAFRAKGRVPVLSWIHPESQATITRCSQPLVGPNDKRCKEDEKYLQTIMDANAQSHKLIIFDARQNSVADTNKTKGGGYESESAYPNAELVFLEIHNIHVMRESLRKLKEIVYPSIDEARWLSNVDGTHWLEYIRMLLAGAVRIADKIESGKTSVVVHCSDGWDRTAQLTSLAMLMLDSYYRTIKGFETLVEKEWISFGHRFALRVGHGNDNHADADRSPIFLQFVDCVWQMTRQFPSAFEFNELFLITILDHLYSCLFGTFLCNCEQQRFKEDVYTKTISLWSYINSQLDEFSNPFFVNYENHVLYPVASLSHLELWVNYYVRWNPRMRPQMPIHQNLKELLAVRAELQKRVEGLQREVATRAVSSSSERGSSPSHSATSVHTSV

SEQ ID NO: 46961 - protein, 365 aa, Homo sapiens [sequence omitted]

SEQ ID NO: 46962 - protein, 256 aa, Homo sapiens
MEREAKPFECEECGKRFKKNAGLSQHLRVHSREKPFDCEECGRSFKVNTHLFRHQKLHTSEKPFACKACSRDFLDRQELLKHQRMHTGHLPFDCDDCGKSFRGVNGLAEHQRIHSGAKPYGCPHCGKLFRRSSELTKHRRIHTGEKPYACGQCGKAFRQSSSLLEHARIHSGERPYACGECGKAFRGPSDLIKHRRIHSGLKPYECDKCGKAFRRSSGLSRHRRIHSGARRCECSQCGRVFKRRSALQKHQPTHHE

SEQ ID NO: 46963 - protein, 346 aa, Homo sapiens
MCTRVWPSLQDRFSSLKGVPTEVKIQEMTKLGHELMLCAPDDQELLKGCACAQKQLHFMDQLLDTIRSLTIGCSSCSSLMEHFEDTREKNEALLGELFSSPHLQMLLNPECDPWPLDMQPLLNKQSDDWQWASASAKSEEEEKLAELARQLQESAAKLHALRTEYFAQHEQGAAAGAADISTLDQKLRLVTSDFHQLILAFLQVYDDELGECCQRPGPDLHPCGPIIQATHQNLTSYSQIPRGQPKKPALVTMTTVPTCATLPLAQGFRDVHFGFLSERLRAFQPLTGWSCETPRSGMLLQVVMAVADTSAKAVETVKKQQGEQICWGGSSSVMSLATKMNELMEK

SEQ ID NO: 46964 - protein, 287 aa, Homo sapiens [sequence omitted]

SEQ ID NO: 46965 - protein, 1895 aa, Homo sapiens
MAPVMARWPPFGLCLLLLLLSPPPLPLTGAHRFSAPNTTLNHLALAPGRGTLYVGAVNRLFQLSPELQLEAVAVTGPVIDSPDCVPFRDPAECPQAQLTDNANQLLLVSSRAQELVACGQVRQGVCETRRLGDVAEVLYQAEDPGDGQFVAANTPGVATVGLVVPLPGRDLLLVARGLAGKLSAGVPPLAIRQLAGSQPFSSEGLGRLVVGDFSDYNNSYVGAFADARSAYFVFRRRGARAQAEYRSYVARVCLGDTNLYSYVEVPLACQGQGLIQAAFLAPGTLLGVFAAGPRGTQAALCAFPMVELGASMEQARRLCYTAGGRGPSGAEEATVEYGVTSRCVTLPLDSPESYPCGDEHTPSPIAGRQPLEVQPLLKLGQPVSAVAALQADGHMIAFLGDTQGQLYKVFLHGSQGQVYHSQQVGPPGSAISPDLLLDSSGSHLYVLTAHQVDRIPVAACPQFPDCASCLQAQDPLCGWCVLQGRCTRKGQCGRAGQLNQWLWSYEEDSHCLHIQSLLPGHHPRQEQGQVTLSVPRLPILDADEYFHCAFGDYDSLAHVEGPHVACVTPPQDQVPLNPPGTDHVTVPLALMFEDVTVAATNFSFYDCSAVQALEAAAPCRACVGSIWRCHWCPQSSHCVYGEHCPEGERTIYSAQEVDIQVRGPGACPQVEGLAGPHLVPVGWESHLALRVRNLQHFRGLPASFHCWLELPGELRGLPATLEETAGDSGLIHCQAHQFYPSMSQRELPVPIYVTQGEAQRLDNTHALYVILYDCAMGHPDCSHCQAANRSLGCLWCADGQPACRYGPLCPPGAVELLCPAPSIDAVEPLTGPPEGGLALTILGSNLGRAFADVQYAVSVASRPCNPEPSLYRTSARIVCVTSPAPNGTTGPVRVAIKSQPPGISSQHFTYQDPVLLSLSPRWGPQAGGTQLTIRGQHLQTGGNTSAFVGGQPCPILEPVCPEAIVCRTRPQAAPGEAAVLVVFGHAQRTLLASPFRYTANPQLVAAEPSASFRGGGRLIRVRGTGLDVVQRPLLSVWLEADAEVQASRAQPQDPQPRRSCGAPAADPQACIQLGGGLLQCSTVCSVNSSSLLLCRSPAVPDRAHPQRVFFTLDNVQVDFASASGGQGFLYQPNPRLAPLSREGPARPYRLKPGHVLDVEGEGLNLGISKEEVRVHIGRGECLVKTLTRTHLYCEPPAHAPQPANGSGLPQFVVQMGNVQLALGPVQYEAEPPLSAFPVEAQAGVGMGAAVLIAAVLLLTLMYRHKSKQALRDYQKVLVQLESLETGVGDQCRKEFTDLMTEMTDLSSDLEGSGIPFLDYRTYAERAFFPGHGGCPLQPKPEGPGEDGHCATVRQGLTQLSNLLNSKLFLLTLIHTLEEQPSFSQRDRCHVASLLSLALHGKLEYLTDIMRTLLGDLAAHYVHRNPKLMLRRTETMVEKLLTNWLSICLYAFLREVAGEPLYMLFRAIQYQVDKGPVDAVTGKAKRTLNDSRLLREDVEFQPLTLMVLVGPGAGGAAGSSEMQRVPARVLDTDTITQVKEKVLDQVYKGTPFSQRPSVHALDLEWRSGLAGHLTLSDEDLTSVTQNHWKRLNTLQHYKVPDGATVGLVPQLHRGSTISQSLAQRCPLGENIPTLEDGEEGGVCLWHLVKATEEPEGAKVRCSSLREREPARAKAIPEIYLTRLLSMKGTLQKFVDDTFQAILSVNRPIPIAVKYLFDLLDELAEKHGIEDPGTLHIWKTNSLLLRFWVNALKNPQLIFDVRVSDNVDAILAVIAQTFIDSCTTSEHKVGRDSPVNKLLYAREIPRYKQMVERYYADIRQSSPASYQEMNSALAELSGNYTSAPHCLEALQELYNHIHRYYDQIISALEEDPVGQKLQLACRLQQVAALVENKVTDL

SEQ ID NO: 46966 - protein, 105 aa, Homo sapiens
MQHCNLLCLPENYQMKYYFYHGLSWPQLSYIAEDENGKIVGYVLAKMEEDPDDVPHGHITSLAVKRSHRRLGLAQKLMDQASRAMIENFNAKYVSLHVRKRWKPG

SEQ ID NO: 46967 - protein, 208 aa, Homo sapiens
MPFNSLVNMAYTLLGLSWLHRGGAMGLGPRYLKDVFAAMALLYGPVQWLRLWTQWRRAAVLDQWLTLPIFAWPVAWCLYLDRGWRPWLFLSLECVSLASYGLALLHPQGFEVALGAHVVAAVGQALRTHRHYGSTTSATYLALGVLSCLGFVVLKLCDHQLARWRLFQCLTGHFWSKVCDVLQFHFAFLFLTHFNTHPRFHPSGGKTR

SEQ ID NO: 46968 - protein, 679 aa, Homo sapiens
MDALEPADWCQFAALIVRDQTELRLCERSGQRTASVLWPWINRNARVADLVHILTHLQLLRARDIITAWHPPAPLPSPGTTAPRPSSIPAPAEAEAWSPRKLPSSASTFLSPAFPGSQTHSGPELGLVPSPASLWPPPPSPAPSSTKPGPESSVSLLQGARPFPFCWPLCEISRGTHNFSEELKIGEGGFGCVYRAVMRNTVYAVKRLKENADLEWTAVKQSFLTEVEQLSRFRHPNIVDFAGYCAQNGFYCLVYGFLPNGSLEDRLHCQTQACPPLSWPQRLDILLGTARAIQFLHQDSPSLIHGDIKSSNVLLDERLTPKLGDFGLARFSRFAGSSPSQSSMVARTQTVRGTLAYLPEEYIKTGRLAVDTDTFSFGVVVLETLAGQRAVKTHGARTKYLKDLVEEEAEEAGVALRSTQSTLQAGLAADAWAAPIAMQIYKKHLDPRPGPCPPELGLGLGQLACCCLHRRAKRRPPMTQVYERLEKLQAVVAGVPGHSEAASCIPPSPQENSYVSSTGRAHSGAAPWQPLAAPSGASAQAAEQLQRGPNQPVESDESLGGLSAALRSWHLTPSCPLDPAPLREAGCPQGDTAGESSWGSGPGSRPTAVEGLALGSSASSSSEPPQIIINPARQKMVQKLALYEDGALDSLQLLSSSSLPGLGLEQDRQGPEESDEFQS

SEQ ID NO: 46969 - protein, 482 aa, Homo sapiens [sequence omitted]

SEQ ID NO: 46970 - protein, 168 aa, Homo sapiens
MLGLREEKSEDQDLQGLKDKPLKFKKVKKDKKEEKEGKHEPVQPSAHHSAEPAEAGKAETSEGSGSAPAVPEASASPKQRRSIIRDRGPMYDDPTLPEGWTRKLKQRKSGRSAGKYDVYLINPQGKAFRSKVELIAYFEKLQELAEAGDAPKGAAPRDPRRPRQRVCR

SEQ ID NO: 46971 - protein, 182 aa, Homo sapiens [sequence omitted]

SEQ ID NO: 46972 - protein, 263 aa, Homo sapiens
MDTLVRILARCDIMVLQEVVDSSGSAIPLLLRELNRFDGSGPYSTLSSPQLGRSTYMETYVYFYRSHKTQVLSSYVYNDEDDVFAREPFVAQFSLPSNVLPSLVLVPLHTTPKAVEKELNALYDVFLEVSQHWQSKDVILLGDFNADCASLTKKRLDKLELRTEPGFHWVIADGEDTTVRASTHCTYDRVVLHGERCRSLLHTAAAFDFPTSFQLTEEEALNISDHYPVEVELKLSQAHSVQPLSLTVLLLLSLLSPQLCPAA

SEQ ID NO: 46973 - protein, 466 aa, Homo sapiens
MATARVRMGPRCAQALWRMPWLPVFLSLAAAAAAAAAEQQVPLVLWSSDRDLWAPAADTHEGHITSDLQLSTYLDPALELGPRNVLLFLQDKLSIEDFTAYGGVFGNKQDSAFSNLENALDLAPSSLVLPAVDWYAVSTLTTYLQEKLGASPLHVDLATLRELKLNASLPALLLIRLPYTASSGLMAPREVLTGNDEVIGQVLSTLKSEDVPYTAALTAVRPSRVARDVAVVAGGLGRQLLQKQPVSPVIHPPVSYNDTAPRILFWAQNFSVAYKDQWEDLTPLTFGVQELNLTGSFWNDSFARLSLTYERLFGTTVTFKFILANRLYPVSARHWFTMERLEVHSNGSVAYFNASQVTGPSIYSFHCEYVSSLSKKGSLLVARTQPSPWQMMLQDFQIQAFNVMGEQFSYASDCASFFSPGIWMGLLTSLFMLFIFTYGLHMILSLKTMDRFDDHKGPTISLTQIV

SEQ ID NO: 46974 - protein, 1789 aa, Homo sapiens
MRVCAHRLAPVDNINKLLLIDYAARRLVACGSIWQGICQFLRLDDLFKLGEPHHRKEHYLSGAQEPDSMAGVIVEQGQGPSKLFVGTAVDGKSEYFPTLSSRKLISDEDSADMFSLVYQDEFVSSQIKIPSDTLSLYPAFDIYYIYGFVSASFVYFLTLQLDTQQTLLDTAGEKFFTSKIVRMCAGDSEFYSYVEFPIGCSWRGVEYRLVQSAHLAKPGLLLAQALGVPADEDVLFTIFSQGQKNRASPPRQTILCLFTLSNINAHIRRRIQSCYRGEGTLALPWLLNKELPCINTPMQINGNFCGLVLNQPLGGLHVIEGLPLLADSTDGMASVAAYTYRQHSVVFIGTRSGSLKKVRVDGFQDAHLYETVPVVDGSPILRDLLFSPDHRHIYLLSEKQVSQLPVETCEQYQSCAACLGSGDPHCGWCVLRHRCCREGACLGASAPHGFAEELSKCVQVRVRPNNVSVTSPGVQLTVTLHNVPDLSAGVSCAFEAAAENEAVLLPSGELLCPSPSLQELRALTRGHGATRTVRLQLLSKETGVRFAGADFVFYNCSVLQSCMSCVGSPYPCHWCKYRHTCTSRPHECSFQEGRVHSPEGCPEILPSGDLLIPVGVMQPLTLRAKNLPQPQSGQKNYECVVRVQGRQQRVPAVRFNSSSVQCQNASYSYEGDEHGDTELDFSVVWDGDFPIDKPPSFRALLYKCWAQRPSCGLCLKADPRFNCGWCISEHRCQLRTHCPAPKTNWMHLSQKGTRCSHPRITQIHPLVGPKEGGTRVTIVGENLGLLSREVGLRVAGVRCNSIPAEYISAERIVCEMEESLVPSPPPGPVELCVGDCSADFRTQSEQVYSFVTPTFDQVSPSRGPASGGTRLTISGSSLDAGSRVTVTVRDSECQFVRRDAKAIVCISPLSTLGPSQAPITLAIDRANISSPGLIYTYTQDPTVTRLEPTWSIINGSTAITVSGTHLLTVQEPRVRAKYRGIETTNTCQVINDTAMLCKAPGIFLGRPQPRAQGEHPDEFGFLLDHVQTARSLNRSSFTYYPDPSFEPLGPSGVLDVKPGSHVVLKGKNLIPAAAGSSRLNYTVLIGGQPCSLTVSDTQLLCDSPSQTGRQPVMVLVGGLEFWLGTLHISAERALTLPAMMGLAAGGGLLLLAITAVLVAYKRKTQDADRTLKRLQLQMDNLESRVALECKEAFAELQTDINELTNHMDEVQIPFLDYRTYAVRVLFPGIEAHPVLKELDTPPNVEKALRLFGQLLHSRAFVLTFIHTLEAQSSFSMRDRGTVASLTMVALQSRLDYATGLLKQLLADLIEKNLESKNHPKLLLRRTESVAEKMLTNWFTFLLHKFLKECAGEPLFLLYCAIKQQMEKGPIDAITGEARYSLSEDKLIRQQIDYKTLTLHCVCPENEGSAQVPVKVLNCDSITQAKDKLLDTVYKGIPYSQRPKAEDMDLEWRQGRMTRIILQDEDVTTKIECDWKRLNSLAHYQVTDGSLVALVPKQVSAYNMANSFTFTRSLSRYESLLRTASSPDSLRSRAPMITPDQETGTKLWHLVKNHDHADHREGDRGSKMVSEIYLTRLLATKGTLQKFVDDLFETVFSTAHRGSALPLAIKYMFDFLDEQADQRQISDPDVRHTWKSNCLPLRFWVNVIKNPQFVFDIHKNSITDACLSVVAQTFMDSCSTSEHRLGKDSPSNKLLYAKDIPNYKSWVERYYRDIAKMASISDQDMDAYLVEQSRLHASDFSVLSALNELYFYVTKYRQEILTALDRDASCRKHKLRQKLEQIISLVSSDS

SEQ ID NO: 46975 - protein, 227 aa, Homo sapiens
MDRGQHPPGWAWQWLSSHPATLHQLECSGAISVHCNLYLLGSSDSSAPASRVAETTGPESSVTAAPRARKYKCGLPQPCPEEHLAFRVVSGAANVIGPKICLEDKMLMSSVKDNVGRGLNIALVNDVNDLLKFIRPLHEGTLVFVASYDDPATKMNEETRKLFSELGSRNAKELAFRDSWVFVGAKGVQNKSPFEQHVKNSKHSNKYEGWPEALEMEGCIPRRSTAS

SEQ ID NO: 46976 - protein, 453 aa, Homo sapiens [sequence omitted]

SEQ ID NO: 46977 - protein, 185 aa, Homo sapiens [sequence omitted]

SEQ ID NO: 46978 - protein, 353 aa, Homo sapiens
MRFDYVWLRDHCRSASCYNSKTHQRSLDTASVDLCIKPKTIRLDETTLFFTWPDGHVTKYDLNWLVKNSYEGQKQKVIQPRILWNAEIYQQAQVPSVDCQSFLETNEGLKKFLQNFLLYGIAFVENVPPTQEHTEKLAERISLIRETIYGRMWYFTSDFSRGDTAYTKLALDRHTDTTYFQEPCGIQVFHCLKHEGTGGRTLLVDGFYAAEQVLQKAPEEFELLSKVPLKHEYIEDVGECHNHMIGIGPVLNIYPWNKELYLIRYNNYDRAVINTVPYDVVHRWYTAHRTLTIELRRPENEFWVKLKPGRVLFIDNWRVLHGRECFTGYRQLCGCYLTRDDVLNTARLLGLQA

SEQ ID NO: 46979 - protein, 308 aa, Homo sapiens
MRFDYVWLRDHCRSASCYNSKTHQRSLDTASVDLCIKPKTIRLDETTLFFTWPDGHVTKYDLNWLVKNSYEGQKQKVIQPRILWNAEIYQQAQVPSVDCQSFLETNEGLKKFLQNFLLYGIAFVENVPPTQEHTEKLAERISLIRETIYGRMWYFTSDFSRGDTAYTKLALDRHTDTTYFQEPCGIQVFHCLKHEGTGGRTLLVDGFYAAEQVLQKAPEEFELLSKVPLKHEYIEDVGECHNHMIGIGPVLNIYPWNKELYLIRLFKEKQNTVNRQWNSSLQCDIPERILTYRHFVSGTSIEHRGSLI

SEQ ID NO: 46980 - protein, 49 aa, Homo sapiens
MAILFAVVARGTTILAKHAWCGGNFLEVTEQILAKIPSENNKLTYSHGK

SEQ ID NO: 46981 - protein, 119 aa, Homo sapiens
MNSEFSSVLAAQLKHHSENKGLDKVMETQAQVDELKGIMVRNIDLVAQRGERLELLIDKTENLVDSSVTFKTTSRNLARAMCMKNLKLTIIIIIVSIVFIYIIVSPLCGGFTWPSCVKK

SEQ ID NO: 46982 - protein, 298 aa, Homo sapiens
MNDSLRTDVFVRFQPESIACACIYLAARTLEIPLPNRPHWFLLFGATEEEIQEICLKILQLYARKKVDLTHLEGEVEKRKHAIEEAKAQARGLLPGGTQVLDGTSGFSPAPKLVESPKEGKGSKPSPLSVKNTKRRLEGAKKAKADSPVNGLPKGRESRSRSRSREQSYSRSPSRSASPKRRKSDSGSTSGGSKSQSRSRSRSDSPPRQAPRSAPYKGSEIRGSRKSKDCKYPQKPHKSRSRSSSRSRSRSRERADNPGKYKKKSHYYRDQRRERSRSYERTGRRYERDHPGHSRHRR

SEQ ID NO: 46983 - protein, 39 aa, Homo sapiens
MRTLWINRITAASQEHGLKYPALIGNLVKALPGWLKGLP

SEQ ID NO: 46984 - protein, 701 aa, Homo sapiens
MRWKCRVCLDYDLCTQCYMHNKHELAHAFDRYETAHSRPVTLSPRQGLPRIPLRGIFQGAKVVRGPDWEWGSQDGGEGKPGRVVDIRGWDVETGRSVASVTWADGTTNVYRVGHKGKVDLKCVGEAAGGFYYKDHLPRLGKPAELQRRVSADSQPFQHGDKVKCLLDTDVLREMQEGHGGWNPRMAEFIGQTGTVHRITDRGDVRVQFNHETRWTFHPGALTKHHSFWVGDVVRVIGDLDTVKRLQAGHGEWTDDMAPALGRVGKVVKVFGDGNLRVAVAGQRWTFSPSCLVAYRPEEDANLDVAERARENKSSLSVALDKLRAQKSDPEHPGRLVVEVALGNAARALDLLRRRPEQVDTKNQGRTALQVAAYLGQVELIRLLLQARAGVDLPDDEGNTALHYAALGNQPEATRVLLSAGCRADAINSTQSTALHVAVQRGFLEVVRALCERGCDVNLPDAHSDTPLHSAISAGTGASGIVEVLTEVPNIDVTATNSQGFTLLHHASLKGHALAVRKILARARQLVDAKKEDGFTALHLAALNNHREVAQILIREGRCDVNVRNRKLQSPLHLAVQQAHVGLVPLLVDAGCSVNAEDEEGDTALHVALQRHQLLPLVADGAGGDPGPLQLLSRLQASGLPGSAELTVGAAVACFLALEGADVSYTNHRGRSPLDLAAEGRVLKALQGCAQRFRERQAGGGR

SEQ ID NO: 46985 - protein, 526 aa, Homo sapiens
MEERDLLSDLQDISDSERKTSSAESSSAESGSGSEEEEEEEEEEEEEGSTSEESEEEEEEEEEEEEETGSNSEEASEQSAEEVSEEEMSEDEERENENHLLVVPESRFDRDSGESEEAEEEVGEGTPQSSALTEGDYVPDSPALSPIELKQELPKYLPALQGCRSVEEFQCLNRIEEGTYGVVYRAKDKKTDEIVALKRLKMEKEKEGFPITSLREINTILKAQHPNIVTVREIVVGSNMDKIYIVMNYVEHDLKSLMETMKQPFLPGEVKTLMIQLLRGVKHLHDNWILHRDLKTSNLLLSHAGILKVGDFGLAREYGSPLKAYTPVVVTLWYRAPELLLGAKEYSTAVDMWSVGCIFGELLTQKPLFPGKSEIDQINKVFKDLGTPSEKIWPGYSELPAVKKMTFSEHPYNNLRKRFGALLSDQGFDLMNKFLTYFPGRRISAEDGLKHEYFRETPLPIDPSMFPTWPAKSEQQRVKRGTSPRPPEGGLGYSQLGDDDLKETGFHLTTTNQGASAAGPGFSLKF

SEQ ID NO: 46986 - protein, 254 aa, Homo sapiens
MRFATVVLGLVSLKNVAVSFAETVKSSAPIFTVIMSRMILGEYTGLLVNLSLIPVMGGLALCTATEISFNVLGFSAALSTNIMDCLQNVFSKKLLSGDKYRFSAPELQFYTSAAAVAMLVPARVFFTDVPVIGRSGKSFSYNQDVVLLLLTDGVLFHLQSVTAYALMGKISPVTFSVASTVKHALSIWLSVIVFGNKITSLSAVGTALVTVGVLLYNKARQHQQEALQSLAAATGRAPDDTVEPLLPQDPRQHP

SEQ ID NO: 46987 - protein, 437 aa, Homo sapiens
MNKELSPDAAAYCCSACHGDETWSYNHPIRGRAKSRSLSASPALGSTKEFRRTRSLHGPCPVTTFGPKACVLQNPQTIMHIQDPASQRLTWNKSPKSVLVIKKMRDASLLQPFKELCTHLMEENMIVYVEKKVLEDPAIASDESFGAVKKKFCTFREDYDDISNQIDFIICLGGDGTLLYASSLFQGSVPPVMAFHLGSLGFLTPFSFENFQSQVTQVIEGNAAVVLRSRLKVRVVKELRGKKTAVHNGLGENGSQAAGLDMDVGKQAMQYQVLNEVVIDRGPSSYLSNVDVYLDGHLITTVQGDGVIVSTPTGSTAYAAAAGASMIHPNVPAIMITPICPHSLSFRPIVVPAGVELKIMLSPEARNTAWVSFDGRKRQEIRHGDSISITTSCYPLPSICVRDPVSDWFESLAQCLHWNVRKKQAHFEEEEEEEEEG

SEQ ID NO: 46988 - protein, 47 aa, Homo sapiens
MCQKEFAPRSKNSSGMRRHRSPKLAANNNNNKRKGRARWLTPVIPAL

SEQ ID NO: 46989 - protein, 142 aa, Homo sapiens
MIRVYLLQGWYIVTYALGIYHLNLFIAFLSPKVDPSLMEDSDDGPSLPTKQNEEFRPFIRRLPEFKFWHAATKGILVAMVCTFFDAFNVPVFWPILVMYFIMLFCITMKRQIKHMIKYRYIPFTHGKRRYRGKEDAGKAFAS

SEQ ID NO: 46990 - protein, 1427 aa, Homo sapiens
MQQPDEEGCLSAECSASLCFHGGRCVPGSAQPCHCPPGFQGPRCQYDVDECRTHNGGCQHRCVNTPGSYLCECKPGFRLHTDSRTCLAINSCALGNGGCQHHCVQLTITRHRCQCRPGFQLQEDGRHCVRRSPCANRNGSCMHRCQVVRGLARCECHVGYQLAADGKACEDVDECAAGLAQCAHGCLNTQGSFKCVCHAGYELGADGRQCYRIEMEIVNSCEANNGGCSHGCSHTSAGPLCTCPRGYELDTDQRTCIDVDDCADSPCCQQVCTNNPGGYECGCYAGYRLSADGCGCEDVDECASSRGGCEHHCTNLAGSFQCSCEAGYRLHEDRRGCSPLEEPMVDLDGELPFVRPLPHIAVLQDELPQLFQDDDVGADEEEAELRGEHTLTEKFVCLDDSFGHDCSLTCDDCRNGGTCLLGLDGCDCPEGWTGLICNETCPPDTFGKNCSFSCSCQNGGTCDSVTGACRCPPGVSGTNCEDGCPKGYYGKHCRKKCNCANRGRCHRLYGACLCDPGLYGRFCHLTCPPWAFGPGCSEECQCVQPHTQSCDKRDGSCSCKAGFRGERCQAECELGYFGPGCWQACTCPVGVACDSVSGECGKRCPAGFQGEDCGQECPVGTFGVNCSSSCSCGGAPCHGVTGQCRCPPGRTGEDCEADCPEGRWGLGCQEICPACQHAARCDPETGACLCLPGFVGSRCQDVCPAGWYGPSCQTRCSCANDGHCHPATGHCSCAPGWTGFSCQRACDTGHWGPDCSHPCNCSAGHGSCDAISGLCLCEAGYVGPRCEQQCPQGHFGPGCEQRCQCQHGAACDHVSGACTCPAGWRGTFCEHACPAGFFGLDCRSACNCTAGAACDAVNGSCLCPAGRRGPRCAETCPAHTYGHNCSQACACFNGASCDPVHGQCHCAPGWMGPSCLQACPAGLYGDNCRHSCLCQNGGTCDPVSGHCACPEGWAGLACEKECLPRDVRAGCRHSGGCLNGGLCDPHTGRCLCPAGWTGDKCQSPCLRGWFGEACAQRCSCPPGAACHHVTGACRCPPGFTGSGCEQACPPGSFGEDCAQMCQCPGENPACHPATGTCSCAAGYHGPSCQQRCPPGRYGPGCEQLCGCLNGGSCDAATGACRCPTGFLGTDCNLTCPQGRFGPNCTHVCGCGQGAACDPVTGTCLCPPGRAGVRCERGCPQNRFGVGCEHTCSCRNGGLCHASNGSCSCGLGWTGRHCELACPPGRYGAACHLECSCHNNSTCEPATGTCRCGPGFYGQACEHPCPPGFHGAGCQGLCWCQHGAPCDPISGRCLCPAGFHGHFCERGCEPGSFGEGCHQRCDCDGGAPCDPVTGLCLCPPGRSGATCNLDCRRGQFGPSCTLHCDCGGGADCDPVSGQCHCVDGYMGPTCREGGPLRLPENPSLAQGSAGTLPASSRPTSRSGGPARH

SEQ ID NO: 46991 - protein, 394 aa, Homo sapiens
MYKRGLVQVWSLEQPEWHCKIDEGSAGLVASCWSPDGRHILNTTEFHLRITVWSLCTKSVSYIKYPKACLQGITFTRDGRYMALAERRDCKDYVSIFVCSDWQLLRHFDTDTQDLTGIEWAPNGCVLAVWDTCLEYKILLYSLDGRLLSTYSAYEWSLGIKSVAWSPSSQFLAVGSYDGKVRILNHVTWKMITEFGHPAAINDPKIVVYKEAEKSPQLGLGCLSFPPPRAGAGPLPSSESKYEIASVPVSLQTLKPVTDRANPKIGIGMLAFSPDSYFLATRNDNIPNAVWVWDIQKLRLFAVLEQLSPVRAFQWDPQQPRLAICTGGSRLYLWSPAGCMSVQVPGEGDFAVLSLCWHLSGDSMALLSKDHFCLCFLETEAVVGTACRQLGGHT

SEQ ID NO: 46992 - protein, 345 aa, Homo sapiens
MIYSTRYGSPKRQLQFYRNLGKSGLRVSCLGLGTWVTFGGQITDEMAEQLMTLAYDNGINLFDTAEVYAAGKAEVVLGNIIKKKGWRRSSLVITTKIFWGGKAETERGLSRKHIIEGLKASLERLQLEYVDVVFANRPDPNTPMEETVRAMTHVINQGMAMYWGTSRWSSMEIMEAYSVARQFNLTPPICEQAEYHMFQREKVEVQLPELFHKIGVGAMTWSPLACGIVSGKYDSGIPPYSRASLKGYQWLKDKILSEEGRRQQAKLKELQAIAERLGCTLPQLAIAWCLRNEGVSSVLLGASNADQLMENIGAIQVLPKLSSSIIHEIDSILGNKPYSKKDYRS

SEQ ID NO: 46993 - protein, 521 aa, Homo sapiens [sequence omitted]

SEQ ID NO: 46994 - protein, 63 aa, Homo sapiens
MVAIHQKVLKYAGHPPFEHSPIRFCTQNGDYIILDSSWSSFVNPWSRKISFIIGRHKVRTQFT

SEQ ID NO: 46995 - protein, 85 aa, Homo sapiens
MQKKRKEIILPLLLCSVDILACHYIQGPYDVVVLPGGNLGAQNLSESAAVKEILKEQENRKGLIAAICAGDVQGQPVLQRHWWVG

SEQ ID NO: 46996 - protein, 127 aa, Homo sapiens
MSGNMTLVDELSGMQLAIQAAISQAFKTPEVIRLFAKKQPGQLRTRLAEMDRDLMVGKLERDLYTQQKVEILTALRKLGEKLTADDEAFLSANAGAILSQFEKVSTDLGSGDKILALASFEVEKTKK

SEQ ID NO: 46997 - protein, 313 aa, Homo sapiens
MAFQQSGTAADEPSSLGPATQVVPVQPPHLISQPYSPAGSRWRDYGALAIIMAGIAFGFHQLYKKYLLPLILGGREDRKQLERMEAGLSELSGSVAQTVTQLQTTLASVQELLIQQQQKIQELAHELAAAKATTSTNWILESQNINELKSEINSLKGLLLNRRQFPPSPSAPKIPSWQIPVKSPSPSSPAAVNHHSSSDISPVSNESTSSSPGKEGHSPEGSTVTYHLLGPQEEGEGVVDVKGQVRMEVQGEEEKREDKEDEEDEEDDDVSHVDEEDCLGVQREDRRGGDGQINEQVEKLRRPEGASNESERD

SEQ ID NO: 46998 - protein, 272 aa, Homo sapiens
MVVFAIGVCTGLVGLFVDFFVRLFTQLKFGVVQTSVEECSQKGCLALSLLELLGFNLTFVFLASLLVLIEPVAAGSGIPEVKCYLNGVKVPGIVRLRTLLCKVLGVLFSVAGGLFVEKEGPMIHSGSVVGAGLPQFQSISLRKIQFNFPYFRSDRDKRDFVSAGAAAGVAAAFGAPIGGTLFSLEEGSSFWNQGLTWKVLFCSMSATFTLNFFRSGIQFGSWGSFQLPGLLNFGEFKSLREPPCVSGNHRGGVCGLDGVRRMPTDVLFESNR

SEQ ID NO: 46999 - protein, 60 aa, Homo sapiens
MSLLFSRCNSIVTVKKNKRHMAEVNASPLKHFVTAKKKINGIFEQLGAYIQESATFLEGN

SEQ ID NO: 47000 - protein, 1420 aa, Homo sapiens
MPNENSVKEPEIRCDEKPEDLLEEPKTTSEETLEDCSEVTPAMQIPRTKEEANGDVFETFMFPCQHCERKFTTKQGLERHMHIHISTVNHAFKCKYCGKAFGTQINRRRHERRHEAGLKRKPSQTLQPSEDLADGKASGENVASKDDSSPPSLGPDCLIMNSEKASQDTINSSVVEENGEVKELHPCKYCKKVFGTHTNMRRHQRRVHERHLIPKGVRRKGGLEEPQPPAEQAQATQNVYVPSTEPEEEGEADDVYIMDISSNISENLNYYIDGKIQTNNNTSNCDVIEMESASADLYGINCLLTPVTVEITQNIKTTQVPVTEDLPKEPLGSTNSEAKKRRTASPPALPKIKAETDSDPMVPSCSLSLPLSISTTEAVSFHKEKSVYLSSKLKQLLQTQDKLTPAGISATEIAKLGPVCVSAPASMLPVTSSRFKRRTSSPPSSPQHSPALRDFGKPSDGKAAWTDAGLTSKKSKLESHSDSPAWSLSGRDERETVSPPCFDEYKMSKEWTASSAFSSVCNQQPLDLSSGVKQKAEGTGKTPVQWESVLDLSVHKKHCSDSEGKEFKESHSVQPTCSAVKKRKPTTCMLQKVLLNEYNGIDLPVENPADGTRSPSPCKSLEAQPDPDLGPGSGFPAPTVESTPDVCPSSPALQTPSLSSGQLPPLLIPTDPSSPPPCPPVLTVATPPPPLLPTVPLPAPSSSASPHPCPSPLSNATAQSPLPILSPTVSPSPSPIPPVEPLMSAASPGPPTLSSSSSSSSSSSSFSSSSSSSSPSPPPLSAISSVVSSGDNLEASLPMISFKQEELENEGLKPREEPQSAAEQDVVVQETFNKNFVCNVCESPFLSIKDLTKHLSIHAEEWPFKCEFCVQLFKDKTDLSEHRFLLHGVGNIFVCSVCKKEFAFLCNLQQHQRDLHPDKVCTHHEFESGTLRPQNFTDPSKAHVEHMQSLPEDPLETSKEEEELNDSSEELYTTIKIMASGIKTKDPDVRLGLNQHYPSFKPPPFQYHHRNPMGIGVTATNFTTHNIPQTFTTAIRCTKCGKGVDNMPELHKHILACASASDKKRYTPKKNPVPLKQTVQPKNGVVVLDNSGKNAFRRMGQPKRLNFSVELSKMSSNKLKLNALKKKNQLVQKAILQKNKSAKQKADLKNACESSSHICPYCNREFTYIGSLNKHAAFSCPKKPLSPPKKKVSHSSKKGGHSSPASSDKNSNSNHRRRTADAEIKMQSMQTPLGKTRARSSGPTQVPLPSSSFRSKQNVKFAASVKSKKPSSSSLRNSSPIRMAKITHVEGKKPKAVAKNHSAQLSSKTSRSLHVRVQKSKAVLQSKSTLASKKRTDRFNIKSRERSGGPVTRSLQLAAAADLSENKREDGSAKQELKDFSYSLRLASRCSPPAAPYITRQYRKVKAPAAAQFQGPFFKE

SEQ ID NO: 47001 - protein, 1384 aa, Homo sapiens
MPNENSVKEPEIRCDEKPEDLLEEPKTTSEETLEDCSEVTPAMQIPRTKEEANGDVFETFMFPCQHCERKFTTKQGLERHMHIHISTVNHAFKCKYCGKAFGTQINRRRHERRHEAGLKRKPSQTLQPSEDLADGKASGENVASKDDSSPPSLGPDCLIMNSEKASQDTINSSVVEENGEVKELHPCKYCKKVFGTHTNMRRHQRRVHERHLIPKGVRRKGGLEEPQPPAEQAQATQNVYVPSTEPEEEGEADDVYIMDISSNISENLNYYIDGKIQTNNNTSNCDVIEMESASADLYGINCLLTPVTVEITQNIKTTQVPVTEDLPKEPLGSTNSEAKKRRTASPPALPKIKAETDSDPMVPSCSLSLPLSISTTEAVSFHKEKSVYLSSKLKQLLQTQDKLTPAGISATEIAKLGPVCVSAPASMLPVTSSRFKRRTSSPPSSPQHSPALRDFGKPSDGKAAWTDAGLTSKKSKLESHSDSPAWSLSGRDERETVSPPCFDEYKMSKEWTASSAFSSVCNQQPLDLSSGVKQKAEGTGKTPVQWESVLDLSVHKKHCSDSEGKEFKESHSVQPTCSAVKKRKPTTCMLQKVLLNEYNGIDLPVENPADGTRSPSPCKSLEAQPDPDLGPGSGFPAPTVESTPDVCPSSPALQTPSLSSGQLPPLLIPTDPSSPPPCPPVLTVATPPPPLLPTVPLPAPSSSASPHPCPSPLSNATAQSPLPILSPTVSPSPSPIPPVEPLMSAASPGPPTLSSSSSSSSSSSSFSSSSSSSSPSPPPLSAISSVVSSGDNLEASLPMISFKQEELENEGLKPREEPQSAAEQDVVVQETFNKNFVCNVCESPFLSIKDLTKHLSIHAEEWPFKCEFCVQLFKDKTDLSEHRFLLHGVGNIFVCSVCKKEFAFLCNLQQHQRDLHPDKVCTHHEFESGTLRPQNFTDPSKAHVEHMQSLPEDPLETSKEEEELNDSSEELYTTIKIMASGIKTKDPDVRLGLNQHYPSFKPPPFQYHHRNPMGIGVTATNFTTHNIPQTFTTAIRCTKCGKGVDNMPELHKHILACASASDKKRYTPKKNPVPLKQTVQPKNGVVVLDNSGKNAFRRMGQPKRLNFSVELSKMSSNKLKLNALKKKNQLVQKAILQKNKSAKQKADLKNACESSSHICPYCNREFTYIGSLNKHAAFSCPKKPLSPPKKKVSHSSKKGGHSSPASSDKNSNSNHRRRTADAEIKMQSMQTPLGKTRARSSGPTQVPLPSSSFRSKQNVKFAASVKSKKPSSSSLRNSSPIRMAKITHVEGKKPKAVAKNHSAQLSSKTSRSLHVRVQKSKAVLQSKSTLASKKRTDRFNIKSRERSGGPVTRSLQLAAAADLSENKREDGSAKQELKDFRNFL

SEQ ID NO: 47002 - protein, 181 aa, Homo sapiens
MAKKHGPVGLLHVDAHTDTTDKALGEKLYHGAPFRRCVDEGLLDCKRVVQIGIRGSSTTLDPYRYNRSQGFRVVLAEDCWMKSLVPLMGEVRQQMGGKPIYISFDIDALDPAYAPGTGTPEIAGLTPSQALEIIRGCQGLNVMGCDLVEVSPPYDLSGNTALLAANLLFEMLCALPKVTTV

SEQ ID NO: 47003 - protein, 325 aa, Homo sapiens [sequence omitted]

SEQ ID NO: 47004 - protein, 3261 aa, Homo sapiens
MQIEVTAWIGPETESENEFRPLDERIDEFHPKATRTLFIGNLEKTTTYHDLRNIFQRFGEIVDIDIKKVNGVPQYAFLQYCDIASVCKAIKKMDGEYLGNNRLKLGFGKSMPTNCVWLDGLSSNVSDQYLTRHFCRYGPVVKVVFDRLKGMALVLYNEIEYAQAAVKETKGRKIGGNKIKVDFANRESQLAFYHCMEKSGQDIRDFYEMLAERREERRASYDYNQDRTYYESVRTPGTYPEDSRRDYPARGREFYSEWETYQGDYYESRYYDDPREYRDYRNDPYEQDIREYSYRQRERERERERFESDRDRDHERRPIERSQSPVHLRRPQSPGASPSQAERLPSDSERRLYSRSSDRSGSCSSLSPPRYEKLDKSRLERYTKNEKTDKERTFDPERVERERRLIRKEKVEKDKTDKQKRKGKVHSPSSQSSETDQENEREQSPEKPRSCNKLSREKADKEGIAKNRLELMPCVVLTRVKEKEGKVIDHTPVEKLKAKLDNDTVKSSALDQKLQVSQTEPAKSDLSKLESVRMKVPKEKGLSSHVEVVEKEGRLKARKHLKPEQPADGVSAVDLEKLEARKRRFADSNLKAEKQKPEVKKSSPEMEDARVLSKKQPDVSSREVILLREGEAERKPVRKEILKRESKKIKLDRLNTVASPKDCQELASISVGSGSRPSSDLQARLGELAGESVENQEVQSKKPIPSKPQLKQLQVLDDQGPEREDVRKNYCSLRDETPERKSGQEKSHSVNTEEKIGIDIDHTQSYRKQMEQSRRKQQMEMEIAKSEKFGSPKKDVDEYERRSLVHEVGKPPQDVTDDSPPSKKKRMDHVDFDICTKRERNYRSSRQISEDSERTGGSPSVRHGSFHEDEDPIGSPRLLSVKGSPKVDEKVLPYSNITVREESLKFNPYDSSRREQMADMAKIKLSVLNSEDELNRWDSQMKQDAGRFDVSFPNSIIKRDSLRKRSVRDLEPGEVPSDSDEDGEHKSHSPRASALYESSRLSFLLRDREDKLRERDERLSSSLERNKFYSFALDKTITPDTKALLERAKSLSSSREENWSFLDWDSRFANFRNNKDKEKVDSAPRPIPSWYMKKKKIRTDSEGKMDDKKEDHKEEEQERQELFASRFLHSSIFEQDSKRLQHLERKEEDSDFISGRIYGKQTSEGANSTTDSIQEPVVLFHSRFMELTRMQQKEKEKDQKPKEVEKQEDTENHPKTPESAPENKDSELKTPPSVGPPSVTVVTLESAPSALEKTTGDKTVEAPLVTEEKTVEPATVSEEAKPASEPAPAPVEQLEQVDLPPGADPDKEAAMMPAGVEEGSSGDQPPYLDAKPPTPGASFSQAESNVDPEPDSTQPLSKPAQKSEEANEPKAEKPDATADAEPDANQKAEAAPESQPPASEDLEVDPPVAAKDKKPNKSKRSKTPVQAAAVSIVEKPVTRKSERIDREKLKRSNSPRGEAQKLLELKMEAEKITRTASKNSAADLEHPEPSLPLSRTRRRNVRSVYATMGDHENRSPVKEPVEQPRVTRKRLERELQEAAAVPTTPRRGRPPKTRRRADEEEENEAKEPAETLKPPEGWRSPRSQKTAAGGGPQGKKGKNEPKVDATRPEATTEVGPQIGVKESSMEPKAAEEEAGSEQKRDRKDAGTDKNPPETAPVEVVEKKPAPEKNSKSKRGRSRNSRLAVDKSASLKNVDAAVSPRGAAAQAGERESGVVAVSPEKSESPQKEDGLSSQLKSDPVDPDKEPEKEDVSASGPSPEATQLAKQMELEQAVEHIAKLAEASASAAYKADAPEGLAPEDRDKPAHQASETELAAAIGSIINDISGEPENFPAPPPYPGESQTDLQPPAGAQALQPSEEGMETDEAVSGILETEAATESSRPPVNAPDPSAGPTDTKEARGNSSETSHSVPEAKGSKEVEVTLVRKDKGRQKTTRSRRKRNTNKKVVAPVESHVPESNQAQGESPAANEGTTVQHPEAPQEEKQSEKPHSTPPQSCTSDLSKIPSTENSSQEISVEERTPTKASVPPDLPPPPQPAPVDEEPQARFRVHSIIESDPVTPPSDPSIPIPTLPSVTAAKLSPPVASGGIPHQSPPTKVTEWITRQEEPRAQSTPSPALPPDTKASDVDTSSSTLRKILMDPKYVSATSVTSTSVTTAIAEPVSAAPCLHEAPPPPVDSKKPLEEKTAPPVTNNSEIQASEVLVAADKEKVAPVIAPKITSVISRMPVSIDLENSQKITLAKPAPQTLTGLVSALTGLVNVSLVPVNALKGPVKGSVTTLKSLVSTPAGPVNVLKGPVNVLTGPVNVLTTPVNATVGTVNAAPGTVNAAASAVNATASAVTVTAGAVTAASGGVTATTGTVTMAGAVIAPSTKCKQRASANENSRFHPGSMPVIDDRPADAGSGAGLRVNTSEGVVLLSYSGQKTEGPQRISAKISQIPPASAMDIEFQQSVSKSQVKPDSVTASQPPSKGPQAPAGYANVATHSTLVLTAQTYNASPVISSVKADRPSLEKPEPIHLSVSTPVTQGGTVKVLTQGINTPPVLVHNQLVLTPSIVTTNKKLADPVTLKIETKVLQPANLGSTLTPHHPPALPSKLPTEVNHVPSGPSIPADRTVSHLAAAKLDAHSPRPSGPGPSSFPRASHPSSTASTALSTNATVMLAAGIPVPQFISSIHPEQSVIMPPHSITQTVSLSHLSQGEVRMNTPTLPSITYSIRPEALHSPRAPLQPQQIEVRAPQRASTPQPAPAGVPALASQHPPEEEVHYHLPVARATAPVQSEVLVMQSEYRLHPYTVPRDVRIMVHPHVTAVSEQPRAADGVVKVPPASKAPQQPGKEAAKTPDAKAAPTPTPAPVPVPVPLPAPAPAPHGEARILTVTPSNQLQGLPLTPPVVVTHGVQIVHSSGELFQEYRYGDIRTYHPPAQLTHTQFPAASSVGLPSRTKTAAQGPPPEGEPLQPPQPVQSTQPAQPAPPCPPSQLGQPGQPPSSKMPQVSQEAKGTQTGVEQPRLPAGPANRPPEPHTQVQRAQAETGPTSFPSPVSVSMKPDLPVSLPTQTAPKQPLFVPTTSGPSTPPGLVLPHTEFQPAPKQDSSPHLTSQRPVDMVQLLKKYPIVWQGLLALKNDTAAVQLHFVSGNNVLAHRSLPLSEGGPPLRIAQRMRLEATQLEGVARRMTVETDYCLLLALPCGRDQEDVVSQTESLKAAFITYLQAKQAAGIINVPNPGSNQPAYVLQIFPPCEFSESHLSRLAPDLLASISNISPHLMIVIASV

SEQ ID NO: 47005 - protein, 99 aa, Homo sapiens [sequence omitted]

SEQ ID NO: 47006 - protein, 1945 aa, Homo sapiens
MASLLSLQEENQLLQQELSRVEDLLAQSRAERDELAIKYNAVSERLEQALRLEPGELETQEPRGLVRQSVELRRQLQEEQASYRRKLQAYQEGQQRQAQLVQRLQGKILQYKKRCSELEQQLLERSGELEQQRLRDTEHSQDLESALIRLEEEQQRSASLAQVNAMLREQLDQAGSANQALSEDIRKVTNDWTRCRKELEHREAAWRREEESFNAYFSNEHSRLLLLWRQVVGFRRLVSEVKMFTERDLLQLGGELARTSRAVQEAGLGLSTGLRLAESRAEAALEKQALLQAQLEEQLRDKVLREKDLAQQQMQSDLDKADLSARVTELGLAVKRLEKQNLEKDQVNKDLTEKLEALESLRLQEQAALETEDGEGLQQTLRDLAQAVLSDSESGVQLSGSERTADASNGSLRGLSGQRTPSPPRRSSPGRGRSPRRGPSPACSDSSTLALIHSALHKRQLQVQDMRGRYEASQDLLGTLRKQLSDSESERRALEEQLQRLRDKTDGAMQAHEDAQREVQRLRSANELLSREKSNLAHSLQVAQQQAEELRQEREKLQAAQEELRRQRDRLEEEQEDAVQDGARVRRELERSHRQLEQLEGKRSVLAKELVEVREALSRATLQRDMLQAEKAEVAEALTKAEAGRVELELSMTKLRAEEASLQDSLSKLSALNESLAQDKLDLNRLVAQLEEEKSALQGRQRQAEQEATVAREEQERLEELRLEQEVARQGLEGSLRVAEQAQEALEQQLPTLRHERSQLQEQLAQLSRQLSGREQELEQARREAQRQVEALERAAREKEALAKEHAGLAVQLVAAEREGRTLSEEATRLRLEKEALEGSLFEVQRQLAQLEARREQLEAEGQALLLAKETLTGELAGLRQQIIATQEKASLDKELMAQKLVQAEREAQASLREQRAAHEEDLQRLQREKEAAWRELEAERAQLQSQLQREQEELLARLEAEKEELSEEIAALQQERDEGLLLAESEKQQALSLKESEKTALSEKLMGTRHSLATISLEMERQKRDAQSRQEQDRSTVNALTSELRDLRAQREEAAAAHAQEVRRLQEQARDLGKQRDSCLREAEELRTQLRLLEDARDGLRRELLEAQRKLRESQEGREVQRQEAGELRRSLGEGAKEREALRRSNEELRSAVKKAESERISLKLANEDKEQKLALLEEARTAVGKEAGELRTGLQEVERSRLEARRELQELRRQMKMLDSENTRLGRELAELQGRLALGERAEKESRRETLGLRQRLLKGEASLEVMRQELQVAQRKLQEQEGEFRTRERRLLGSLEEARGTEKQQLDHARGLELKLEAARAEAAELGLRLSAAEGRAQGLEAELARVEVQRRAAEAQLGGLRSALRRGLGLGRAPSPAPRPVPGSPARDAPAEGSGEGLNSPSTLECSPGSQPPSPGPATSPASPDLDPEAVRGALREFLQELRSAQRERDELRTQTSALNRQLAEMEAERDSATSRARQLQKAVAESEEARRSVDGRLSGVQAELALQEESVRRSERERRATLDQVATLERSLQATESELRASQEKISKMKANETKLEGDKRRLKEVLDASESRTVKLELQRRSLEGELQRSRLGLSDREAQAQALQDRVDSLQRQVADSEVKAGTLQLTVERLNGALAKVEESEGALRDKVRGLTEALAQSSASLNSTRDKNLHLQKALTACEHDRQVLQERLDAARQALSEARKQSSSLGEQVQTLRGEVADLELQRVEAEGQLQQLREVLRQRQEGEAAALNTVQKLQDERRLLQERLGSLQRALAQLEAEKREVERSALRLEKDRVALRRTLDKVEREKLRSHEDTVRLSAEKGRLDRTLTGAELELAEAQRQIQQLEAQVVVLEQSHSPAQLEVDAQQQQLELQQEVERLRSAQAQTERTLEARERAHRQRVRGLEEQVSTLKGQLQQELRRSSAPFSPPSGPPEK

SEQ ID NO: 47007 - protein, 264 aa, Homo sapiens
MNEKIERLKAELVVFKGLMSDPMTDLDTKIQEKAMKVDMDICRRIDITAKLCDVAQQRNSEDVSKIFQVVPKKKERKVASDDDISEQDGEVNRFSDDEVGSMNITDEMKRMFNQLRETFDFDDDCDSLTWEENEDTLLLWEDFTNCNPTIDLQGEQEENLGNLIHETESFFKTRDKEYQETIGQIELELATAKSDMNRHLHEYMEMCSMKRGLDVQMETCRRLIKGSADRNSPSPSSVASSDSGSTDEIQDEFEREADVEPMVS

SEQ ID NO: 47008 - protein, 192 aa, Homo sapiens
MRNSKLKDIRNAWKHSRMFFGKNKVMMVALGRSPSDEYKDNLHQVSKRLRGEVGLLFTNRTKEEVNEWFTKYTEMDYARAGNKAAFTVSLDPGPLEQFPHSMEPQLRQLGLPTALKRGVVTLLSDYEVCKEGDVLTPEQARVLKLFGYEMAEFKVTIKYMWDSQSGRFQQMGDDLPESASESTEESDSEDDD

SEQ ID NO: 47009 - protein, 30 aa, Homo sapiens
MGLGMAYSNCQHDFQAPYLLHGKYVKEQEQ

SEQ ID NO: 47010 - protein, 1162 aa, Homo sapiens
MYTGKLPVGKHNFSKIISLADSLQMFDVAVSCKNLLTSLVNCSVQGQVVRDVSAPSSETFRKEPEKPQVEILSSEGAGEPHSSPELAATPGGPVKAETEEAAHSVSQEMSVNSPTAQESQRNAETPAETPTTAEACSPSPAVQTFSEAKKTSTEPGCERKHYQLNFLLENEGVFSDALMVTQDVLKKLEMCSEIKGPQKEMIVKCFEGEGGHSAFQRILGKVREESLDVQTVVSLLRLYQYSNPAVKTALLDRKPEDVDTVQPKGSTEEGKTLSVLLLEHKEDLIQCVTQLRPIMESLETAKEEFLTGTEKRVILNCCEGRTPKETIENLLHRMTEEKTLTAEGLVKLLQAVKTTFPNLGLLLEKLQKSATLPSTTVQPSPDDYGTELLRRYHENLSEIFTDNQILLKMISHMTSLAPGEREVMEKLVKRDSGSGGFNSLISAVLEKQTLSATAIWQLLLVVQETKTCPLDLLMEEIRREPGADAFFRAVTTPEHATLETILRHNQLILEAIQQKIEYKLFTSEEEHLAETVKEILSIPSETASPEASLRAVLSRAMEKSVPAIEICHLLCSVHKSFPGLQPVMQELAYIGVLTKEDGEKETWKVSNKFHLEANNKEDEKAAKEDSQPGEQNDQGETGSLPGQQEKEASASPDPAKKSFICKACDKSFHFYCRLKVHMKRCRVAKSKQVQCKECSETKDSKKELDKHQLEAHGAGGEPDAPKKKKKRLPVTCDLCGREFAHASGMQYHKLTEHFDEKPFSCEECGAKFAANSTLKNHLRLHTGDRPFMCKHCLMTFTQASALAYHTKKKHSEGKMYACQYCDAVFAQSIELSRHVRTHTGDKPYVCRDCGKGFRQANGLSIHLHTFHNIEDPYDCKKCRMSFPTLQDHRKHIHEVHSKEYHPCPTCGKIFSAPSMLERHVVTHVGGKPFSCGICNKAYQQLSGLWYHNRTHHPDVFAAQNHRSSKFSSLQCSSCDKTFPNTIEHKKHIKAEHADMKFHECDQCKELFPTPALLQVHVKCQHSGSQPFRCLYCAATFRFPGALQHHVTTEHFKQSETTFPCELCGELFTSQAQLDSHLESEHPKVMSTETQAAASQMAQVIQTPEPVAPTEQVITLEETQLAGSQVFVTLPDSQASQASSELVAVTVEDLLDGTVTLICGEAK

SEQ ID NO: 47011 - protein, 615 aa, Homo sapiens
MDTSSVTHTEHYKTLIEAGLPQKVAERLDEIFQTGLVAYVDLDERAIDALREFNEEGALSVLQQFKESDLSHVQNKSAFLCGVMKTYRQREKQGSKVQESTKGPDEAKIKALLERTGYTLDVTTGQRKYGGPPPDSVYSGVQPGIGTEVFVGKIPRDLYEDELVPLFEKAGPIWDLRLMMDPLSGQNRGYAFITFCGKEAAQEAVKLCDSYEIRPGKHLGVCISVANNRLFVGSIPKNKTKENILEEFSKVTEGLVDVILYHQPDDKKKNRGFCFLEYEDHKSAAQARRRLMSGKVKVWGNVVTVEWADPVEEPDPEVMAKVKVLFVRNLATTVTEEILEKSFSEFGKLERVKKLKDYAFVHFEDRGAAVKAMDEMNGKEIEGEEIEIVLAKPPDKKRKERQAARQASRSTAYEDYYYHPPPRMPPPIRGRGRGGGRGGYGYPPDYYGYEDYYDDYYGYDYHDYRGGYEDPYYGYDDGYAVRGRGGGRGGRGAPPPPRGRGAPPPRGRAGYSQRGAPLGPPRGSRGGRGGPAQQQRGRGSRGSRGNRGGNVGGKRKADGYNQPDSKRRQTNNQQNWGSQPIAQQPLQQGGDYSGNYGYNNDNQEFYQDTYGQQWK

SEQ ID NO: 47012 - protein, 618 aa, Homo sapiens
MDTSSVTHTEHYKTLIEAGLPQKVAERLDEIFQTGLVAYVDLDERAIDALREFNEEGALSVLQQFKESDLSHVQNKSAFLCGVMKTYRQREKQGSKVQESTKGPDEAKIKALLERTGYTLDVTTGQRKYGGPPPDSVYSGVQPGIGTEVFVGKIPRDLYEDELVPLFEKAGPIWDLRLMMDPLSGQNRGYAFITFCGKEAAQEAVKLCDSYEIRPGKHLGVCISVANNRLFVGSIPKNKTKENILEEFSKVTGLTEGLVDVILYHQPDDKKKNRGFCFLEYEDHKSAAQARRRLMSGKVKVWGNVVTVEWADPVEEPDPEVMAKVKVLFVRNLATTVTEEILEKSFSEFGKLERVKKLKDYAFVHFEDRGAAVKAMDEMNGKEIEGEEIEIVLAKPPDKKRKERQAARQASRSTAYEDYYYHPPPRMPPPIRGRGRGGGRGGYGYPPDYYGYEDYYDDYYGYDYHDYRGGYEDPYYGYDDGYAVRGRGGGRGGRGAPPPPRGRGAPPPRGRAGYSQRGAPLGPPRGSRGGRGGPAQQQRGRGSRGSRGNRGGNVGGKRKADGYNQPDSKRRQTNNQQNWGSQPIAQQPLQQGGDYSGNYGYNNDNQEFYQDTYGQQWK

SEQ ID NO: 47013 - protein, 577 aa, Homo sapiens
MDTSSVTHTEHYKTLIEAGLPQKVAERLDEIFQTGLVAYVDLDERAIDALREFNEEGALSVLQQFKESDLSHVQNKSAFLCGVMKTYRQREKQGSKVQESTKGPDEAKIKVFVGKIPRDLYEDELVPLFEKAGPIWDLRLMMDPLSGQNRGYAFITFCGKEAAQEAVKLCDSYEIRPGKHLGVCISVANNRLFVGSIPKNKTKENILEEFSKVTEGLVDVILYHQPDDKKKNRGFCFLEYEDHKSAAQARRRLMSGKVKVWGNVVTVEWADPVEEPDPEVMAKVKVLFVRNLATTVTEEILEKSFSEFGKLERVKKLKDYAFVHFEDRGAAVKAMDEMNGKEIEGEEIEIVLAKPPDKKRKERQAARQASRSTAYEDYYYHPPPRMPPPIRGRGRGGGRGGYGYPPDYYGYEDYYDDYYGYDYHDYRGGYEDPYYGYDDGYAVRGRGGGRGGRGAPPPPRGRGAPPPRGRAGYSQRGAPLGPPRGSRGGRGGPAQQQRGRGSRGSRGNRGGNVGGKRKADGYNQPDSKRRQTNNQQNWGSQPIAQQPLQQGGDYSGNYGYNNDNQEFYQDTYGQQWK

SEQ ID NO: 47014 - protein, 107 aa, Homo sapiens
MRLYKNIPQMSFDDTEREPDQTFSLNRDLTGELEYATKISRFSNVYHLSIHISKNFGADTTKVFYIGLRGEWTELRRHEVTICNYEASANPADHRVHQVTPQTHFIS

SEQ ID NO: 47015 - protein, 230 aa, Homo sapiens
MKAHGVKNLVFSSSATVYGNPQYLPLDEAHPTGGCTNPYGKSKFFIEEMIRDLCQADKTWNAVLLRYFNPTGAHASGCIGEDPQGIPNNLMPYVSQVAIGRREALNVFGNDYDTEDGTGVRDYIHVVDLAKGHIAALRKLKEQCGCRIYNLGTGTGYSVLQMVQAMEKASGKKIPYKVVARREGDVAACYANPSLAQEELGWTAALGLDRMCEDLWRWQKQNPSGFGTQA

SEQ ID NO: 47016 - protein, 242 aa, Homo sapiens
MKAHGVKNLVFSSSATVYGNPQYLPLDEAHPTGGCTNPYGKSKFFIEEMIRDLCQADKTWNAVLLRYFNPTGAHASGCIGEDPQGIPNNLMPYVSQVAIGRREALNVFGNDYDTEDGTGVRDYIHVVDLAKGHIAALRKLKEQCGCRVGREGRSEGGEGPDPGRAAQRRGQSSPLHKPCSPWARSTTWARAQAIQCCRWSRLWRRPLGRRSRTRWWHGGKVMWQPVTPTPAWPKRSWGGQQP

SEQ ID NO: 47017 - protein, 865 aa, Homo sapiens
MSKVNLEVIKPWITKRVTEILGFEDDVVIEFIFNQLEVKNPDSKMMQINLTGFLNGKNAREFMGELWPLLLSAQENIAGIPSAFLELKKEEIKQRQIEQEKLASMKKQDEDKDKRDKEEKESSREKRERSRSPRRRKSRSPSPRRRSSPVRRERKRSHSRSPRHRTKSRSPSPAPEKKEKTPELPEPSVKVKEPSVQEATSTSDILKVPKPEPIPEPKEPSPEKNSKKEKEKEKTRPRSRSRSKSRSRTRSRSPSHTRPRRRHRSRSRSYSPRRRPSPRRRPSPRRRTPPRRMPPPPRHRRSRSPVRRRRRSSASLSGSSSSSSSSRSRSPPKKPPKRTSSPPRKTRRLSPSASPPRRRHRPSPPATPPPKTRHSPTPQQSNRTRKSRVSVSPGRTSGKVTKHKGTEKRESPSPAPKPRKVELSESEEDKGGKMAAADSVQQRRQYRRQNQQSSSDSGSSSSSEDERPKRSHVKNGEVGRRRRHSPSRSASPSPRKRQKETSPRGRRRRSPSPPPTRRRRSPSPAPPPRRRRTPTPPPRRRTPSPPPRRRSPSPRRYSPPIQRRYSPSPPPKRRTASPPPPPKRRASPSPPPKRRVSHSPPPKQRSSPVTKRRSPSLSSKHRKGSSPSRSTREARSPQPNKRHSPSPRPRAPQTSSSPPPVRRGASSSPQRRQSPSPSTRPIRRVSRTPEPKKIKKAASPSPQSVRRVSSSRSVSGSPEPAAKKPPAPPSPVQSQSPSTNWSPAVPVKKAKSPTPSPSPPRNSDQEGGGKKKKKKKDKKHKKDKKHKKHKKHKKEKAVAAAAAAAVTPAAIAAATTTLAQEEPVAAPEPKKETESEAEDNLDDLEKHLREKALRSMRKAQVSPQS

SEQ ID NO: 47018 - protein, 874 aa, Homo sapiens
MSKVNLEVIKPWITKRVTEILGFEDDVVIEFIFNQLEVKNPDSKMMQINLTGFLNGKNAREFMGELWPLLLSAQENIAGIPSAFLELKKEEIKQRQIEQEKLASMKKQDEDKDKRDKEEKESSREKRERSRSPRRRKSRSPSPRRRSSPVRRERKRSHSRSPRHRTKSRSPSPAPEKKEKTPELPEPSVKVKEPSVQEATSTSDILKVPKPEPIPEPKEPSPEKNSKKEKEKEKTRPRSRSRSKSRSRTRSRSPSHTRPRRRHRSRSRRRPSPRRRPSPRRRTPPRRMPPPPRHRRSRSPVRRRRRSSASLSGSSSSSSSSRSRSPPKKPPKRTSSPPRKTRRLSPSASPPRRRHRPSPPATPPPKTRHSPTPQQSNRTRKSRVSVSPGRTSGKVTKHKGTEKRESPSPAPKPRKVELSESEEDKGGKMAAADSVQQRRQYRRQNQQSSSDSGSSSSSEDERPKRSHVKNGEVGRRRRHSPSRSASPSPRKRQKETSPRMQMGKRWQSPVTKSGRRRRSPSPPPTRRRRSPSPAPPPRRRRTPTPPPRRRTPSPPPRRRSPSPRRYSPPIQRRYSPSPPPKRRTASPPPPPKRRASPSPPPKRRVSHSPPPKQRSSPVTKRRSPSLSSKHRKGSSPSRSTREARSPQPNKRHSPSPRPRAPQTSSSPPPVRRGASSSPQRRQSPSPSTRPIRRVSRTPEPKKIKKAASPSPQSVRRVSSSRSVSGSPEPAAKKPPAPPSPVQSQSPSTNWSPAVPVKKAKSPTPSPSPPRNSDQEGGGKKKKKKKDKKHKKDKKHKKHKKHKKEKAVAAAAAAAVTPAAIAAATTTLAQEEPVAAPEPKKETESEAEDNLDDLEKHLREKALRSMRKAQVSPQS

SEQ ID NO: 47019 - protein, 211 aa, Homo sapiens
MILWLKGVVFSVTTVDLKRKPADLQNLAPGTHPPFITFNSEVKTDVNKIEEFLEEVLCPPKYLKLSPKHPESNTAGMDIFAKFSAYIKNSRPEANEALERGLLKTLQKLDEYLNSPLPDEIDENSMEDIKFSTRKFLDGNEMTLADCNLLPKLHIVKVVAKKYRNFDIPKEMTGIWRYLTNAYSRDEFTNTCPSDKEVEIAYSDVAKRLTK

SEQ ID NO: 47020 - protein, 283 aa, Homo sapiens [sequence omitted]

SEQ ID NO: 47021 - protein, 109 aa, Homo sapiens [sequence omitted]

SEQ ID NO: 47022 - protein, 78 aa, Homo sapiens
MKDFNHSYHACGVIATIAFLMINAVSNGQVRGDSYSEGCLGQTEKDIVYPGIAVFFQNAFIFFGGLVFKFGRTEDLWQ

SEQ ID NO: 47023 - protein, 240 aa, Homo sapiens
MGQLRQENELLQNKLHNAVQMKQKDKQNISQLEKKLKAEQEARSFVEKQLMEEKKRKKLEEATAARAVAFAAASRGECTETLRNRIRELEAEGKKLTMDMKVKEDQIRELELKVQELRKYKENEKDTEVLMSALSAMQDKTQHLENSLSAETRIKLDLFSALGDAKRQLEIAQGQILQKDQEIKDLKQKIAEVMAVMPSITYSAATSPLSPVSPHYSSKFVETSPSGLDPNASVYQPLKK

SEQ ID NO: 47024 - protein, 343 aa, Homo sapiens [sequence omitted]

SEQ ID NO: 47025 - protein, 277 aa, Homo sapiens
MEATVTIPIWQNKPHGAARSVVRRIGTNLPLKPCARASFETLPNISDLCLRDVPPVPTLADIAWIAADEEETYARVRSDTRPLRHTWKPSPLIVMQRNASVPNLRGSEERLLALKKPALPALSRTTELQDELSHLRSQIAKIVAADAGSSNVSSPLPCFGSSFHSTTSFVISDITEETEVEVPELPSVPLLCSASPECCKPEHKAACSSSEEDDCVSLSKASSFADMMGILKDFHRMKQSQDLNRSLLKEEDPAVLISEVLRRKFALKEEDISRKGN

SEQ ID NO: 47026 - protein, 202 aa, Homo sapiens
MEATVTIPIWQNKPHGAARSVVRRIGTNLPLKPCARASFETLPNISDLCLRDVPPVPTLADIAWIAADEEETYARVRSDTRPLRHTWKPSPLIVMQRNASVPNLRGSEERLLALKKPALPALSRTTELQDELSHLRSQIAKIVAADAVTSPRRQRWRSLSFHQSPCFVLPALNVANQNTKLPAVRLKRMTASLCPRPAALQT

SEQ ID NO: 47027 - protein, 271 aa, Homo sapiens
MELASRGFVVAVPEHRDRSAATTYFCKQAPEENQPTNESLQEEWIPFRRVEEGEKEFHVRNPQVHQRVSECLRVLKILQEVTAGQTVFNILPGGLDLMTLKGNIDMSRVAVMGHSFGGATAILALAKETQFRCAVALDAWMFPLERDFYPKARGPVFFINTEKFQTMESVNLMKKICAQHEQSRIITVLGSVHRSQTDFAFVTGNLIGKFFSTETRGSLDPYEGQEVMVRAMLAFLQKHLDLKEDYNQWNNLIEGIGPSLTPGAPHHLSSL

SEQ ID NO: 47028 - protein, 624 aa, Homo sapiens
MKHSPGLSRDLMYFSGATGENGIEQSWFPAVGHERQEEARKFDIPSMESTLNQSAMMETLYSDPHHRVRFHNPRTSTSKELYRVLPEAKKAPGSGAVFERNGPHSNSSGVLPLGLQPAPGLSKPLPSQVWQPSPDTWHPREQSCELSTCRQQLELIRLQMEQMQLQNGAICHHPAAFGPSLPILEPAQWISILNSNEHLLKEKELLIDKQRKHISQLEQKVRESELQVHSALLGRPAPFGDVCLLRLQELQRENTFLRAQFAQKTEALSREKIDLEKKLSASEVEVQLIRESLKVALQKHSEEVKKQEERVKGRDKHINNLKKKCQKESEQNREKQQRIETLERYLADLPTLEDHQKQSQQLKDSELKSTELQEKVTELESLLEETQAICREKEIQLESLRQREAEFSSAGHSLQDKQSVEETSGEGPEVEMESWQKRYDSLQKIVEKQQQKMDQLRSQVQSLEQEVAQEEGTSQALREEAQRRDSALQQLRTAVKELSVQNQDLIEKNLTLQEHLRQAQPGSPPSPDTAQLALELHQELASCLQDLQAVCSIVTQRAQGHDPNLSLLLGIHSQHPETQLDLQKPDVIKRKLEEVQQLRRDIEDLRTTMSDRYAQDMGENCVTQ

SEQ ID NO: 47029 - protein, 310 aa, Homo sapiens
MPKHIAFIMDGNRRYAKKCQVERQEGHSQGFNKLAETLRWCLNLGILEVTVYAFSIENFKRSKSEVDGLMDLARQKFSRLMEEKEKLQKHGVCIRVLGDLHLLPLDLQELIAQAVQATKNYNKCFLNVCFAYTSRHEISNAVREMAWGVEQGLLDPSDISESLLDKCLYTNRSPHPDILIRTSGEVRLSDFLLWQTSHSCLVFQPVLWPEYTFWNLFEAILQFQMNHSVLQQKARDMYAEERKRQQLERDQATVTEQLLREGLQASGDAQLRRTRLHKLSARREERVQGFLQALELKRADWLARLGTASA

SEQ ID NO: 47030 - skipped

SEQ ID NO: 47031 - protein, 233 aa, Homo sapiens [sequence omitted]

SEQ ID NO: 47032 - protein, 175 aa, Homo sapiens
MDFEQLQPGDSVIQNASNSGVGQAVIQIAAALGLRTINVVRDRPDIQKLSDRLKSLGAEHVITEEELRRPEMKNFFKIRKLRLRKEEMLNQNHIVYKGSRESELASVSPNSKPLNLPEPPPHNMPRHAPATACSQLCWWEKLHRAAAAVSAWRNHGNLWGDGQAARRSLCEPAHF

SEQ ID NO: 47033 - protein, 1107 aa, Homo sapiens
MVDYFFQRQHGEQLGGGGSGGGGYNNSKHRWPTGDNIHAEHQVRSMDELNHDFQALALEGRAMGEQLLPGKKFWETDESSKDGPKGIFLGDQWRDSAWGTSDHSVSQPIMVQRRPGQSFHVNSEVNSVLSPRSESGGLGVSMVEYVLSSSPGDSCLRKGGFGPRDADSDENDKGEKKNKGTFDGDKLGDLKEEGDVMDKTNGLPVQNGIDADVKDFSRTPGNCQNSANEVDLLGPNQNGSEGLAQLTSTNGAKPVEDFSNMESQSVPLDPMEHVGMEPLQFDYSGTQVPVDSAAATVGLFDYNSQQQLFQRPNALAVQQLTAAQQQQYALAAAHQPHIGLAPAAFVPNPYIISAAPPGTDPYTAGLAAAATLGPAVVPHQYYGVTPWGVYPASLFQQQAAAAAAATNSANQQTTPQAQQGQQQVLRGGASQRPLTPNQNQQGQQTDPLVAAAAVNSALAFGQGLAAGMPGYPVLAPAAYYDQTGALVVNAGARNGLGAPVRLVAPAPVIISSSAAQAAVAAAAASANGAAGGLAGTTNGPFRPLGTQQPQPQPQQQPNNNLASSSFYGNNSLNSNSQSSSLFSQGSAQPANTSLGFGSSSSLGATLGSALGGFGTAVANSNTGSGSRRDSLTGSSDLYKRTSSSLTPIGHSFYNGLSFSSSPGPVGMPLPSQGPGHSQTPPPSLSSHGSSSSLNLGGLTNGSGRYISAAPGAEAKYRSASSASSLFSPSSTLFSSSRLRYGMSDVMPSGRSRLLEDFRNNRYPNLQLREIAGHIMEFSQDQHGSRFIQLKLERATPAERQLVFNEILQAAYQLMVDVFGNYVIQKFFEFGSLEQKLALAERIRGHVLSLALQMYGCRVIQKALEFIPSDQQNEMVRELDGHVLKCVKDQNGNHVVQKCIECVQPQSLQFIIDAFKGQVFALSTHPYGCRVIQRILEHCLPDQTLPILEELHQHTEQLVQDQYGNYVIQHVLEHGRPEDKSKIVAEIRGNVLVLSQHKFASNVVEKCVTHASRTERAVLIDEVCTMNDGPHSALYTMMKDQYANYVVQKMIDVAEPGQRKIVMHKIRPHIATLRKYTYGKHILAKLEKYYMKNGVDLGPICGPPNGII

SEQ ID NO: 47034 - protein, 1110 aa, Homo sapiens
MVDYFFQRQHGEQLGGGGSGGGGYNNSKHRWPTGDNIHAEHQVRSMDELNHDFQALALEGRAMGEQLLPGKKFWETDESSKDGPKGIFLGDQWRDSAWGTSDHSVSQPIMVQRRPGQSFHVNSEVNSVLSPRSESGGLGVSMVEYVLSSSPGDSCLRKGGFGPRDADSDENDKGEKKNKGTFDGDKLGDLKEEGDVMDKTNGLPVQNGIDADVKDFSRTPGNCQNSANEVDLLGPNQNGSEGLAQLTSTNGAKPVEDFSNMESQSVPLDPMEHVGMEPLQFDYSGTQVPVDSAAATVGLFDYNSQQQLFQRPNALAVQQLTAAQQQQYALAAAHQPHIAGLAPAAFVPNPYIISAAPPGTDPYTAGLAAAATLGPAVVPHQYYGVTPWGVYPASLFQQQAAAAAAATNSANQQTTPQAQQGQQQVLRGGASQRPLTPNQNQQGQQTDPLVAAAAVNSALAFGQGLAAGMPGYPVLAPAAYYDQTGALVVNAGARNGLGAPVRLVAPAPVIISSSAAQAAVAAAAASANGAAGGLAGTTNGPFRPLGTQQPQPQPQQQPNNNLASSSFYGNNSLNSNSQSSSLFSQGSAQPANTSLGFGSSSSLGATLGSALGGFGTAVANSNTGSGSRRDSLTGSSDLYKRTSSSLTPIGHSFYNGLSFSSSPGPVGMPLPSQGPGHSQTPPPSLSSHGSSSSLNLGGLTNGSGRYISAAPGAEAKYRSASSASSLFSPSSTLFSSSRLRYGMSDVMPSGRSRLLEDFRNNRYPNLQLREIAGHIMEFSQDQHGSRFIQLKLERATPAERQLVFNEILQAAYQLMVDVFGNYVIQKFFEFGSLEQKLALAERIRGHVLSLALQMYGCRVIQKALEFIPSDQQVINEMVRELDGHVLKCVKDQNGNHVVQKCIECVQPQSLQFIIDAFKGQVFALSTHPYGCRVIQRILEHCLPDQTLPILEELHQHTEQLVQDQYGNYVIQHVLEHGRPEDKSKIVAEIRGNVLVLSQHKFASNVVEKCVTHASRTERAVLIDEVCTMNDGPHSALYTMMKDQYANYVVQKMIDVAEPGQRKIVMHKIRPHIATLRKYTYGKHILAKLEKYYMKNGVDLGPICGPPNGII

SEQ ID NO: 47035 - protein, 1109 aa, Homo sapiens
MVDYFFQRQHGEQLGGGGSGGGGYNNSKHRWPTGDNIHAEHQVRSMDELNHDFQALALEGRAMGEQLLPGKKFWETDESSKDGPKGIFLGDQWRDSAWGTSDHSVSQPIMVQRRPGQSFHVNSEVNSVLSPRSESGGLGVSMVEYVLSSSPGDSCLRKGGFGPRDADSDENDKGEKKNKGTFDGDKLGDLKEEGDVMDKTNGLPVQNGIDADVKDFSRTPGNCQNSANEVDLLGPNQNGSEGLAQLTSTNGAKPVEDFSNMESQSVPLDPMEHVGMEPLQFDYSGTQVPVDSAAATVGLFDYNSQQQLFQRPNALAVQQLTAAQQQQYALAAAHQPHIGLAPAAFVPNPYIISAAPPGTDPYTAGLAAAATLGPAVVPHQYYGVTPWGVYPASLFQQQAAAAAAATNSANQQTTPQAQQGQQQVLRGGASQRPLTPNQNQQGQQTDPLVAAAAVNSALAFGQGLAAGMPGYPVLAPAAYYDQTGALVVNAGARNGLGAPVRLVAPAPVIISSSAAQAAVAAAAASANGAAGGLAGTTNGPFRPLGTQQPQPQPQQQPNNNLASSSFYGNNSLNSNSQSSSLFSQGSAQPANTSLGFGSSSSLGATLGSALGGFGTAVANSNTGSGSRRDSLTGSSDLYKRTSSSLTPIGHSFYNGLSFSSSPGPVGMPLPSQGPGHSQTPPPSLSSHGSSSSLNLGGLTNGSGRYISAAPGAEAKYRSASSASSLFSPSSTLFSSSRLRYGMSDVMPSGRSRLLEDFRNNRYPNLQLREIAGHIMEFSQDQHGSRFIQLKLERATPAERQLVFNEILQAAYQLMVDVFGNYVIQKFFEFGSLEQKLALAERIRGHVLSLALQMYGCRVIQKALEFIPSDQQVINEMVRELDGHVLKCVKDQNGNHVVQKCIECVQPQSLQFIIDAFKGQVFALSTHPYGCRVIQRILEHCLPDQTLPILEELHQHTEQLVQDQYGNYVIQHVLEHGRPEDKSKIVAEIRGNVLVLSQHKFASNVVEKCVTHASRTERAVLIDEVCTMNDGPHSALYTMMKDQYANYVVQKMIDVAEPGQRKIVMHKIRPHIATLRKYTYGKHILAKLEKYYMKNGVDLGPICGPPNGII

SEQ ID NO: 47036 - protein, 1083 aa, Homo sapiens
MVDYFFQRQHGEQLGGGGSGGGGYNNSKHRWPTGDNIHAEHQVRSMDELNHDFQALALEGRAMGEQLLPGKKFWETDESSKDGPKGIFLGDQWRDSAWGTSDHSVSQPIMVQRRPGQSFHVNSEVNSVLSPRSESGGLGVSMVEYVLSSSPGDSCLRKGGFGPRDADSDENDKGEKKNKGTFDGDKLGDLKEEGDVMDKTNGLPVQNGIDADVKDFSRTPGNCQNSANEVDLLGPNQNGSEGLAQLTSTNGAKPVEDFSNMESQSVPLDPMEHVGMEPLQFDYSGTQVPVDSAAATVGLFDYNSQQQLFQRPNALAVQQLTAAQQQQYALAAAHQPHIAGLAPAAFVPNPYIISAAPPGTDPYTAGLAAAATLGPAVVPHQYYGVTPWGVYPASLFQQQAAAAAAATNSANQQTTPQAQQGQQQVLRGGASQRPLTPNQNQQGQQTDPLVAAAAVNSALAFGQGLAAGMPGYPVLAPAAYYDQTGALVVNAGARNGLGAPVRLVAPAPVIISSSAAQAGTQQPQPQPQQQPNNNLASSSFYGNNSLNSNSQSSSLFSQGSAQPANTSLGFGSSSSLGATLGSALGGFGTAVANSNTGSGSRRDSLTGSSDLYKRTSSSLTPIGHSFYNGLSFSSSPGPVGMPLPSQGPGHSQTPPPSLSSHGSSSSLNLGGLTNGSGRYISAAPGAEAKYRSASSASSLFSPSSTLFSSSRLRYGMSDVMPSGRSRLLEDFRNNRYPNLQLREIAGHIMEFSQDQHGSRFIQLKLERATPAERQLVFNEILQAAYQLMVDVFGNYVIQKFFEFGSLEQKLALAERIRGHVLSLALQMYGCRVIQKALEFIPSDQQVINEMVRELDGHVLKCVKDQNGNHVVQKCIECVQPQSLQFIIDAFKGQVFALSTHPYGCRVIQRILEHCLPDQTLPILEELHQHTEQLVQDQYGNYVIQHVLEHGRPEDKSKIVAEIRGNVLVLSQHKFASNVVEKCVTHASRTERAVLIDEVCTMNDGPHSALYTMMKDQYANYVVQKMIDVAEPGQRKIVMHKIRPHIATLRKYTYGKHILAKLEKYYMKNGVDLGPICGPPNGII

SEQ ID NO: 47037 - protein, 1545 aa, Homo sapiens
MKTSAIKKIRNPKGPLILRLGAAPVTQPTRRVFPRGLPEEFALVLTLLLKKHTHQKTWYLFQVTDANGYPQISLEVNSQERSLELRAQGQDGDFVSCIFPVPQLFDLRWHKLMLSVAGRVASVHVDCSSASSQPLGPRRPMRPVGHVFLGLDAEQGKPVSFDLQQVHIYCDPELVLEEGCCEILPAGCPPETSKARRDTQSNELIEINPQSEGKVYTRCFCLEEPQNSEVDAQLTGRISQKAERGAKVHQETAADECPPCVHGARDSNVTLAPSGPKGGKGERGLPGPPGSKGEKGARGNDCVRISPDAPLQCAEGPKGEKGESGALGPSGLPGSTGEKGQKGEKGDGGIKGVPGKPGRDGRPGEICVIGPKGQKGDPGFVGPEGLAGEPGPPGLPGPPGIGLPGTPGDPGGPPGPKGDKGSSGIPGKEGPGGKPGKPGVKGEKGDPCEVCPTLPEGFQNFVGLPGKPGPKGEPGDPVPARGDPGIQGIKGEKGEPCLSCSSVVGAQHLVSSTGASGDVGSPGFGLPGLPGRAGVPGLKGEKGNFGEAGPAGSPGPPGPVGPAGIKGAKGEPCEPCPALSNLQDGDVRVVALPGPSGEKGEPGPPGFGLPGKQGKAGERGLKGQKGDAGNPGDPGTPGTTGRPGLSGEPGVQGPAGPKGEKGDGCTACPSLQGTVTDMAGRPGQPGPKGEQGPEGVGRPGKPGQPGLPGVQGPPGLKGVQGEPGPPGRGVQGPQGEPGAPGLPGIQGLPGPRGPPGPTGEKGAQGSPGVKGATGPVGPPGASVSGPPGRDGQQGQTGLRGTPGEKGPRGEKGEPGECSCPSQGDLIFSGMPGAPGLWMGSSWQPGPQGPPGIPGPPGPPGVPGLQGVPGNNGLPGQPGLTAELGSLPIEQHLLKSICGDCVQGQRAHPGYLVEKGEKGDQGIPGVPGLDNCAQCFLSLERPRAEEARGDNSEGDPGCVGSPGLPGPPGLPGQRGEEGPPGMRGSPGPPGPIGPPGFPGAVGSPGLPGLQGERGLTGLTGDKGEPGPPGQPGYPGATGPPGLPGIKGERGYTGSAGEKGEPGPPGSEGLPGPPGPAGPRGERGPQGNSGEKGDQGFQGQPGFPGPPGPPGFPGKVGSPGPPGPQAEKGSEGIRGPSGLPGSPGPPGPPGIQGPAGLDGLDGKDGKPGLRGDPGPAGPPGLMGPPGFKGKTGHPGLPGPKGDCGKPGPPGSTGRPGAEGEPGAMGPQGRPGPPGHVGPPGPPGQPGPAGISAVGLKGDRGATGERGLAGLPGQPGPPGHPGPPGEPGTDGAAGKEGPPGKQGFYGPPGPKGDPGAAGQKGQAGEKGRAGMPGGPGKSGSMGPVGPPGPAGERGHPGAPGPSGSPGLPGVPGSMGDMVNYDEIKRFIRQEIIKMFDERMAYYTSRMQFPMEMAAAPGRPGPPGKDGAPGRPGAPGSPGLPGQIGREGRQGLPGVRGLPGTKGEKGDIGIGIAGENGLPGPPGPQGPPGYGKMGATGPMGQQGIPGIPGPPGPMGQPGKAGHCNPSDCFGAMPMEQQYPPMKTMKGPFG

SEQ ID NO: 47038 - protein, 907 aa, Homo sapiens
MKTSAIKKIRNPKGPLILRLGAAPVTQPTRRVFPRGLPEEFALVLTLLLKKHTHQKTWYLFQVTDANGYPQISLEVNSQERSLELRAQGQDGDFVSCIFPVPQLFDLRWHKLMLSVAGRVASVHVDCSSASSQPLGPRRPMRPVGHVFLGLDAEQGKPVSFDLQQVHIYCDPELVLEEGCCEILPAGCPPETSKARRDTQSNELIEINPQSEGKVYTRCFCLEEPQNSEVDAQLTGRISQKAERGAKVHQETAADECPPCVHGARDSNVTLAPSGPKGGKGERGLPGPPGSKGEKGARGNDCVRISPDAPLQCAEGPKGEKGESGALGPSGLPGSTGEKGQKGEKGDGGIKGVPGKPGRDGRPGEICVIGPKGQKGDPGFVGPEGLAGEPGPPGLPGPPGIGLPGTPGDPGGPPGPKGDKGSSGIPGKEGPGGKPGKPGVKGEKGDPCEVCPTLPEGFQNFVGLPGKPGPKGEPGDPVPARGDPGIQGIKGEKGEPCLSCSSVVGAQHLVSSTGASGDVGSPGFGLPGLPGRAGVPGLKGEKGNFGEAGPAGSPGPPGPVGPAGIKGAKGEPCEPCPALSNLQDGDVRVVALPGPSGEKGEPGPPGFGLPGKQGKAGERGLKGQKGDAGNPGDPGTPGTTGRPGLSGEPGVQGPAGPKGEKGDGCTACPSLQGTVTDMAGRPGQPGPKGEQGPEGVGRPGKPGQPGLPGVQGPPGLKGVQGEPGPPGRGVQGPQGEPGAPGLPGIQGLPGPRGPPGPTGEKGAQGSPGVKGATGPVGPPGASVSGPPGRDGQQGQTGLRGTPGEKGPRGEKGEPGECSCPSQGDLIFSGMPGPPGIPGPPGPPGVPGLQVKGEKRMRSLGGRAHGSGWLLPAGPQGCCSPTPKTQTCHFSLLCLPASQGGKEGPLSL

SEQ ID NO: 47039 - protein, 371 aa, Homo sapiens
MQTLNTLSTPEEKLAALCKKYAELLEEHRNSQKQMKLLQKKQSQLVQEKDHLRGEHSKAVLARSKLESLCRELQRHNRSLKEEGVQRAREEEEKRKEVTSHFQVTLNDIQLQMEQHNERNSKLRQENMELAERLKKLIEQYELREEHIDKVFKHKDLQQQLVDAKLQQAQEMLKEAEERHQREKDFLLKEAVESQRMCELMKQQETHLKQQLALYTEKFEEFQNTLSKSSEVFTTFKQEMEKMTKKIKKLEKETTMYRSRWESSNKALLEMAEEKTVRDKELEGLQVKIQRLEKLCRALQTERNDLNKRVQDLSAGGQGSLTDSGPERRPEGPGAQAPSSPRVTEAPCYPGAPSTEASGQTGPQEPTSARA

SEQ ID NO: 47040 - protein, 453 aa, Homo sapiens [sequence omitted]

SEQ ID NO: 47041 - protein, 399 aa, Homo sapiens
MKRDLTEFTQVVQHDTACTIAATASVVKEKLATEGSSGATEKMKKGLSDFLGVISDTFAPSPDKTIDCDVITLMGTPSGTAEPYDGTKARLYSLQSDPATYCNEPDGPPELFDAWLSQFCLEEKKGEISELLVGSPSIRALYTKMVPAAVSHSEFWHRYFYKVHQLEQEQARRDALKQRAEQSISEEPGWEEEEEELMGISPISPKEAKVPVAKISTFPEGEPGPQSPCEENLVTSVEPPAEVTPSESSESISLVTQIANPATAPEARVLPKDLSQKLLEASLEEQGLAVDVGETGPSPPIHSKPLTPAGHTGGPEPRPPARVETLREEAPTDLRVFELNSDSGKSTPSNNGKKGSSTDISEDWEKDFDLDMTEEEVQMALSKVDASGELEDVEWEDWE

SEQ ID NO: 47042 - protein, 225 aa, Homo sapiens
MGDAPSPEEKLHLITRNLQEVLGEEKLKEILKERELKIYWGTATTGKPHVAYFVPMSKIADFLKAGCEVTILFADLHAYLDNMKAPWELLELRVSYYENVIKAMLESIGVPLEKLKFIKGTDYQLSKEYTLDVYRLSSVVTQHDSKKAGAEVVKQVEHPLLSGLLYPGLQALDEEYLKVDAQFGGIDQRKIFTFAEKMRTLRIEDKKLSNITHTSLHLAIQNGSI

SEQ ID NO: 47043 - protein, 205 aa, Homo sapiens
MKTGLVLVVLGHVSFITAALFHGTVLRYVGTPQDAVALQYCVVNILSVTSAIVVITSGIAAIVLSRYLPSTPLRWTVFSSSVACALLSLTCALGLLASIAMTFATQGKALLAACTFGSSELLALAPDCPFDPTRIYSSSLCLWGIALVLCVAENVFAVRCAQLTHQLLELRPWWGKSSHHMMRENPELVEGRDLLSCTSSEPLTL

SEQ ID NO: 47044 - protein, 394 aa, Homo sapiens
MSIHCDLHLPGSSDSRASASRVAGITGIWKLFFRKKPISLELENSFASDTKMKEPLLGGECDKAVASQLGLLDEIKTEPDNAQEYCHRQQSRTQENELKINAVFSESASQLTAGIQLSLASSGVNKMLPSVSTTAIQVSCAGCKKILQKGQTAYQRKGSAQLFCSIPCITEYISSASSPVPSKRTCSNCSKDILNPKDVISVQLEDTTSCKTFCSLSCLSSYEEKRKPFVTICTNSILTKCSMCQKTAIIQYEVKYQNVKHNLCSNACLSKFHSANNFIMNCCENCGTYCYTSSSLSHILQMEGQSHYFNSSKSITAYKQKPAKPLISVPCKPLKPSDEMIETTSDLGKTELFCSINCFSAYSKAKMESSSVLFLWCMILQQSFFLQRKIRLQL

SEQ ID NO: 47045 - protein, 1067 aa, Homo sapiens
MLPSVSTTAIQVSCAGCKKILQKGQTAYQRKGSAQLFCSIPCITEYISSASSPVPSKRTCSNCSKDILNPKDVISVQLEDTTSCKTFCSLSCLSSYEEKRKPFVTICTNSILTKCSMCQKTAIIQYEVKYQNVKHNLCSNACLSKFHSANNFIMNCCENCGTYCYTSSSLSHILQMEGQSHYFNSSKSITAYKQKPAKPLISVPCKPLKPSDEMIETTSDLGKTELFCSINCFSAYSKAKMESSSVSVVSVVHDTSTELLSPKKDTTPVISNIVSLADTDVALPIMNTDVLQDTVSSVTATADVIVDLSKSSPSEPSNAVASSSTEQPSVSPSSSVFSQHAIGSSTEVQKDNMKSMKISDELCHPKCTSKVQKVKGKSRSIKKSCCADFECLENSKKDVAFCYSCQLFCQKYFSCGRESFATHGTSNWKKTLEKFRKHEKSEMHLKSLEFWREYQFCDGAVSDDLSIHSKQIEGNKKYLKLIIENILFLGKQCLPLRGNDQSVSSVNKGNFLELLEMRAKDKGEETFRLMNSQVDFYNSTQIQSDIIEIIKTEMLQDIVNEINDSSAFSIICDETINSAMKEQLSICVRYPQKSSKAILIKERFLGFVDTEEMTGTHLHRTIKTYLQQIGVDMDKIHGQAYDSTTNLKIKFNKIAAEFKKEEPRALYIHCYAHFLDLSIIRFCKEVKELRSALKTLSSLFNTICMSGEMLANFRNIYRLSQNKTCKKHISQSCWTVHDRTLLSVIDSLPEIIETLEVIASHSSNTSFADELSHLLTLVSKFEFVFCLKFLYRVLSVTGILSKELQNKTIDIFSLSSKIEAILECLSSERNDVYFKTIWDGTEEICQKITCKGFKVEKPSLQKRRKIQKSVDLGNSDNMFFPTSTEEQYKINIYYQGLDTILQNLKLCFSEFDYCKIKQISELLFKWNEPLNETTAKHVQEFYKLDEDIIPELRFYRHYAKLNFVIDDSCINFVSLGCLFIQHGLHSNIPCLSKLLYIALSWPITSASTENSFSTLPRLKTYLCNTMGQEKLTGPALMAVEQELVNKLMEPERLNEIVEKFISQMKEI

SEQ ID NO: 47046 - protein, 1516 aa, Homo sapiens
MDTEMSEDIDHNLTPTLDSMSYGMPNQTGSENSLLDEDDYFLNSGDLAGIPVVGSDNEDEQDFSSKDNLVSSIHTDDSLEVERRVTQHESDNENEIQIQNKLKKDFPKQFDQVSVFKSIRKDFSLVRENSKETFSGKEKNRDLTYEREKRLDKPHKDLDSRLKSSFFDKAANQVEETLHTHLPQTPETNFRDSSYPFANKESIGSELGNSFASNIRIKEEPLDDEYDKAMAPQQGLLDKIKDEPDNAQEYSHGQQQKTQEGELKISAVFSVSGSPLAPQLTTGFQPSLASSGMNKMLPSVPATAVRVSCSGCKKILQKGQTAYQRKGSTQLFCSTLCLTGYTVPPARPPPPLTKKTCSSCSKDILNPKDVISAQFENTTTSKDFCSQSCLSTYELKKKPIVTINTNSISTKCSMCQKNAVIRHEVNYQNVVHKLCSDACFSKFRSANNLTMNCCENCGGYCYSGSGQCHMLQIEGQSKKFCSSSCITAYKQKSAKITPCALCKSLRSSAEMIENTNSLGKTELFCSVNCLSAYRVKMVTSAGVQVQCNSCKTSAIPQYHLAMSDGSIRNFCSYSCVVAFQNLFNKPTGMNSSVVPLSQGQVIVSIPTGSTVSAGGGSTSAVSPTSISSSAAAGLQRLAAQSQHVGFARSVVKLKCQHCNRLFATKPELLDYKGKMFQFCGKNCSDEYKKINNVMAMCEYCKIEKIVKETVRFSGADKSFCSEGCKLLYKHDLAKRWGNHCKMCSYCLQTSPKLVQNNLGGKVEEFCCEECMSKYTVLFYQMAKCDACKRQGKLSESLKWRGEMKHFCNLLCILMFCNQQSVCDPPSQNNAANISMVQAASAGPPSLRKDSTPVIANVVSLASAPAAQPTVNSNSVLQGAVPTVTAKIIGDASTQTDALKLPPSQPPRLLKNKALLCKPITQTKATSCKPHTQNKECQTEDTPSQPQIIVVPVPVPVFVPIPLHLYTQYAPVPFGIPVPMPVPMLIPSSMDSEDKVTESIEDIKEKLPTHPFEADLLEMAEMIAEDEEKKTLSQGESQTSEHELFLDTKIFEKDQGSTYSGDLESEAVSTPHSWEEELNHYALKSNAVQEADSELKQFSKGETEQDLEADFPSDSFDPLNKGQGIQARSRTRRRHRDGFPQPRRRGRKKSIVAVEPRSLIQGAFQGCSVSGMTLKYMYGVNAWKNWVQWKNAKEEQGDLKCGGVEQASSSPRSDPLGSTQDHALSQESSEPGCRVRSIKLKEDILSCTFAELSLGLCQFIQEVRRPNGEKYDPDSILYLCLGIQQYLFENGRIDNIFTEPYSRFMIELTKLLKIWEPTILPNGYMFSRIEEEHLWECKQLGAYSPIVLLNTLLFFNTKYFQLKNVTEHLKLSFAHVMRRTRTLKYSTKMTYLRFFPPLQKQESEPDKLTVGKRKRNEDDEVPVGVEMAENTDNPLRCPVRLYEFYLSKCSESVKQRNDVFYLQPERSCVPNSPMWYSTFPIDPGTLDTMLTRILMVREVHEELAKAKSEDSDVELSD

SEQ ID NO: 47047 - protein, 181 aa, Homo sapiens
MPGRVEPILRRSSSESPSDNQAFQAPGSPEEGVRSPPEGAEIPGAEPEKMGGAGTVCSPLEDNGYASSSLSIDSRSSSPEPACGTPRGPGPPDPLLPSVAQAVQHLQVQERYKEQEKEKHHVHLVMYRRLALLQWIRGLQHQLIDQQARLQESFDTILDNRKELIRCLQQRAAPSRPQDQA

SEQ ID NO: 47048 - protein, 718 aa, Homo sapiens
MLHEALVSGQIPVPLESVQALDVAMRHLASMRYTPVGRSFFSPPEGYYHPLGGGREVWFGFHQSVRPAMWKMMLNIDVSATAFYKAQPVIEFMCEVLDIRNIDEQPKPLTDSQRVRFTKEIKGLKVEVTHCGQMKRKYRVCNVTRRPASHQTFPLQLESGQTVECTVAQYFKQKYNLQLKYPHLPCLQVGQEQKHTYLPLEVCNIVAGQRCIKKLTDNQTSTMIKATARSAPDRQEEISRLMKNASYNLDPYIQEFGIKVKDDMTEVTGRVLPAPILQYGGRNRAIATPNQGVWDMRGKQFYNGIEIKVWAIACFAPQKQCREEVLKNFTDQLRKISKDAGMPIQGQPCFCKYAQGADSVEPMFRHLKNTYSGLQLIIVILPGKTPVYAEVKRVGDTLLGMATQCVQVKNVVKTSPQTLSNLCLKINVKLGGINNILVPHQRSAVFQQPVIFLGADVTHPPAGDGKKPSITAVVGSMDAHPSRYCATVRVQRPRQEIIEDLSYMVRELLIQFYKSTRFKPTRIIFYRDGVPEGQLPQILHYELLAIRDACIKLEKDYQPGITYIVVQKRHHTRLFCADKNERIGKSGNIPAGTTVDTNITHPFEFDFYLCSHAGIQGTSRPSHYYVLWDDNRFTADELQILTYQLCHTYVRCTRSVSIPAPAYYARLVAFRARYHLVDKEHDSGEGSHISGQSNGRDPQALAKAVQVHQDTLRTMYFA

SEQ ID NO: 47049 - protein, 161 aa, Homo sapiens
MANKKEMLKIKQEQFMKKIVANPEDTRSLEARIIALSVKIRSYEEHLEKHRKDKAHKRYLLMSIDQRKKMLKNLRNTNYDVFEKICWGLGIEYTFPPLYYRRAHRRFVTKKALCIRVFQETQKLKKRRRALKAAAAAQKQAKRRNPDSPAKAIPKTLKDSQ

SEQ ID NO: 47050 - protein, 453 aa, Homo sapiens [sequence omitted]

SEQ ID NO: 47051 - protein, 333 aa, Homo sapiens
MGLRRSGKSSIQKVVFHKMSPNETLFLESTNKIYKDDISNSSFVNFQIWDFPGQMDFFDPTFDYEMIFRGTGALIYVIDAQDDYMEALTRLHITVSKAYKVNPDMNFEVFIHKVDGLSDDHKIETQRDIHQRANDDLADAGLEKLHLSFYLTSIYDHSIFEAFSKVVQKLIPQLPTLENLLNIFISNSGIEKAFLFDVVSKIYIATDSSPVDMQSYELCCDMIDVVIDVSCIYGLKEDGSGSAYDKESMAIIKLNNTTVLYLKEVTKFLALVCILREESFERKGLIDYNFHCFRKAIHEVFEVGVTSHRSCGHQTSASSLKALTHNGTPRNAI

SEQ ID NO: 47052 - protein, 5338 aa, Homo sapiens
MKVRKHINDLYEDLRDGHNLISLLEVLSGIKLPREKGRMRFHRLQNVQIALDFLKQRQVKLVNIRNDDITDGNPKLTLGLIWTIILHFQISDIYISGESGDMSAKEKLLLWTQKVTAGYTGIKCTNFSSCWSDGKMFNALIHRYRPDLVDMERVQIQSNRENLEQAFEVAERLGVTRLLDAEDVDVPSPDEKSVITYVSSIYDAFPKVPEGGEGISATEVDSRWQEYQSRVDSLIPWIKQHTILMSDKTFPQNPVELKALYNQYIHFKETEILAKEREKGRIEELYKLLEVWIEFGRIKLPQGYHPNDVEEEWGKLIIEMLEREKSLRPAVERLELLLQIANKIQNGALNCEEKLTLAKNTLQADAAHLESGQPVQCESDVIMYIQECEGLIRQLQVDLQILRDENYYQLEELAFRVMRLQDELVTLRLECTNLYRKGHFTSLELVPPSTLTTTHLKAEPLTKATHSSSTSWFRKPMTRAELVAISSSEDEGNLRFVYELLSWVEEMQMKLERAEWGNDLPSVELQLETQQHIHTSVEELGSSVKEARLYEGKMSQNFHTSYAETLGKLETQYCKLKETSSFRMRHLQSLHKFVSRATAELIWLNEKEEEELAYDWSDNNSNISAKRNYFSELTMELEEKQDVFRSLQDTAELLSLENHPAKQTVEAYSAAVQSQLQWMKQLCLCVEQHVKENTAYFQFFSDARELESFLRNLQDSIKRKYSCDHNTSLSRLEDLLQDSMDEKEQLIQSKSSVASLVGRSKTIVQLKPRSPDHVLKNTISVKAVCDYRQIEITICKNDECVLEDNSQRTKWKVISPTGNEAMVPSVCFLIPPPNKDAIEMASRVEQSYQKVMALWHQLHVNTKSLISWNYLRKDLDLVQTWNLEKLRSSAPGECHQIMKNLQAHYEDFLQDSRDSVLFSVADRLRLEEEVEACKARFQHLMKSMENEDKEETVAKMYISELKNIRLRLEEYEQRVVKRIQSLASSRTDRDAWQDNALRIAEQEHTQEDLQQLRSDLDAVSMKCDSFLHQSPSSSSVPTLRSELNLLVEKMDHVYGLSTVYLNKLKTVDVIVRSIQDAELLVKGYEIKLSQEEVVLADLSALEAHWSTLRHWLSDVKDKNSVFSVLDEEIAKAKVVAEQMSRLTPERNLDLERYQEKGSQLQERWHRVIAQLEIRQSELESIQEVLGDYRACHGTLIKWIEETTAQQEMMKPGQAEDSRVLSEQLSQQTALFAEIERNQTKLDQCQKFSQQYSTIVKDYELQLMTYKAFVESQQKSPGKRRRMLSSSDAITQEFMDLRTRYTALVTLTTQHVKYISDALRRLEEEEKVVEEEKQEHVEKVKELLGWVSTLARNTQGKATSSETKESTDIEKAILEQQVLSEELTTKKEQVSEAIKTSQIFLAKHGHKLSEKEKKQISEQLNALNKAYHDLCDGSANQLQQLQSQLAHQTEQKTLQKQQNTCHQQLEDLCSWVGQAERALAGHQGRTTQQDLSALQKNQSDLKDLQDDIQNRATSFATVVKDIEGFMEENQTKLSPRELTALREKLHQAKEQYEALQEETRVAQKELEEAVTSALQQETEKSKAAKELAENKKKIDALLDWVTSVGSSGGQLLTNLPGMEQLSGASLEKGALDTTDGYMGVNQAPEKLDKQCEMMKARHQELLSQQQNFILATQSAQAFLDQHGHNLTPEEQQMLQQKLGELKEQYSTSLAQSEAELKQVQTLQDELQKFLQDHKEFESWLERSEKELENMHKGGSSPETLPSLLKRQGSFSEDVISHKGDLRFVTISGQKVLDMENSFKEGKEPSEIGNLVKDKLKDATERYTALHSKCTRLGSHLNMLLGQYHQFQNSADSLQAWMQACEANVEKLLSDTVASDPGVLQEQLATTKQLQEELAEHQVPVEKLQKVARDIMEIEGEPAPDHRHVQETTDSILSHFQSLSYSLAERSSLLQKAIAQSQSVQESLESLLQSIGEVEQNLEGKQVSSLSSGVIQEALATNMKLKQDIARQKSSLEATREMVTRFMETADSTTAAVLQGKLAEVSQRFEQLCLQQQEKESSLKKLLPQAEMFEHLSGKLQQFMENKSRMLASGNQPDQDITHFFQQIQELNLEMEDQQENLDTLEHLVTELSSCGFALDLCQHQDRVQNLRKDFTELQKTVKEREKDASSCQEQLDEFRKLVRTFQKWLKETEGSIPPTETSMSAKELEKQIEHLKSLLDDWASKGTLVEEINCKGTSLENLIMEITAPDSQGKTGSILPSVGSSVGSVNGYHTCKDLTEIQCDMSDVNLKYEKLGGVLHERQESLQAILNRMEEVHKEANSVLQWLESKEEVLKSMDAMSSPTKTETVKAQAESNKAFLAELEQNSPKIQKVKEALAGLLVTYPNSQEAENWKKIQEELNSRWERATEVTVARQRQLEESASHLACFQAAESQLRPWLMEKELMMGVLGPLSIDPNMLNAQKQQVQFMLKEFEARRQQHEQLNEAAQGILTGPGDVSLSTSQVQKELQSINQKWVELTDKLNSRSSQIDQAIVKSTQYQELLQDLSEKVRAVGQRLSVQSAISTQPEAVKQQLEETSEIRSDLEQLDHEVKEAQTLCDELSVLIGEQYLKDELKKRLETVALPLQGLEDLAADRINRLQAALASTQQFQQMFDELRTWLDDKQSQQAKNCPISAKLERLQSQLQENEEFQKSLNQHSGSYEVIVAEGESLLLSVPPGEEKRTLQNQLVELKNHWEELSKKTADRQSRLKDCMQKAQKYQWHVEDLVPWIEDCKAKMSELRVTLDPVQLESSLLRSKAMLNEVEKRRSLLEILNSAADILINSSEADEDGIRDEKAGINQNMDAVTEELQAKTGSLEEMTQRLREFQESFKNIEKKVEGAKHQLEIFDALGSQACSNKNLEKLRAQQEVLQALEPQVDYLRNFTQGLVEDAPDGSDASQLLHQAEVAQQEFLEVKQRVNSGCVMMENKLEGIGQFHCRVREMFSQLADLDDELDGMGAIGRDTDSLQSQIEDVRLFLNKIHVLKLDIEASEAECRHMLEEEGTLDLLGLKRELEALNKQCGKLTERGKARQEQLELTLGRVEDFYRKLKGLNDATTAAEEAEALQWVVGTEVEIINQQLADFKMFQKEQVDPLQMKLQQVNGLGQGLIQSAGKDCDVQGLEHDMEEINARWNTLNKKVAQRIAQLQEALLHCGKFQDALEPLLSWLADTEELIANQKPPSAEYKVVKAQIQEQKLLQRLLDDRKATVDMLQAEGGRIAQSAELADREKITGQLESLESRWTELLSKAAARQKQLEDILVLAKQFHETAEPISDFLSVTEKKLANSEPVGTQTAKIQQQIIRHKALEEDIENHATDVHQAVKIGQSLSSLTSPAEQGVLSEKIDSLQARYSEIQDRCCRKAALLDQALSNARLFGEDEVEVLNWLAEVEDKLSSVFVKDFKQDVLHRQHADHLALNEEIVNRKKNVDQAIKNGQALLKQTTGEEVLLIQEKLDGIKTRYADITVTSSKALRTLEQARQLATKFQSTYEELTGWLREVEEELATSGGQSPTGEQIPQFQQRQKELKKEVMEHRLVLDTVNEVSRALLELVPWRAREGLDKLVSDANEQYKLVSDTIGQRVDEIDAAIQRSQQYEQAADAELAWVAETKRKLMALGPIRLEQDQTTAQLQVQKAFSIDIIRHKDSMDELFSHRSEIFGTCGEEQKTVLQEKTESLIQQYEAISLLNSERYARLERAQVLVNQFWETYEELSPWIEETRALIAQLPSPAIDHEQLRQQQEEMRQLRESIAEHKPHIDKLLKIGPQLKELNPEEGEMVEEKYQKAENMYAQIKEEVRQRALALDEAVSQSTQITEFHDKIEPMLETLENLSSRLRMPPLIPAEVDKIRECISDNKSATVELEKLQPSFEALKRRGEELIGRSQGADKDLAAKEIQDKLDQMVFFWEDIKARAEEREIKFLDVLELAEKFWYDMAALLTTIKDTQDIVHDLESPGIDPSIIKQQVEAAETIKEETDGLHEELEFIRILGADLIFACGETEKPEVRKSIDEMNNAWENLNKTWKERLEKLEDAMQAAVQYQDTLQAMFDWLDNTVIKLCTMPPVGTDLNTVKDQLNEMKEFKVEVYQQQIEMEKLNHQGELMLKKATDETDRDIIREPLTELKHLWENLGEKIAHRQHKLEGALLALGQFQHALEELMSWLTHTEELLDAQRPISGDPKVIEVELAKHHVLKNDVLAHQATVETVNKAGNELLESSAGDDASSLRSRLEAMNQCWESVLQKTEEREQQLQSTLQQAQGFHSEIEDFLLELTRMESQLSASKPTGGLPETAREQLDTHMELYSQLKAKEETYNQLLDKGRLMLLSRDDSGSGSKTEQSVALLEQKWHVVSSKMEERKSKLEEALNLATEFQNSLQEFINWLTLAEQSLNIASPPSLILNTVLSQIEEHKVFANEVNAHRDQIIELDQTGNQLKFLSQKQDVVLIKNLLVSVQSRWEKVVQRSIERGRSLDDARKRAKQFHEAWKKLIDWLEDAESHLDSELEISNDPDKIKLQLSKHKEFQKTLGGKQPVYDTTIRTGRALKEKTLLPEDSQKLDNFLGEVRDKWDTVCGKSVERQHKLEEALLFSGQFMDALQALVDWLYKVEPQLAEDQPVHGDLDLVMNLMDAHKVFQKELGKRTGTVQVLKRSGRELIENSRDDTTWVKGQLQELSTRWDTVCKLSVSKQSRLEQALKQAEVFRDTVHMLLEWLSEAEQTLRFRGALPDDTEALQSLIDTHKEFMKKVEEKRVDVNSAVAMGEVILAVCHPDCITTIKHWITIIRARFEEVLTWAKQHQQRLETALSELVANAELLEELLAWIQWAETTLIQRDQEPIPQNIDRVKALIAEHQTFMEEMTRKQPDVDRVTKTYKRKNIEPTHAPFIEKSRSGGRKSLSQPTPPPMPILSQSEAKNPRINQLSARWQQVWLLALERQRKLNDALDRLEELKEFANFDFDVWRKKYMRWMNHKKSRVMDFFRRIDKDQDGKITRQEFIDGILASKFPTTKLEMTAVADIFDRDGDGYIDYYEFVAALHPNKDAYRPTTDADKIEDEVTRQVAQCKCAKRFQVEQIGENKYRFGDSQQLRLVRILRSTVMVRVGGGWMALDEFLVKNDPCRARGRTNIELREKFILPEGASQGMTPFRSRGRRSKPSSRAASPTRSSSSASQSNHSCTSMPSSPATPASGTKVIPSSGSKLKRPTPTFHSSRTSLAGDTSNSSSPASTGAKTNRADPKKSASRPGSRAGSRAGSRASSRRGSDASDFDLLETQSACSDTSESSAAGGQGNSRRGLNKPSKIPTMSKKTTTASPRTPGPKR

SEQ ID NO: 47053 - protein, 385 aa, Homo sapiens [sequence omitted]

SEQ ID NO: 47054 - protein, 619 aa, Homo sapiens
MLYEKFSPAGPVLSIRVCRDMITRRSLGYAYVNFQQPADAERALDTMNFDVIKGKPIRIMWSQRDPSLRKSGVGNVFIKNLDKSIDNKALYDTFSAFGNILSCKVVCDENGSKGYAFVHFETQEAADKAIEKMNGMLLNDRKVFVGRFKSRKEREAELGAKAKEFTNVYIKNFGEEVDDESLKELFSQFGKTLSVKVMRDPNGKSKGFGFVSYEKHEDANKAVEEMNGKEISGKIIFVGRAQKKVERQAELKRKFEQLKQERISRYQGVNLYIKNLDDTIDDEKLRKEFSPFGSITSAKVMLEDGRSKGFGFVCFSSPEEATKAVTEMNGRIVGSKPLYVALAQRKEERKAHLTNQYMQRVAGMRALPANAILNQFQPAAGGYFVPAVPQAQGRPPYYTPNQLAQMRPNPRWQQGGRPQGFQGMPSAIRQSGPRPTLRHLAPTGSECPDRLAMDFGGAGAAQQGLTDSCQSGGVPTAVQNLAPRAAVAAAAPRAVAPYKYASSVRSPHPAIQPLQAPQPAVHVQGQEPLTASMLAAAPPQEQKQMLGERLFPLIQTMHSNLAGKITGMLLEIDNSELLHMLESPESLRSKVDEAVAVLQAHHAKKEAAQKVGAVAAATS

SEQ ID NO: 47055 - protein, 635 aa, Homo sapiens [sequence omitted]

SEQ ID NO: 47056 - protein, 135 aa, Homo sapiens
MQRVAGMRALPANAILNQFQPAAGGYFVPAVPQAQGRPPYYTPNQLAQMRPNPRWQQGGRPQGFQGMPSAIRQSGPRPTLRHLAPTGSECPDRLAMDFGGAGAAQQGLTDSCQSGGGIGCTQKGERWDLTGLCPD

SEQ ID NO: 47057 - protein, 413 aa, Homo sapiens
MEEIRNLTVKDFRVQELPLARIKKIMKLDEDVKMISAEAPVLFAKAAQIFITELTLRAWIHTEDNKRRTLQRNDIAMAITKFDQFDFLIDIVPRDELKPPKRQEEVRQSVTPAEPVQYYFTLAQQPTAVQVQGQQQGQQTTSSTTTIQPGQIIIAQPQQGQTTPVTMQVGEGQQVQIVQAQPQGQAQQAQSGTGQTMQVMQQIITNTGEIQQIPVQLNAGQLQYIRLAQPVSGTQVVQGQIQTLATNAQQITQTEVQQGQQQFSQFTDGQRNSVQQARVSELTGEAEPREVKATGNSTPCTSSLPTTHPPSHRAGASCVCCSQPQQSSTSPPPSDALQWVVVEVSGTPNQLETHRELHAPLPGMTSLSPLHPSQQLYQIQQVTMPAGQDLAQPMFIQSANQPSDGQAPQVTGD

SEQ ID NO: 47058 - protein, 308 aa, Homo sapiens
MEEIRNLTVKDFRVQELPLARIKKIMKLDEDVKMISAEAPVLFAKAAQIFITELTLRAWIHTEDNKRRTLQRNDIAMAITKFDQFDFLIDIVPRDELKPPKRQEEVRQSVTPAEPVQYYFTLAQQPTAVQVQGQQQGQQTTSSTTTIQPGQIIIAQPQQGQTTPVTMQVGEGQQVQIVQAQPQGQAQQAQSGTGQTMQVMQQIITNTGEIQQIPVQLNAGQLQYIRLAQPVSGTQVVQGQIQTLATNAQQITQTEVQQGQQQFSQFTDGQLYQIQQVTMPAGQDLAQPMFIQSANQPSDGQAPQVTGD

SEQ ID NO: 47059 - protein, 588 aa, Homo sapiens
MRAAIQKSDATQNAHGTGISKKNALLDPNTTLDQEEVQQHKDGKPPYSYASLITFAINSSPKKKMTLSEIYQWICDNFPYYREAGSGWKNSIRHNLSLNKCFLKVPRSKDDPGKGSYWAIDTNPKEDVLPTRPKKRARSVERASTPYSIDSDSLGMECIISGSASPTLAINTVTNKVTLYNTDQDGSDSPRSSLNNSLSDQSLASVNLNSVGSVHSYTPVTSHPESVSQSLTPQQQPQYNLPERDKQLLFSEYNFEDLSASFRSLYKSVFEQSLSQQGLMNIPSESSQQSHTSCTYQHSPSSTVSTHPHSNQSSLSNSHGSGLNTTGSNSVAQVSLSHPQMHTQPSPHPPHRPHGLPQHPQRSPHPAPHPQQHSQLQSPHPQHPSPHQHIQHHPNHQHQTLTHQAPPPPQQVSCNSGVSNDWYATLDMLKESCRIASSVNWSDVDLSQFQGLMESMRQADLKNWSLDQVQFADLCSSLNQFFTQTGLIHSQSNVQQNVCHGAMHPTKPSQHIGTGNLYIDSRQNLPPSVMPPPGYPHIPQALSTPGTTMAGHHRAMNQQHMMPSQAFQMRRSLPPDDIQDDFDWDSIV

SEQ ID NO: 47060 - protein, 554 aa, Homo sapiens
MRAAIQKSDATQNAHGTGISKKNALLDPNTTLDQEEVQQHKDGKPPYSYASLITFAINSSPKKKMTLSEIYQWICDNFPYYREAGSGWKNSIRHNLSLNKCFLKVPRSKDDPGKGSYWAIDTNPKEDVLPTRPKKRARSVERVTLYNTDQDGSDSPRSSLNNSLSDQSLASVNLNSVGSVHSYTPVTSHPESVSQSLTPQQQPQYNLPERDKQLLFSEYNFEDLSASFRSLYKSVFEQSLSQQGLMNIPSESSQQSHTSCTYQHSPSSTVSTHPHSNQSSLSNSHGSGLNTTGSNSVAQVSLSHPQMHTQPSPHPPHRPHGLPQHPQRSPHPAPHPQQHSQLQSPHPQHPSPHQHIQHHPNHQHQTLTHQAPPPPQQVSCNSGVSNDWYATLDMLKESCRIASSVNWSDVDLSQFQGLMESMRQADLKNWSLDQVQFADLCSSLNQFFTQTGLIHSQSNVQQNVCHGAMHPTKPSQHIGTGNLYIDSRQNLPPSVMPPPGYPHIPQALSTPGTTMAGHHRAMNQQHMMPSQAFQMRRSLPPDDIQDDFDWDSIV

SEQ ID NO: 47061 - protein, 473 aa, Homo sapiens
MASSAGSWLSGCLIPLVFLRLSVHVSGHAGDAGKFHVALLGGTAELLCPLSLWPGTVPKEVRWLRSPFPQRSQAVHIFRDGKDQDEDLMPEYKGRTVLVRDAQEGSVTLQILDVRLEDQGSYRCLIQVGNLSKEDTVILQVAAPSVGSLSPSAVALAVILPVLVLLIMVCLCLIWKQRRAKEKLLYEHVTEVDNLLSDHAKEKGKLHKAVKKLRSELKLKRAAANSGWRRARLHFVAVTLDPDTAHPKLILSEDQRCVRLGDRRQPVPDNPQRFDFVVSILGSEYFTTGCHYWEVYVGDKTKWILGVCSESVSRKGKVTASPANGHWLLRQSRGNEYEALTSPQTSFRLKEPPRCVGIFLDYEAGVISFYNVTNKSHIFTFTHNFSGPLRPFFEPCLHDGGKNTAPLVICSELHKSEESIVPRPEGKGHANGDVSLKVNSSLLPPKAPELKDIILSLPPDLGPALQELKAPSF

SEQ ID NO: 47062 - protein, 165 aa, Homo sapiens
MGLGAVPGRQAAFREGLEQAVRIHLMAGRVPQGADRIAVKAEMEAVFLENLRHAAGVLAQEDLVGLLEPINTRITDPQYFLDTPQQAAAILQKVGRPNLQLQMDIFHWQIMDGNLTGNIREFLPIVGHVQVAQVPGRGEPSSPGELNFPYLFQLLEDEGYKGFVG

SEQ ID NO: 47063 - protein, 1897 aa, Homo sapiens [sequence omitted]

SEQ ID NO: 47064 - protein, 415 aa, Homo sapiens
MHREVYALLYSDKKDAPPLLPSDTGQGYRTVKAKLGSKKVRPWKWMPFTNPARKDGAMFFHWRRAAEEGKDYPFARFNKTVQVPVYSEQEYQLYLHDDAWTKAETDHLFDLSRRFDLRFVVIHDRYDHQQFKKRSVEDLKERYYHICAKLANVRAVPGTDLKIPVFDAGHERRRKEQLERLYNRTPEQVAEEEYLLQELRKIEARKKEREKRSQDLQKLITAADTTAEQRRTERKAPKKKLPQKKEAEKPAVPETAGIKFPDFKSAGVTLRSQRMKLPSSVGQKKIKALEQMLLELGVELSPTPTEELVHMFNELRSDLVLLYELKQACANCEYELQMLRHRHEALARAGVLGGPATPASGPGPASAEPAVTEPGLGPDPKDTIIDVVGAPLTPNSRKRRESASSSSSVKKAKKP

SEQ ID NO: 47065 - protein, 110 aa, Homo sapiens
MLRLLLLVAFALVVVLFHVLLAPITALFHTHFYDRLQDAGSRWPELYLYSRADEVVLARDIERMVEARLARRVLARSVDFVSSAHVSHLRDYPTYYTSLCVDFMRNCVRC

SEQ ID NO: 47066 - protein, 437 aa, Homo sapiens [sequence omitted]

SEQ ID NO: 47067 - protein, 397 aa, Homo sapiens [sequence omitted]

SEQ ID NO: 47068 - protein, 577 aa, Homo sapiens
MKKGTIVKKLLLTVDTTDDNFMPKRVVVYGGEGDNLKKLSDVSIDETLIGDVCVLEDMTVHLPIIEIRIVECRDDGIDVRLRGVKIKSSRQRELGLNADLFQPTSLVRYPRLEGTDPEVLYRRAVLLQRFIKILDSVLHHLVPAWDHTLGTFSEIKQVKQFLLLSRQRPGLVAQCLRDSESSKPSFMPRLYINRRLAMEHRACPSRDPACKNAVFTQVYEGLKPSDKYEKPLDYRWPMRYDQWWECKFIAEGIIDQGGGFRDSLADMSEELCPSSADTPVPLPFFVRTANQGNGTGEARDMYVPNPSCRDFAKYEWIGQLMGAALRGKEFLVLALPGFVWKQLSGEEVSWSKDFPAVDSVLVKLLEVMEGMDKETFEFKFGKELTFTTVLSDQQVVELIPGGAGIVVGYGDRSRFIQLVQKARLEESKEQVAAMQAGLLKVVPQAVLDLLTWQELEKKVCGDPEVTVDALRKLTRFEDFEPSDSRVQYFWEALNNFTNEDRSRFLRFVTGRSRLPARIYIYPDKLGYETTDALPESSTCSSTLFLPHYASAKVCEEKLRYAAYNCVAIDTDMSPWEE

SEQ ID NO: 47069 - protein, 210 aa, Homo sapiens
MWPSLLLAIKTANFVAVDTELSGLGDRKSLLNQCIEERYKAVCHAARTRSILSLGLACFKRQPDKGEHSYLAQVFNLTLLCMEEYVIEPKSVQFLIQHGFNFNQQYAQGIPYHKGNDKGDESQSQSVRTLFLELIRARRPLVLHNGLIDLVFLYQNFYAHLPESLGTFTADLCEMFPAGIYDTKYAAEFHARFVASYLEYAFRKWQCFRC

SEQ ID NO: 47070 - protein, 234 aa, Homo sapiens
MRDHIDYRCCLPPATHRPHPTSICDNFSAYGWCPLGPQCPQSHDIDLIIDTDEAAAEDKRRRRRRREKRKRALLNLPGTQTSGEAKDGPPKKQVCGDSIKPEETEQEVAADETRNLPHSKQGNKNDLEMGIKAARPEIADRATSEVPGSQASPNPVPGDGLHRAGFDAFMTGYVMAYVEVSQGPQPCSSGPWLPECHNKVYLSGKAVPLTVAKSQFSRSSKAHNQKMKLTWGSS

SEQ ID NO: 47071 - protein, 312 aa, Homo sapiens [sequence omitted]

SEQ ID NO: 47072 - protein, 786 aa, Homo sapiens
MESTATAAVAAELVSADKIEDVPAPSTSADKVESLDVDSEAKKLLGLGQKHLVMGDIPAAVNAFQEAASLLGKKYGETANECGEAFFFYGKSLLELARMENGVLGNALEGVHVEEEEGEKTEDESLVENNDNIDEEAREELREQVYDAMGEKEEAKKTEDKSLAKPETDKEQDSEMEKGGREDMDISKSAEEPQEKVDLTLDWLTETSEEAKGGAAPEGPNEAEVTSGKPEQEVPDAEEEKSVSGTDVQEECREKGGQEKQGEVIVSIEEKPKEVSEEQPVVTLEKQGTAVEVEAESLDPTVKPVDVGGDEPEEKVVTSENEAGKAVLEQLVGQEVPPAEESPEVTTEAAEASAVEAGSEVSEKPGQEAPVLPKDGAVNGPSVVGDQTPIEPQTSIERLTETKDGSGLEEKVRAKLVPSQEETKLSVEESEAAGDGVDTKVAQGATEKSPEDKVQIAANEETQEREEQMKEGEETEGSEEDDKENDKTEEMPNDSVLENKSLQENEEEEIGNLELAWDMLDLAKIIFKRQETKEAQLYAAQAHLKLGEVSVESENYVQAVEEFQSCLNLQEQYLEAHDRLLAETHYQLGLAYGYNSQYDEAVAQFSKSIEVIENRMAVLNEQVKEAEGSSAEYKKEIEELKELLPEIREKIEDAKESQRSGNVAELALKATLVESSTSGFTPGGGGSSVSMIASRKPTDGASSSNCVTDISHLVRKKRKPEEESPRKDDAKKAKQEPEVNGGSGDAVPSGNEVSENMEEEAENQAESRAAVEGTVEAGATVESTAC

SEQ ID NO: 47073 - protein, 447 aa, Homo sapiens [sequence omitted]

SEQ ID NO: 47074 - protein, 1506 aa, Homo sapiens
MRPRSRSLSPGRSPVSFDSEIIMMNHVYKERFPKATAQMEERLAEFISSNTPDSVLPLADGALSFIHHQVIEMARDCLDKSRSGLITSQYFYELQDNLEKLLQDAHERSESSEVAFVMQLVKKLMIIIARPARLLECLEFDPEEFYHLLEAAEGHAKEGQGIKCDIPRYIVSQLGLTRDPLEEMAQLSSCDSPDTPETDDSIEGHGASLPSKKTPSEEDFETIKLISNGAYGAVFLVRHKSTRQRFAMKKINKQNLILRNQIQQAFVERDILTFAENPFVVSMFCSFDTKRHLCMVMEYVEGGDCATLLKNIGALPVDMVRLYFAETVLALEYLHNYGIVHRDLKPDNLLITSMGHIKLTDFGLSKIGLMSLTTNLYEGHIEKDAREFLDKQVCGTPEYIAPEVILRQGYGKPVDWWAMGIILYEFLVGCVPFFGDTPEELFGQVISDEIVWPEGDEALPPDAQDLTSKLLHQNPLERLGTGSAYEVKQHPFFTGLDWTGLLRQKAEFIPQLESEDDTSYFDTRSERYHHMDSEDEEEVSEDGCLEIRQFSSCSPRFNKVYSSMERLSLLEERRTPPPTKRSLSEEKEDHSDGLAGLKGRDRSWVIGSPEILRKRLSVSESSHTESDSSPPMTVRRRCSGLLDAPRFPEGPEEASSTLRRQPQEGIWVLTPPSGEGVSGPVTEHSGEQRPKLDEEAVGRSSGSSPAMETRGRGTSQLAEGATAKAISDLAVRRARHRLLSGDSTEKRTARPVNKVIKSASATALSLLIPSEHHTCSPLASPMSPHSQSSNPSSRDSSPSRDFLPALGSMRPPIIIHRAGKKYGFTLRAIRVYMGDSDVYTVHHMVWHVEDGGPASEAGLRQGDLITHVNGEPVHGLVHTEVVELILKSGNKVAISTTPLENTSIKVGPARKGSYKAKMARRSKRSRGKDGQESRKRSSLFRKITKQASLLHTSRSLSSLNRSLSSGESGPGSPTHSHSLSPRSPTQGYRVTPDAVHSVGGNSSQSSSPSSSVPSSPAGSGHTRPSSLHGLAPKLQRQYRSPRRKSAGSIPLSPLAHTPSPPPPTASPQRSPSPLSGHVAQAFPTKLHLSPPLGRQLSRPKSAEPPRSPLLKRVQSAEKLAAALAASEKKLATSRKHSLDLPHSELKKELPPREVSPLEVVGARSVLSGKGALPGKGVLQPAPSRALGTLRQDRAERRESLQKQEAIREVDSSEDDTEEGPENSQGAQELSLAPHPEVSQSVAPKGAGESGEEDPFPSRDPRSLGPMVPSLLTGITLGPPRMESPSGPHRRLGSPQAIEEAASSSSAGPNLGQSGATDPIPPEGCWKAQHLHTQALTALSPSTSGLTPTSSCSPPSSTSGKLSMWSWKSLIEGPDRASPSRKATMAGGLANLQDLENTTPAQPKNLSPREQGKTQPPSAPRLAHPSYEDPSQGWLWESECAQAVKEDPALSITQVPDASGDRRQDVPCRGCPLTQKSEPSLRRGQEPGGHQKHRDLALVPDELLKQT

SEQ ID NO: 47075 - protein, 517 aa, Homo sapiens
MAKRVFDTYSPHEDEAMVLFLNMVAPGRVLICTVKDEGSFHLKDTAKALLRSLGSQAGPALGWRDTWAFVGRKGGPVFGEKHSKSPALSSWGDPVLLKTDVPLSSAEEAECHWADTELNRRRRRFCSKVEGYGSVCSCKDPTPIEFSPDPLPDNKVLNVPVAVIAGNRPNYLYRMLRSLLSAQGVSPQMITVFIDGYYEEPMDVVALFGLRGIQHTPISIKNARVSQHYKASLTATFNLFPEAKFAVVLEEDLDIAVDFFSFLSQSIHLLEEDDSLYCISAWNDQGYEHTAEDPALLYRVETMPGLGWVLRRSLYKEELEPKWPTPEKLWDWDMWMRMPEQRRGRECIIPDVSRSYHFGIVGLNMNGYFHEAYFKKHKFNTVPGVQLRNVDSLKKEAYEVEVHRLLSEAEVLDHSKNPCEDSFLPDTEGHTYVAFIRMEKDDDFTTWTQLAKCLHIWDLDVRGNHRGLWRLFRKKNHFLMVGVPASPYSVKKPPSVTPIFLEPPPKEEGAPGAPEQT

SEQ ID NO: 47076 - protein, 1019 aa, Homo sapiens
MEGKTGNTTDDEEEEEVEEEEEDDDEDSGAEIEDDDEEGFDDEDEFDDEHDDDLDTEDNELEELEERAEARKKTTEKQSAAALCVGVGSFADPDDLPGLAHFLEHMVFMGSLKYPDENGFDAFLKKHGGSDNASTDCERTVFQFDVQRKYFKEALDRWAQFFIHPLMIRDAIDREVEAVDSEYQLARPSDANRKEMLFGSLARPGHPMGKFFWGNAETLKHEPRKNNIDTHARLREFWMRYYSSHYMTLVVQSKETLDTLEKWVTEIFSQIPNNGLPRPNFGHLTDPFDTPAFNKLYRVVPIRKIHALTITWALPPQQQHYRVKPLHYISWLVGHEGKGSILSFLRKKCWALALFGGNGETGFEQNSTYSVFSISITLTDEGYEHFYEVAYTVFQYLKMLQKLGPEKRIFEEIRKIEDNEFHYQEQTDPVEYVENMCENMQLYPLQDILTGDQLLFEYKPEVIGEALNQLVPQKANLVLLSGANEGKCDLKEKWFGTQYSIEDIENSWAELWNSNFELNPDLHLPAENKYIATDFTLKAFDCPETEYPVKIVNTPQGCLWYKKDNKFKIPKAYIRFHLISPLIQKSAANVVLFDIFVNILTHNLAEPAYEADVAQLEYKLVAGEHGLIIRVKGFNHKLPLLFQLIIDYLAEFNSTPAVFTMITEQLKKTYFNILIKPETLAKDVRLLILEYARWSMIDKYQALMDGLSLESLLSFVKEFKSQLFVEGLVQGNVTSTESMDFLKYVVDKLNFKPLEQEMPVQFQVVELPSGHHLCKVKALNKGDANSEVTVYYQSGTRSLREYTLMELLVMHMEEPCFDFLRTKQTLGYHVYPTCRNTSGILGFSVTVGTQATKYNSEVVDKKIEEFLSSFEEKIENLTEEAFNTQVTALIKLKECEDTHLGEEVDRNWNEVVTQQYLFDRLAHEIEALKSFSKSDLVNWFKAHRGPGSKMLSVHVVGYGKYELEEDGTPSSEDSNSSCEVMQLTYLPTSPLLADCIIPITDIRAFTTTLNLLPYHKIVK

SEQ ID NO: 47077 - protein, 985 aa, Homo sapiens
MSSTLLVETRNLYGVVGAESRSAPVQHLAGWQAEEQQGETDTVLSAAALCVGVGSFADPDDLPGLAHFLEHMVFMGSLKYPDENGFDAFLKKHGGSDNASTDCERTVFQFDVQRKYFKEALDRWAQFFIHPLMIRDAIDREVEAVDSEYQLARPSDANRKEMLFGSLARPGHPMGKFFWGNAETLKHEPRKNNIDTHARLREFWMRYYSSHYMTLVVQSKETLDTLEKWVTEIFSQIPNNGLPRPNFGHLTDPFDTPAFNKLYRVVPIRKIHALTITWALPPQQQHYRVKPLHYISWLVGHEGKGSILSFLRKKCWALALFGGNGETGFEQNSTYSVFSISITLTDEGYEHFYEVAYTVFQYLKMLQKLGPEKRIFEEIRKIEDNEFHYQEQTDPVEYVENMCENMQLYPLQDILTGDQLLFEYKPEVIGEALNQLVPQKANLVLLSGANEGKCDLKEKWFGTQYSIEDIENSWAELWNSNFELNPDLHLPAENKYIATDFTLKAFDCPETEYPVKIVNTPQGCLWYKKDNKFKIPKAYIRFHLISPLIQKSAANVVLFDIFVNILTHNLAEPAYEADVAQLEYKLVAGEHGLIIRVKGFNHKLPLLFQLIIDYLAEFNSTPAVFTMITEQLKKTYFNILIKPETLAKDVRLLILEYARWSMIDKYQALMDGLSLESLLSFVKEFKSQLFVEGLVQGNVTSTESMDFLKYVVDKLNFKPLEQEMPVQFQVVELPSGHHLCKVKALNKGDANSEVTVYYQSGTRSLREYTLMELLVMHMEEPCFDFLRTKQTLGYHVYPTCRNTSGILGFSVTVGTQATKYNSEVVDKKIEEFLSSFEEKIENLTEEAFNTQVTALIKLKECEDTHLGEEVDRNWNEVVTQQYLFDRLAHEIEALKSFSKSDLVNWFKAHRGPGSKMLSVHVVGYGKYELEEDGTPSSEDSNSSCEVMQLTYLPTSPLLADCIIPITDIRAFTTTLNLLPYHKIVK

SEQ ID NO: 47078 - protein, 1272 aa, Homo sapiens
MHNCDKRTLQNDLQDCNNYNSQSLMDAFSCSLDNENRQTDQFSFSINESTEKDMNSEKQMDPLNRPKTEGRSVNHLCPTSSDSLASVCSPSQLKDDGSIGRDPSMSAITSLTVDSVISSQGTDGCPAVKKQENYIPDEDLTGKISSPRTDLGSPNSFSHMSEGILMKKEPAEESTTEESLRSGLPLLLKPDMPNGSGRNNDCERCSDCLVPNEVRADENEGYEHEETLGTTEFLNMTEHFSESQDMTNWKLTKLNEMNDSQVNEEKEKFLQISQPEDTNGDSGGQCVGLADAGLDLKGTCISESEECDFSTVIDTPAANYLSNGCDSYGMQDPGVSFVPKTLPSKEDSVTEEKEIEESKSECYSNIYEQRGNEATEGSGLLLNSTGDLMKKNYLHNFCSQVPSVLGQSSPKVVASLPSISVPFGGARPKQPSNLKLQIPKPLSDHLQNDFPANSGNNTKNKNDILGKAKLGENSATNVCSPSLGNISNVDTNGEHLESYEAEISTRPCLALAPDSPDNDLRAGQFGISARKPFTTLGEVAPVWVPDSQAPNCMKCEARFTFTKRRHHCRACGKVFCASCCSLKCKLLYMDRKEARVCVICHSVLMNAQAWENMMSASSQSPNPNNPAEYCSTIPPLQQAQASGALSSPPPTVMVPVGVLKHPGAEVAQPREQRRVWFADGILPNGEVADAAKLTMNGTSSAGTLAVSHDPVKPVTTSPLPAETDICLFSGSITQVGSPVGSAMNLIPEDGLPPILISTGVKGDYAVEEKPSQISVMQQLEDGGPDPLVFVLNANLLSMVKIVNYVNRKCWCFTTKGMHAVGQSEIVILLQCLPDEKCLPKDIFNHFVQLYRDALAGNVVSNLGHSFFSQSFLGSKEHGGFLYVTSTYQSLQDLVLPTPPYLFGILIQKWETPWAKVFPIRLMLRLGAEYRLYPCPLFSVRFRKPLFGETGHTIMNLLADFRNYQYTLPVVQGLVVDMEVRKTSIKIPSNRYNEMMKAMNKSNEHVLAGGACFNEKADSHLVCVQNDDGNYQTQAISIHNQPRKVTGASFFVFSGALKSSSGYLAKSSIVEDGVMVQITAENMDSLRQALREMKDFTITCGKADAEEPQEHIHIQWVDDDKNVSKGVVSPIDGKSMETITNVKIFHGSEYKANGKVIRWTEVFFLENDDQHNCLSDPADHSRLTEHVAKAFCLALCPHLKLLKEDGMTKLGLRVTLDSDQVGYQAGSNGQPLPSQYMNDLDSALVPVIHGGACQLSEGPVVMELIFYILENIV

SEQ ID NO: 47079 - protein, 74 aa, Homo sapiens [sequence omitted]

SEQ ID NO: 47080 - protein, 559 aa, Homo sapiens
MHSFIHAAMGMVMAWCAAVITQGQYSFLVVPCTGTNSFGSPAAQTCLNEYHLFFLLTGAFMGYSYSLLYFVNNMNYLPFPIIQQYKFLRFRRSLLLLVKHSCVESLFLVRNFCILYYFLGYIPKAWISTAMNLHIDEQVHRPLDTVSGLLNLSLLYHVWLCGVFLLTTWYVSWILFKIYATEAHVFPVQPPFAEGSDECLPKVLNSNPPPIIKYLALQDLMLLSQYSPSRRQEVFSLSQPGGHPHNWTAISRECLNLLNGMTQKLILYQEAAATNGRVSSSYPVEPKKLNSPEETAFQTPKSSQMPRPSVPPLVKTSLFSSKLSTPDVVSPFGTPFGSSVMNRMAGIFDVNTCYGSPQSPQLIRRGPRLWTSASDQQMTEFSNPSPSTSISAEGKTMRQPSVIYSWIQNKREQIKNFLSKRVLIMYFFSKHPEASIQAVFSDAQMHIWALEGLSHLVAASFTEDRFGVVQTTLPAILNTLLTLQEAVDKYFKLPHASSKPPRISGSLVDTSYKTLRFAFRASLKTAIYRITTTFGEHLNAVQASAEHQKRLQQFLEFKE

SEQ ID NO: 47081 - protein, 761 aa, Homo sapiens
MLLEEEYYLSKKSQPEKVWLDQKEDDKKYMKSLQKTAKIMVHSPTKPASYSVKWTIEEKELFEQGLAKFGRRWTKISKLIGSRTVLQVKSYARQYFKNKVKCGLDKETPNQKTGHNLQVKNEDKGTKAWTPSCLRGRADPNLNAVKIEKLSDDEEVDITDEVDELSSQTPQKNSSSDLLLDFPNSKMHETNQGEFITSDSQEALFSKSSRGCLQNEKQDETLSSSEITLWTEKQSNGDKKSIELNDQKFNELIKNCNKHDGRGIIVDARQLPSPEPCEIQKNLNDNEMLFHSCQMVEESHEEEELKPPEQEIEIDRNIIQEEEKQAIPEFFEGRQAKTPERYLKIRNYILDQWEICKPKYLNKTSVRPGLKNCGDVNCIGRIHTYLELIGAINFGCEQAVYNRPQTVDKVRIRDRKDAVEAYQLAQRLQSMRTRRRRVRDPWGNWCDAKDLEGQTFEHLSAEELAKRREEEKGRPVKSLKVPRPTKSSFDPFQLIPCNFFSEEKQEPFQVKVASEALLIMDLHAHVSMAEVIGLLGGRYSEVDKVVEVCAAEPCNSLSTGLQCEMDPVSQTQASETLAVRGFSVIGWYHSHPAFDPNPSLRDIDTQAKYQSYFSRGGAKFIGMIVSPYNRNNPLPYSQITCLVISEEISPDGSYRLPYKFEVQQMLEEPQWGLVFEKTRWIIEKYRLSHSSVPMDKIFRRDSDLTCLQKLLECMRKTLSKVTNCFMAEEFLTEIENLFLSNYKSNQENGVTEENCTKELLM

SEQ ID NO: 47082 - protein, 85 aa, Homo sapiens
MVTGLKLSQDLDDLAILYLATVQAIALGTRFIIEAMEAAGHSISTLFLCGGLSKNPLFVQMHADITGSNGKNEQSWESCVPETTG

SEQ ID NO: 47083 - protein, 532 aa, Homo sapiens
MRHSEDFKEKLPKGNGKRKSDTEFGNMKKKVKLSKEHQSLEENQRQTRSKRKATSDTLESPPKIIPKYISENESPRPSQKKSRVKINWLKSATKQPSILSKFCSLGKITTNQGVKGQSKENECDPEEDLGKCESDNTTNGCGLESPGNTVTPVNVNEVKPINKGEEQIGFELVEKLFQGQLVLRTRCLECESLTERREDFQDISVPVQEDELSKVEESSEISPEPKTEMKTLRWAISQFASVERIVGEDKYFCENCHHYTEAERSLLFDKMPEVITIHLKCFAASGLEFDCYGGGLSKINTPLLTPLKLSLEEWSTKPTNDSYGLFAVVMHSGITISSGHYTASVKVTDLNSLELDKGNFVVDQMCEIGKPEPLNEEEARGVVENYNDEEVSIRVGGNTQPSKVLNKKNVEAIGLLGGQKSKADYELYNKASNPDKVASTAFAENRNSETSDTTGTHESDRNKESSDQTGINISGFENKISYVVQSLKEYEGKWLLFDDSEVKVTEEKDFLNSLSPSTSPTSTPYLLFYKKL

SEQ ID NO: 47084 - protein, 1990 aa, Homo sapiens
MDPHVRDCIRSYTEDWAIVIRKYHKLGTGFNPNTLDKQKERQKGLPKQVFESDEAPDGNSYQDDQDDLKRRSMSIDDTPRGSWACSIFDLKNSLPDALLPNLLDRTPNEEIDRQNDDQRKSNRHKELFALHPSPDEEEPIERLSVPDIPKEHFGQRLLVKCLSLKFEIEIEPIFASLALYDVKEKKKISENFYFDLNSEQMKGLLRPHVPPAAITTLARSAIFSITYPSQDVFLVIKLEKVLQQGDIGECAEPYMIFKEADATKNKEKLEKLKSQADQFCQRLGKYRMPFAWTAIHLMNIVSSAGSLERDSTEVEISTGERKGSWSERRNSSIVGRRSLERTTSGDDACNLTSFRPATLTVTNFFKQEGDRLSDEDLYKFLADMRRPSSVLRRLRPITAQLKIDISPAPENPHYCLTPELLQVKLYPDSRVRPTREILEFPARDVYVPNTTYRNLLYIYPQSLNFANRQGSARNITVKVQFMYGEDPSNAMPVIFGKSSCSEFSKEAYTAVVYHNRSPDFHEEIKVKLPATLTDHHHLLFTFYHVSCQQKQNTPLETPVGYTWIPMLQNGRLKTGQFCLPVSLEKPPQAYSVLSPEVPLPGMKWVDNHKGVFNVEVVAVSSIHTQDPYLDKFFALVNALDEHLFPVRIGDMRIMENNLENELKSSISALNSSQLEPVVRFLHLLLDKLILLVIRPPVIAGQIVNLGQASFEAMASIINRLHKNLEGNHDQHGRNSLLASYIHYVFRLPNTYPNSSSPGPGGLGGSVHYATMARSAVRPASLNLNRSRSLSNSNPDISGTPTSPDDEVRSIIGSKAMDRSCNRMSSHTETSSFLQTLTGRLPTKKLFHEELALQWVVCSGSVRESALQQAWFFFELMVKSMVHHLYFNDKLEAPRKSRFPERFMDDIAALVSTIASDIVSRFQKDTEMVERLNTSLAFFLNDLLSVMDRGFVFSLIKSCYKQVSSKLYSLPNPSVLVSLRLDFLRIICSHEHYVTLNLPCSLLTPPASPSPSVSSATSQSSGFSTNVQDQKIANMFELSVPFRQQHYLAGLVLTELAVILDPDAEGLFGLHKKVINMVHNLLSSHDSDPRYSDPQIKARVAMLYLPLIGIIMETVPQLYDFTETHNQRGRPICIATDDYESESGSMISQTVAMAIAGTSVPQLTRPGSFLLTSTSGRQHTTFSAESSRSLLICLLWVLKNADETVLQKWFTDLSVLQLNRLLDLLYLCVSCFEYKGKKVFERMNSLTFKKSKDMRAKLEEAILGSIGARQEMVRRSRGQLERSPSGSAFGSQENLRWRKDMTHWRQNTEKLDKSRAEIEHEALIDGNLATEANLIILDTLEIVVQTVSVTESKESILGGVLKVLLHSMACNQSAVYLQHCFATQRALVSKFPELLFEEETEQCADLCLRLLRHCSSSIGTIRSHASASLYLLMRQNFEIGNNFARVKMQVTMSLSSLVGTSQNFNEEFLRRSLKTILTYAEEDLELRETTFPDQVQDLVFNLHMILSDTVKMKEHQEDPEMLIDLMYRIAKGYQTSPDLRLTWLQNMAGKHSERSNHAEAAQCLVHSAALVAEYLSMLEDRKYLPVGCVTFQNISSNVLEESAVSDDVVSPDEEGICSGKYFTESGLVGLLEQAAASFSMAGMYEAVNEVYKVLIPIHEANRDAKKLSTIHGKLQEAFSKIVHQDGKRMFGTYFRVGFYGTKFGDLDEQEFVYKEPAITKLAEISHRLEGFYGERFGEDVVEVIKDSNPVDKCKLDPNKAYIQITYVEPYFDTYEMKDRITYFDKNYNLRRFMYCTPFTLDGRAHGELHEQFKRKTILTTSHAFPYIKTRVNVTHKEEIILTPIEVAIEDMQKKTQELAFATHQDPADPKMLQMVLQGSVGTTVNQGPLEVAQVFLSEIPSDPKLFRHHNKLRLCFKDFTKRCEDALRKNKSLIGPDQKEYQRELERNYHRLKEALQPLINRKIPQLYKAVLPVTCHRDSFSRMSLRKMDL

SEQ ID NO: 47085 - protein, 1210 aa, Homo sapiens
MQRIFNSFVYTEKISNGESEVQQLAKKIREKFNRYLDVVNRNKQVVEASYTAHLTSPLTAIQDCCTIPPSMMEFDGNFNTNVSRTISCDRLSTTVNSRAFNPGRDLNSVLADNLKSNPGIKWQYFSSEEGIFTVFPAHKFRCKGSYEHRSRPIYVSTVRPQSKHIVVILDHGASVTDTQLQIAKDAAQVILSAIDEHDKISVLTVADTVRTCSLDQCYKTFLSPATSETKRKMSTFVSSVKSSDSPTQHAVGFQKAFQLIRSTNNNTKFQANTDMVIIYLSAGITSKDSSEEDKKATLQVINEENSFLNNSVMILTYALMNDGVTGLKELAFLRDLAEQNSGKYGVPDRMALPVIKGSMMVLNQLSNLETTVGRFYTNLPNRMIDEAVFSLPFSDEMGDGLIMTVSKPCYFGNLLLGIVGVDVNLAYILEDVTYYQDSLASYTFLIDDKGYTLMHPSLTRPYLLSEPPLHTDIIHYENIPKFELVRQNILSLPLGSQIIAVPVNSSLSWHINKLRETGKEAYNVSYAWKMVQDTSFILCIVVIQPEIPVKQLKNLNTVPSSKLLYHRLDLLGQPSACLHFKQLATLESPTIMLSAGSFSSPYEHLSQPETKRMVEHYTAYLSDNTRLIANPGLKFSVRNEVMATSHVTDEWMTQMEMSSLNTYIVRRYIATPNGVLRIYPGSLMDKAFDPTRRQWYLHAVANPGLISLTGPYLDVGGAGYVVTISHTIHSSSTQLSSGHTVAVMGIDFTLRYFYKVLMDLLPVCNQDGGNKIRCFIMEDRGYLVAHPTLIDPKGHAPVEQQHITHKEPLVANDILNHPNFVKKNLCNSFSDRTVQRFYKFNTSLAGDLTNLVHGSHCSKYRLARIPGTNAFVGIVNETCDSLAFCACSMVDRLCLNCHRMEQNECECPCECPLEVNECTGNLTNAENRNPSCEVHQEPVTYTAIDPGLQDALHQCVNSRCSQRLESGDCFGVLDCEWCMVDSDGKTHLDKPYCAPQKECFGGIVGAKSPYVDDMGAIGDEVITLNMIKSAPVGPVAGGIMGCIMVLVLAVYAYRHQIHRRSHQHMSPLAAQEMSVRMSNLENDRDERDDDSHEDRGIISNTRFIAAVIERHAHSPERRRRYWGRSGTESDHGYSTMSPQEDSENPPCNNDPLSAGVDVGNHDEDLDLDTPPQTAALLSHKFHHYRSHHPTLHHSHHLQAAVTVHTVDAEC

SEQ ID NO: 47086 - protein, 1136 aa, Homo sapiens [sequence omitted]

SEQ ID NO: 47087 - protein, 838 aa, Homo sapiens
MSFPLDNVDIGFRNQVDDIRSFLDSRHLDHYTVYNLSPKSYRTAKFHSRVSECSWPIRQAPSLHNLFAVCRNMYNWLLQNPKNVCVVHCLDGRAASSILVGAMFIFCNLYSTPGPAIRLLYAKRPGIGLSPSHRRYLGYMCDLLADKPYRPHFKPLTIKSITVSPIPFFNKQRNGCRPYCDVLIGETKIYSTCTDFERMKEYRVQDGKIFIPLNITVQGDVVVSMYHLRSTIGSRLQAKVTNTQIFQLQFHTGFIPLDTTVLKFTKPELDACDVPEKYPQLFQVTLDVELQPHDKVIDLTPPWEHYCTKDVNPSILFSSHQEHQDTLALGGQAPIDIPPDNPRHYGQSGFFASLCWQDQKSEKSFCEEDHAALVNQESEQSDDELLTLSSPHGNANGDKPHGVKKPSKKQQEPAAPPPPEDVDLLGLEGSAMSNSFSPPAAPPTNSELLSDLFGGGGAAGPTQAGQSGVEDVFHPSGPASTQSTPRRSATSTSASPTLRVGEGATFDPFGAPSKPSGQDLLGSFLNTSSASSDPFLQPTRSPSPTVHASSTPAVNIQPDVSGGWDWHAKPGGFGMGSKSAATSPTGSSHGTPTHQSKPQTLDPFADLGTLGSSSFASKPTTPTGLGGGFPPLSSPQKASPQPMGGGWQQGGAYNWQQPQPKPQPSMPHSSPQNRPNYNVSFSAMPGGQNERGKGSSNLEGKQKAADFEDLLSGQGFNAHKDKKGPRTIAEMRKEEMAKEMDPEKLKILEWIEGKERNIRALLSTMHTVLWAGETKWKPVGMADLVTPEQVKKVYRKAVLVVHPDKATGQPYEQYAKMIFMELNDAWSEFENQGQKPLY

SEQ ID NO: 47088 - protein, 500 aa, Homo sapiens [sequence omitted]

SEQ ID NO: 47089 - protein, 41 aa, Homo sapiens
MQRILSQPTFTEHLLRAVLSTERGPYPDPKRAFLDLLQERI

SEQ ID NO: 47090 - protein, 296 aa, Homo sapiens
MDDVYGGTNRYFRQVASEFGLKISFVDCSKIKLLEAAITPETKLVWIETPTNPTQKVIDIEGCAHIVHKHGDIILVVDNTFMSPYFQRPLALGADISMYSATKYMNGHSDVVMGLVSVNCESLHNRLRFLQNSLGAVPSPIDCYLCNRGLKTLHVRMEKHFKNGMAVAQFLESNPWVEKVIYPGLPSHPQHELVKRQCTGCTGMVTFYIKGTLQHAEIFLKNLKLFTLAESLGGFESLAELPAIMTHASVLKNDRDVLGISDTLIRLSVGLEDEEDLLEDLDQALKAAHPPSGSHS

SEQ ID NO: 47091 - protein, 286 aa, Homo sapiens [sequence omitted]

SEQ ID NO: 47092 - protein, 276 aa, Homo sapiens [sequence omitted]

SEQ ID NO: 47093 - protein, 352 aa, Homo sapiens [sequence omitted]

SEQ ID NO: 47094 - protein, 291 aa, Homo sapiens [sequence omitted]

SEQ ID NO: 47095 - protein, 553 aa, Homo sapiens
MSEETVSESQFSLKTAALRVFDLPLTWYYSLSQIKFSPVAKKLFVVTAVSAISVIFLAHHFKRKRGKKKGKILPWEPEHLILEYTKRAASDKGSSCSSSRQNLTLSLSSTKDKGSQVCNYANGGLFSKYSGSAQSLASVQSVNSCHSCACGNSNSWDKADEDDIKLVNIPVTTPENLYLMGMELFEEALRRWEQALTFRNRQAEDEACGSIKLGAGDAIAEENVDDIISTEFIHKLEALLQRAYRLQEEFEATLGASDPNSLADDIDKDTDITMKGNVEDFGLRDTLSIASTDSFASAAELAEHREVRHTYSLESLCHCPFYEEAMHLVEEGKIYSRVLRTEMLECLGDSDFLAKLHCIRQAFQVILSESANRIFLAESGRKILSALIVKARKNPKKFEDVFDEMIYFLEQTDHWGSTEMELAARGVKNLNFYDVVLDFILMDSFEDLENPPTSIQNVVNNRWLNSSFKETAVASSCWSVLKQKRQQMKTESHSVAQAGVQWHDLSSLQPLPPRFKRFFCLSLSSSWDYRRLPPCPANLYIFGKDGVSSCWPG

SEQ ID NO: 47096 - protein, 261 aa, Homo sapiens
MTVGILSNSLAIAILMKAYQRFRQKSKASFLLLASGLVITDFFGHLINGAIAVFVYASDKEWIRFDQSNVLCSIFGICMVFSGLCPLLLGSVMAIERCIGVTKPIFHSTKITSKHVKMMLSGVCLFAVFIALLPILGHRDYKIQASRTWCFYNTEDIKDWEDRFYLLLFSFLGLLALGVSLLCNAITGITLLRVKFKSQQHRQGRSHHLEMVIQLLAIMCVSCICWSPFLGYRIILNGKEKYKVYEEQSDFLHRLQWPTLE

SEQ ID NO: 47097 - protein, 323 aa, Homo sapiens
MTVGILSNSLAIAILMKAYQRFRQKSKASFLLLASGLVITDFFGHLINGAIAVFVYASDKEWIRFDQSNVLCSIFGICMVFSGLCPLLLGSVMAIERCIGVTKPIFHSTKITSKHVKMMLSGVCLFAVFIALLPILGHRDYKIQASRTWCFYNTEDIKDWEDRFYLLLFSFLGLLALGVSLLCNAITGITLLRVKFKSQQHRQGRSHHLEMVIQLLAIMCVSCICWSPFLVTMANIGINGNHSLETCETTLFALRMATWNQILDPWVYILLRKAVLKNLYKLASQCCGVHVISLHIWELSSIKNSLKVAAISESPVAEKSAST

SEQ ID NO: 47098 - protein, 293 aa, Homo sapiens
MLVKHKATEQYYAMKILDKQKVVKLKQIEHTLNEKRILQAVNFPFLVRLEYAFKDNSNLYMVMEYVPGGEMFSHLRRIGRFSEPHARFYAAQIVLTFEYLHSLDLIYRDLKPENLLIDHQGYIQVTDFGFAKRVKGRTWTLCGTPEYLAPEIILSKGYNKAVDWWALGVLIYEMAAGYPPFFADQPIQIYEKIVSGKVRFPSHFSSDLKDLLRNLLQVDLTKRFGNLKNGVSDIKTHKWFATTDWIAIYQRKVEAPFIPKFRGSGDTSNFDDYEEEDIRVSITEKCAKEFGEF

SEQ ID NO: 47099 - protein, 148 aa, Homo sapiens
MNELLVLQRKNLLAQENVETQNLKLGSDMDHLQSCYSKLKEQLETSRREMIGLQERDRQLQCKNRNLHQLLKNEKDEVQKLQNIIASRATQYNHDMKRKEREYNKLKERLHQLVMNKKDKKIAMDILNYVGRADGKRGSWRTGKTEAR

SEQ ID NO: 47100 - protein, 414 aa, Homo sapiens
MKEASRQKTVALKKASKVYKQRLDHFTGAIEKLTSQIRDQEAKLSETISASNAWKSHYEKIVIEKTELEVQIETMKKQIINLLEDLKKMEDHGKNSCEEILRKVHSIEYENETLNLENTKLKTTLAALKDEVVSVENELSELQEVEKKQKTLIEMYKTQVQKLQEAAEIVKSRCENLLHKNNQITKTKNKNVEKMRGQMESHLKELERVCDSLTAAERRLHECQESLQCCKGKCADQEHTIRELQGQVDGNHNLLTKLSLEEENCLIQLKCENLQQKLEQMDAENKELEKKLANQEECLKHSNLKFKEKSAEYTALARQLEAALEEGRQKVAEEIEKMSSRESALQIKILDLETELRKKNEEQNQLVCKMNSKAQHQEVCLKEVQNSLEKSENQNESIKNYLQFLKTSYVTMFE

SEQ ID NO: 47101 - protein, 161 aa, Homo sapiens
MAAGPSGCLVPAFGLRLLLATVLQAVSAFGAEFSSEACRELGFSSNLLCSSCDLLGQFNLLQLDPDCRGCCQEEAQFETKKLYAGAILEVCGKLGRFPQVQAFVRSDKPKLFRGLQIKYVRGSDPVLKLLDDNGNIAEELSILKWNTDSVEEFLSEKLERI

SEQ ID NO: 47102 - protein, 350 aa, Homo sapiens [sequence omitted]

SEQ ID NO: 47103 - protein, 537 aa, Homo sapiens
MNKLAGKKNGFSLGSTVKSHTKGIWMWCVPHPKKPEHTLVLLDTEGLGDIEKGDNENDSWIFALAILLSSTFVYNSMGTINQQAMDQLHYVTELTDRIKANSSPGNNSVDDSADFVSFFPAFVWTLRDFTLELEVDGEPITADDYLELSLKLRKGTDKKSKSFNDPRLCIRKFFPKRKCFVFDWPAPKKYLAHLEQLKEEELNPDFIEQVAEFCSYILSHSNVKTLSGGIPVNGPRLESLVLTYVNAISSGDLPCMENAVLALAQIENSAAVEKAIAHYEQQMGQKVQLPTETLQELLDLHRDSEREAIEVFMKNSFKDVDQMFQRKLGAQLEARRDDFCKQNSKASSDCCMALLQDIFGPLEEDVKQGTFSKPGGYRLFTQKLQELKNKYYQVPRKGIQAKEVLKKYLESKEDVADALLQTDQSLSEKEKAIEVERIKAESAEAAKKMLEEIQKKNEEMMEQKEKSYQEHVKQLTEKMERDRAQLMAEQEKTLALKLQEQERLLKEGFENESKRLQKDIWDIQMRSKSLEPICNIL

SEQ ID NO: 47104 - protein, 629 aa, Homo sapiens
MPIKDQYSELLKMTSPCEKLIRRDIARTYPEHNFFKEKDSLGQEVLFNVMKAYSLVDREVGYCQGSAFIVGLLLMQMPEEEAFCVFVKLMQDYRLRELFKPSMAELGLCMYQFECMIQEHLPELFVHFQSQSFHTSMYASSWFLTIFLTTFPLPIATRIFDIFMSEGLEIVFRVGLALLQMNQAELMQLDMEGMLQHFQKVIPHQFDGVPDKLIQAAYQVKYNSKKMKKLEKEYTTIKTKEMEEQVEIKRLRTENRLLKQRIETLEKHKCSSNYNEDFVLQLEKELVQARLSEAESQCALKEMQDKVLDIEKRNNSLPDENNIARLQEELIAVKLREAEAIMGLKELRQQVKDLEEHWQRHLARTTGRWKDPPKKNAMNELQDELMTIRLREAETQAEIREIKQRMMEMETQNQINSNHLRRAEQEVISLQEKVQYLSAQNKGLLTQLSEAKRKQAEIECKNKEEVMAVRLREADSIAAVAELRQHIAELEIQKEEGKLQGQLNKSDSNQYIGELKDQIAELNHELRCLKGQRGFSGQPPFDGIHIVNHLIGDDESFHSSDEDFIDNSLQETGVGFPLHGKSGSMSLDPAVADGSESETEDSVLETRESNQVVQKERPPRRRESYSTTV

SEQ ID NO: 47105 - protein, 640 aa, Homo sapiens
MPIKDQYSELLKMTSPCEKLIRRDIARTYPEHNFFKEKDSLGQEVLFNVMKAYSLVDREVGYCQGSAFIVGLLLMQMPEEEAFCVFVKLMQDYRLRELFKPSMAELGLCMYQFECMIQEHLPELFVHFQSQSFHTSMYASSWFLTIFLTTFPLPIATRIFDIFMSEGLEIVFRVGLALLQMNQAELMQLDMEGMLQHFQKVIPHQFDGVPDKLIQAAYQVKYNSKKMKKLEKEYTTIKTKEMEEQVEIKRLRTENRLLKQRIETLEKESASLADRLIQHKCSSNYNEDFVLQLEKELVQARLSEAESQCALKEMQDKVLDIEKRNNSLPDENNIARLQEELIAVKLREAEAIMGLKELRQQVKDLEEHWQRHLARTTGRWKDPPKKNAMNELQDELMTIRLREAETQAEIREIKQRMMEMETQNQINSNHLRRAEQEVISLQEKVQYLSAQNKGLLTQLSEAKRKQAEIECKNKEEVMAVRLREADSIAAVAELRQHIAELEIQKEEGKLQGQLNKSDSNQYIGELKDQIAELNHELRCLKGQRGFSGQPPFDGIHIVNHLIGDDESFHSSDEDFIDNSLQETGVGFPLHGKSGSMSLDPAVADGSESETEDSVLETRESNQVVQKERPPRRRESYSTTV

SEQ ID NO: 47106 - protein, 450 aa, Homo sapiens
MRYAHDLKTERKMHLQEGRKAQQYLDMCWKQMDNSKKKFERECREAEKAQQSYERLDNDTNATKADVEKAKQQLNLRTHMADENKNEYAAQLQNFNGEQHKHFYVVIPQIYKQLQEMDERRTIKLSECYRGFADSERKVIPIISKCLEGMILAAKSVDERRDSQMVVDSFKSGFEPPGDFPFEDYSQHIYRTISDGTISASKQESGKMDAKTTVGKAKGKLWLFGKKPKGPALEDFSHLPPEQRRKKLQQRIDELNRELQKESDQKDALNKMKDVYEKNPQMGDPGSLQPKLAETMNNIDRLRMEIHKNEAWLSEVEGKTGGRGDRRHSSDINHLVTQGRESPEGSYTDDANQEVRGPPQQHGHHNEFDDEFEDDDPLPAIGHCKAIYPFDGHNEGTLAMKEGEVLYIIEEDKGDGWTRARRQNGEEGYVPTSYIDVTLEKNSKGAVTYI

SEQ ID NO: 47107 - protein, 446 aa, Homo sapiens
MRYAHDLKTERKMHLQEGRKAQQYLDMCWKQMDNSKKKFERECREAEKAQQSYERLDNDTNATKADVEKAKQQLNLRTHMADENKNEYAAQLQNFNGEQHKHFYVVIPQIYKQLQEMDERRTIKLSECYRGFADSERKVIPIISKCLEGMILAAKSVDERRDSQMVVDSFKSGFEPPGDFPFEDYSQHIYRTISDGTISASKQESGKMDAKTTVGKAKGKLWLFGKKPKGPALEDFSHLPPEQRRKKLQQRIDELNRELQKESDQKDALNKMKDVYEKNPQMGDPGSLQPKLAETMNNIDRLRMEIHKNEAWLSEVEGKTGGRGDRRHSSDINHLVTQGRESPEGSYTDDANQEVRGPPQQHGHHNEFDDEFEDDDPLPAIGHCKAIYPFDGHNEGTLAMKEGEVLYIIEEDKGDGWTRARRQNGEEGYVPTSYIDVTLEKNSKGS

SEQ ID NO: 47108 - protein, 84 aa, Homo sapiens
MDVTPRESLSILVVAGSGGHTTEILRLLGSLSNAYSPRHYVIADTDEMSANKINSFELDRADRDPSNMRRGLTVCPGWGAVVQS

SEQ ID NO: 47109 - protein, 151 aa, Homo sapiens
MDVDIPLELVFHLPVNYPSCLPGISINSEQLTRAQCVTVKENLLEQAESLLSEPMVHELVLWIQQNLRHILSQPETGSGSEKCTFSTSTTMDDGLWITLLHLDHMRAKTKYVKIVEKWASDLRLTGRLMFMGKIILILLQGDRNNLKVPKS

SEQ ID NO: 47110 - protein, 385 aa, Homo sapiens [sequence omitted]

SEQ ID NO: 47111 - protein, 1183 aa, Homo sapiens
MNIALTTFIPHDKGPAAIEECCNWFHKRMEELNSEKHRLINYHQEQAVNCLLGNVFYERLAGHGPKLGPVTRKHPLVTRYFTFPFEEIDFSMEESMIHLPNKACFLMAHNGWVMGDDPLRNFAEPGSEVYLRRELICWGDSVKLRYGNKPEDCPYLWAHMKKYTEITATYFQGVRLDNCHSTPLHVAEYMLDAARNLQPNLYVVAELFTGSEDLDNVFVTRLGISSLIREAMSAYNSHEEGRLVYRYGGEPVGSFVQPCLRPLMPAIAHALFMDITHDNECPIVHRSAYDALPSTTIVSMACCASGSTRGYDELVPHQISVVSEERFYTKWNPEALPSNTGEVNFQSGIIAARCAISKLHQELGAKGFIQVYVDQVDEDIVAVTRHSPSIHQSVVAVSRTAFRNPKTSFYSKEVPQMCIPGKIEEVVLEARTIERNTKPYRKDENSINGTPDITVEIREHIQLNESKIVKQAGVATKGPNEYIQEIEFENLSPGSVIIFRVSLDPHAQVAVGILRNHLTQFSPHFKSGSLAVDNADPILKIPFASLASRLTLAELNQILYRCESEEKEDGGGCYDIPNWSALKYAGLQGLMSVLAEIRPKNDLGHPFCNNLRSGDWMIDYVSNRLISRSGTIAEVGKWLQAMFFYLKQIPRYLIPCYFDAILIGAYTTLLDTAWKQMSSFVQNGSTFVKHLSLGSVQLCGVGKFPSLPILSPALMDVPYRLNEITKEKEQCCVSLAAGLPHFSSGIFRCWGRDTFIALRGILLITGRYVEARNIILAFAGTLRHGLIPNLLGEGIYARYNCRDAVWWWLQCIQDYCKMVPNGLDILKCPVSRMYPTDDSAPLPAGTLDQPLFEVIQEAMQKHMQGIQFRERNAGPQIDRNMKDEGFNITAGVDEETGFVYGGNRFNCGTWMDKMGESDRARNRGIPATPRDGSAVEIVGLSKSAVRWLLELSKKNIFPYHEVTVKRHGKAIKVSYDEWNRKIQDNFEKLFHVSEDPSDLNEKHPNLVHKRGIYKDSYGASSPWCDYQLRPNFTIAMVVAPELFTTEKAWKALEIAEKKLLGPLGMKTLDPDDMVYCGIYDNALDNDNYNLAKGFNYHQGPEWLWPIGYFLRAKLYFSRLMGPETTAKTIVLVKNVLSRHYVHLERSPWKGLPELTNENAQYCPFSCETQAWSIATILETLYDL

SEQ ID NO: 47112 - protein, 475 aa, Homo sapiens [sequence omitted]

SEQ ID NO: 47113 - protein, 477 aa, Homo sapiens [sequence omitted]

SEQ ID NO: 47114 - protein, 5 aa, Homo sapiens
MNQGF

SEQ ID NO: 47115 - protein, 163 aa, Homo sapiens [sequence omitted]

SEQ ID NO: 47116 - protein, 316 aa, Homo sapiens
MIADRVRTDAYRLGILRNWAALRGKTVLDVGAGTGILSIFCAQAGARRVYAVEASAIWQQAREVVRFNGLEDRVHVLPGPVETVELPEQVDAIVSEWMGYGLLHESMLSSVLHARTKWLKEGGLLLPASAELFIAPISDQMLEWRLGFWSQVKQHYGVDMSCLEGFATRCLMGHSEIVVQGLSGEDVLARPQRFAQLELSRAGLEQELEAGVGGRFRCSCYGSAPMHGFAIWFQVTFPGGESEKPLVLSTSPFHPATHWKQALLYLNEPVQVEQDTDVSGEITLLPSRDNPRRLRVLLRYKVGDQEEKTKDFAMED

SEQ ID NO: 47117 - protein, 259 aa, Homo sapiens
MFDFEGRHPSTFWQSATWKEYPKPLQVNITLSWSKTIELTDNIVITFESGRPDQMILEKSLDYGRTWQPYQYYATDCLDAFHMDPKSVKDLSQHTVLEIICTEEYSTGYTTNSKIIHFEIKDRFAFFAGPRLRNMASLYGQLDTTKKLRDFFTVTDLRIRLLRPAVGEIFVDELHLARYFYAISDIKVRGRCKCNLHATVCVYDNSKLTCECEHNTTGPDCGKCKKNYQGRPWSPGSYLPIPKGTANTCIPSISSIGSK

SEQ ID NO: 47118 - protein, 355 aa, Homo sapiens
MFDFEGRHPSTFWQSATWKEYPKPLQVNITLSWSKTIELTDNIVITFESGRPDQMILEKSLDYGRTWQPYQYYATDCLDAFHMDPKSVKDLSQHTVLEIICTEEYSTGYTTNSKIIHFEIKDRFAFFAGPRLRNMASLYGQLDTTKKLRDFFTVTDLRIRLLRPAVGEIFVDELHLARYFYAISDIKVRGRCKCNLHATVCVYDNSKLTCECEHNTTGPDCGKCKKNYQGRPWSPGSYLPIPKGTANTCIPSISSIGNPPKFNRIWPNISSLEVSNPKQANVCDNELLHCQNGGTCHNNVRCLCPAAYTGILCEKLRCEEAGSCGSDSGQGAPPHGSPALLLLTTLLGTASPLVF

SEQ ID NO: 47119 - protein, 375 aa, Homo sapiens
MFDFEGRHPSTFWQSATWKEYPKPLQVNITLSWSKTIELTDNIVITFESGRPDQMILEKSLDYGRTWQPYQYYATDCLDAFHMDPKSVKDLSQHTVLEIICTEEYSTGYTTNSKIIHFEIKDRFAFFAGPRLRNMASLYGQLDTTKKLRDFFTVTDLRIRLLRPAVGEIFVDELHLARYFYAISDIKVRGRCKCNLHATVCVYDNSKLTCECEHNTTGPDCGKCKKNYQGRPWSPGSYLPIPKGTANTCIPSISSIGNPPKFNRIWPNISSLEVSNPKQVAPKLALSTVSSVQVANHKRANVCDNELLHCQNGGTCHNNVRCLCPAAYTGILCEKLRCEEAGSCGSDSGQGAPPHGSPALLLLTTLLGTASPLVF

SEQ ID NO: 47120 - protein, 333 aa, Homo sapiens
MFDFEGRHPSTFWQSATWKEYPKPLQVNITLSWSKTIELTDNIVITFESGRPDQMILEKSLDYGRTWQPYQYYATDCLDAFHMDPKSVKDLSQHTVLEIICTEEYSTGYTTNSKIIHFEIKDRFAFFAGPRLRNMASLYGQLDTTKKLRDFFTVTDLRIRLLRPAVGEIFVDELHLARYFYAISDIKVRGRCKCNLHATVCVYDNSKLTCECEHNTTGPDCGKCKKNYQGRPWSPGSYLPIPKGTANTCIPSISSIGTNVCDNELLHCQNGGTCHNNVRCLCPAAYTGILCEKLRCEEAGSCGSDSGQGAPPHGSPALLLLTTLLGTASPLVF

SEQ ID NO: 47121 - protein, 491 aa, Homo sapiens
MNLNPMILTNILSSPYFKVQLYELKTYHEVVDEIYFKVTHVEPWEKGSRKTAGQTGMCGGVRGVGTGGIVSTAFCLLYKLFTLKLTRKQVMGLITHTDSPYIRALGFMYIRYTQPPTDLWDWFESFLDDEEDLDVKAGGGCVMTIGEMLRSFLTKLEWFSTLFPRIPVPVQKNIDQQIKTRPRKIKKDGKEGAEEIDRHVERRRSRSPRRSLSPRRSPRRSRSRSHHREGHGSSSFDRELEREKERQRLEREAKEREKERRRSRSIDRGLERRRSRSRERHRSRSRSRDRKGDRRDRDREREKENERGRRRDRDYDKERGNEREKERERSRERSKEQRSRGEVEEKKHKEDKDDRRHRDDKRDSKKEKKHSRSRSRERKHRSRSRSRNAGKRSRSRSKEKSSKHKNESKEKSNKRSRSGSQGRTDSVEKSKKREHSPSKEKSRKRSRSKERSHKRDHSDSKDQSDKHDRRRSQSIEQESQEKQHKNKDETV

SEQ ID NO: 47122 - protein, 57 aa, Homo sapiens
MTHKAMSIGRQGRVQVEDIVFLIRKDPRKFARVKDLLTMNEELKRARKAFDEANYGS

SEQ ID NO: 47123 - protein, 219 aa, Homo sapiens [sequence omitted]

SEQ ID NO: 47124 - protein, 513 aa, Homo sapiens
MIGSGHLQSLQRLIDSQMETSCQITFEFVDQEQLKDPVCYLKKAFLLVQDIMEDTMRFRDNTPNAIAIVQLQELSLRLKSCFTKDYEEHDKACVRTFYETPLQLLEKVKNVFNETKNLLDKDWNIFSKNCNNSFAECSSQDVVTKPDCNCLYPKAIPSSDPASVSPHQPLAPSMAPVAGLTWEDSEGTEGSSLLPGEQPLHTVDPGSAKQRPPRSTCQSFEPPETPVVKDSTIGGSPQPRPSVGAFNPGMEDILDSAMGTNWVPEEASGEASEIPVPQGTELSPSRPGGGSMQTEPARPSNFLSASSPLPASAKGQQPADVTGTALPRVGPVRPTGQDWNHTPQKTDHPSALLRDPPEPGSPRISSLRPQGLSNPSTLSAQPQLSRSHSSGSVLPLGELEGRRSTRDRRSPAEPEGGPASEGAARPLPRFNSVPLTDTGHERQSEGSFSPQLQESVFHLLVPSVILVLLAVGGLLFYRWRRRSHQEPQRADSPLEQPEGSPLTQDDRQVELPV

SEQ ID NO: 47125 - protein, 215 aa, Homo sapiens
MIGSGHLQSLQRLIDSQMETSCQITFEFVDQEQLKDPVCYLKKAFLLVQDIMEDTMRFRDNTPNAIAIVQLQELSLRLKSCFTKDYEEHDKACVRTFYETPLQLLEKVKNVFNETKNLLDKDWNIFSKNCNNSFAECSSQGHERQSEGSFSPQLQESVFHLLVPSVILVLLAVGGLLFYRWRRRSHQEPQRADSPLEQPEGSPLTQDDRQVELPV

SEQ ID NO: 47126 - protein, 500 aa, Homo sapiens
MATVTKAPKKQIQFADDMQEFTKFPTKTGRRSLSRSISQSSTDSYSSAASYTDSSDDEVSPREKQQTNSKGSSNFCVKNIKQAEFGRREIEIAEQDMSALISLRKRAQGEKPLAGAKIVGCTHITAQTAVLIETLCALGAQCRWSACNIYSTQNEVAAALAEAGVAVFAWKGESEDDFWWCIDRCVNMDGWQANMILDDGGDLTHWVYKKYPNVFKKIRGIVEESVTGVHRLYQLSKAGKLCVPAMNVNDSVTKQKFDNLYCCRESILDGLKRTTDVMFGGKQVVVCGYGEVGKGCCAALKALGAIVYITEIDPICALQACMDGFRVVKLNEVIRQVDVVITCTGNKNVVTREHLDRMKNSCIVCNMGHSNTEIDVTSLRTPELTWERVRSQVDHVIWPDGKRVVLLAEGRLLNLSCSTVPTFVLSITATTQALALIELYNAPEGRYKQDVYLLPKKMDEYVASLHLPSFDAHLTELTDDQAKYLGLNKNGPFKPNYYRY

SEQ ID NO: 47127 - protein, 392 aa, Homo sapiens [sequence omitted]

SEQ ID NO: 47128 - protein, 406 aa, Homo sapiens
MLKEPALTLGKQIHTLYLDNTNCNPALVLPSRQEAAHQIVQLIRKHPQHNIKIGLYSLGKESLLEQLALEFQTWVVLSPRRLELVQLLGLADVFTVEEKAGRIHAVDHMEICHSNMLRWNQTHPTIAILPTSRKIHSSHPDIHVIPYSDHSSYSELRAFVAALKPCQVVPIVSRRPCGGFQDSLSPRISVPLIPDSVQQYMSSSSRKPSLLWLLERRLKRPRTQGVVFESPEESADQSQADRDSKKAKKEKLSPWPADLEKQPSHHPLRIKKQLFPDLYSKEWNKAVPFCESQKRVTMLTAPLGFSVHLRSTDEEFISQKTREEIGLGSPLVPMGDDDGGPEATGNQSAWMGHGSPLSHSSKGTPLLATEFRGLALKYLLTPVNFFQAGYSSRRFDQQVEKYHKPC

SEQ ID NO: 47129 - protein, 1065 aa, Homo sapiens
MLQNRTVVGAAATTTTVTTKSSSSSGEGDYQLVQHEILCSMTNSYEVLEFLGRGTFGQVAKCWKRSTKEIVAIKILKNHPSYARQGQIEVSILSRLSSENADEYNFVRSYECFQHKNHTCLVFEMLEQNLYDFLKQNKFSPLPLKYIRPILQQVATALMKLKSLGLIHADLKPENIMLVDPVRQPYRVKVIDFGSASHVSKAVCSTYLQSRYYRAPEIILGLPFCEAIDMWSLGCVIAELFLGWPLYPGASEYDQIRYISQTQGLPAEYLLSAGTKTTRFFNRDPNLGYPLWRLKTPEEHELETGIKSKEARKYIFNCLDDMAQVNMSTDLEGTDMLAEKADRREYIDLLKKMLTIDADKRITPLKTLNHQFVTMTHLLDFPHSNHVKSCFQNMEICKRRVHMYDTVSQIKSPFTTHVAPNTSTNLTMSFSNQLNTVHNQASVLASSSTAAAATLSLANSDVSLLNYQSALYPSSAAPVPGVAQQGVSLQPGTTQICTQTDPFQQTFIVCPPAFQTGLQATTKHSGFPVRMDNAVPIVPQAPAAQPLQIQSGVLTQGSCTPLMVATLHPQVATITPQYAVPFTLSCAAGRPALVEQTAAVLQAWPGGTQQILLPSTWQQLPGVALHNSVQPTAMIPEAMGSGQQLADWRNAHSHGNQYSTIMQQPSLLTNHVTLATAQPLNVGVAHVVRQQQSSSLPSKKNKQSAPVSSKSSLDVLPSQVYSLVGSSPLRTTSSYNSLVPVQDQHQPIIIPDTPSPPVSVITIRSDTDEEEDNKYKPSSSGLKPRSNVISYVTVNDSPDSDSSLSSPYSTDTLSALRGNSGSVLEGPGRVVADGTGTRTIIVPPLKTQLGDCTVATQASGLLSNKTKPVASVSGQSSGCCITPTGYRAQRGGTSAAQPLNLSQNQQSSAAPTSQERSSNPAPRRQQAFVAPLSQAPYTFQHGSPLHSTGHPHLAPAPAHLPSQAHLYTYAAPTSAAALGSTSSIAHLFSPQGSSRHAAAYTTHPSTLVHQVPVSVGPSLLTSASVAPAQYQHQFATQSYIGSSRGSTIYTGYPLSPTKISQYSYL

SEQ ID NO: 47130 - protein, 930 aa, Homo sapiens
MLQNRTVVGAAATTTTVTTKSSSSSGEGDYQLVQHEILCSMTNSYEVLEFLGRGTFGQVAKCWKRSTKEIVAIKILKNHPSYARQGQIEVSILSRLSSENADEYNFVRSYECFQHKNHTCLVFEMLEQNLYDFLKQNKFSPLPLKYIRPILQQVATALMKLKSLGLIHADLKPENIMLVDPVRQPYRVKVIDFGSASHVSKAVCSTYLQSRYYRAPEIILGLPFCEAIDMWSLGCVIAELFLGWPLYPGASEYDQIRYISQTQGLPAEYLLSAGTKTTRFFNRDPNLGYPLWRLKTPEEHELETGIKSKEARKYIFNCLDDMAQVNMSTDLEGTDMLAEKADRREYIDLLKKMLTIDADKRITPLKTLNHQFVTMTHLLDFPHSNHVKSCFQNMEICKRRVHMYDTVSQIKSPFTTHVAPNTSTNLTMSFSNQLNTVHNQASVLASSSTAAAATLSLANSDVSLLNYQSALYPSSAAPVPGVAQQGVSLQPGTTQICTQTDPFQQTFIVCPPAFQTGLQATTKHSGFPVRMDNAVPIVPQAPAAQPLQIQSGVLTQGSCTPLMVATLHPQVATITPQYAVPFTLSCAAGRPALVEQTAAVLQAWPGGTQQILLPSTWQQLPGVALHNSVQPTAMIPEAMGSGQQLADWRNAHSHGNQYSTIMQQPSLLTNHVTLATAQPLNVGVAHVVRQQQSSSLPSKKNKQSAPVSSKSSLDVLPSQVYSLVGSSPLRTTSSYNSLVPVQDQHQPIIIPDTPSPPVSVITIRSDTDEEEDNKYKPSSSGLKPRSNVISYVTVNDSPDSDSSLSSPYSTDTLSALRGNSGSVLEGPGRVVADGTGTRTIIVPPLKTQLGDCTVATQASGLLSNKTKPVASVSGQSSGCCITPTGYRAQRGGTSAAQPLNLSQVSAMGYCLLFGPCTVVTFWRTLLLAGC

SEQ ID NO: 47131 - protein, 142 aa, Homo sapiens
MKRYELPAPSSGQKNDITAWQECVNNSMAQLEHQAVRIENLELMSQHGCNAWKVYNENLVHMIEHAQKELQKLRKHIQDLNWQRKNMQLTAGSKLREMESNWVSLVSKNYEIERTIVQLENEIYQIKQQHGEANKENIRQDF

SEQ ID NO: 47132 - protein, 426 aa, Homo sapiens
MEDSVGLDCKRYLGLTVASFLGLLVFLTPIAFILLPPILWRDELEPCGTICEGLFISMAFKLLILLIGTWALFFRKRRADMPRVFVFRALLLVLIFLFVVSYWLFYGVRILDSRDRNYQGIVQYAVSLVDALLFIHYLAIVLLELRQLQPMFTLQVVRSTDGESRFYSLGHLSIQRAALVVLENYYKDFTIYNPNLLTASKFRAAKHMAGLKVYNVDGPSNNATGQSRAMIAAAARRRDSSHNELYYEEAEHERRVKKRKARLVVAVEEAFIHIQRLQAEEQQKAPGEVMDPREAAQAIFPSMARALQKYLRITRQQNYHSMESILQHLAFCITNGMTPKAFLERYLSAGPTLQYDKDRWLSTQWRLVSDEAVTNGLRDGIVFVLKCLDFSLVVNVKKIPFIILSEEFIDPKSHKFVLRLQSETSV

SEQ ID NO: 47133 - protein, 171 aa, Homo sapiens
MFALGADGSRADKAGHYLELGAEIARTCHESYDRTALKLGPESFKFDGAVEAVAVRQAEKYYILRPEVIETYWYLWRFTHDPRYRQWGWEAALAIEKYCRVNGGFSGVKDVYSSTPTHDDVQQSFFLAETLKYLYLLFSGDDLLPLDHWVFNTEAHPLPVLHLANTTLSES

SEQ ID NO: 47134 - protein, 526 aa, Homo sapiens
MGSDFEDSEDREGDPEEREMGSNPHDTNKREGHPEPEMGSNPQDSRHREAVPDICTEGQLSEEEGVSVRGEEDDQSGVADMAMFPGLSESDSISRSLREDDDESAGENRLEEEEEQPAPPVLPWRRHLSLGSRHRGDKPAHRRFHRLHHPMAVDLGELDSLVASIMDAPTICPDCGESFSPGAAFLQHQRIHRLAEAAAAASLEPFGLAGECDAMVGMMGVGVAGGFGAGPPLARPPREKPFRCGECGKGFSRNTYLTNHLRLHTGERPNLCADCGKSFSWRADLLKHRRLHTGEKPYPCPECGEAFSLSSHLLSHRRAHAAASGAGAAALRPFACGECGKGFVRRSHLANHQRIHTGEKPHGCGECGKRFSWRSDLVKHQRVHTGEKPYMCSECGETFSVSSHLFTHKRTHSGERPYVCRECGKGFGRNSHLVNHLRVHTGEKPFRCGQCEKRFSDFSTLTQHQRTHTGEKPYTCIECGKSFIQSSHLIRHRRIHTGNKPHKCAGCGKGFRYKTHLAQHQKLHLC

SEQ ID NO: 47135 - protein, 320 aa, Homo sapiens
MEKEATEKLRKLLASQSSGLRGLWDCLPADLVGERSAQSKAAESLEELRACISTLVDRHREAQQVLARLQEENQQLRGSLSPCREPGTSLKAPASPQVAALEQDLGKLEEELRAVQATMSGKSQEIGKLKQLLYQATEEVAELRAREAASLRQHEKTRGSLVAQAQAWGQELKALLEKYNTACREVGRLREAVAEERRRSGDLAAQAAEQERQASEMRGRSEQFEKTAELLKEKMEHLIGACRDKEAKIKELLKKLEQLSEEVLAIRGENARLALQLQDSQKNHEEIISTYRNHLLNAARGYMEHEVYNILLQILSMEEE

SEQ ID NO: 47136 - protein, 1046 aa, Homo sapiens
MACAPLWSRACGSSVFSSGICARVDASFQPQGSLAPTAQRCPTYMDVVIVLDGSNSIYPWSEVQTFLRRLVGKLFIDPEQIQVGLVQYGESPVHEWSLGDFRTKEEVVRAAKNLSRREGRETKTAQAIMVACTEGFSQSHGGRPEAARLLVVVTDGESHDGEELPAALKACEAGRVTRYGIAVLGHYLRRQRDPSSFLREIRTIASDPDERFFFNVTDEAALTDIVDALGDRIFGLEGSHAENESSFGLEMSQIGFSTHRLKDGILFGMVGAYDWGGSVLWLEGGHRLFPPRMALEDEFPPALQNHAAYLGYSVSSMLLRGGRRLFLSGAPRFRHRGKVIAFQLKKDGAVRVAQSLQGEQIGSYFGSELCPLDTDRDGTTDVLLVAAPMFLGPQNKETGRVYVYLVGQQSLLTLQGTLQPEPPQDARFGFAMGALPDLNQDGFADVAVGAPLEDGHQGALYLYHGTQSGVRPHPAQRIAAASMPHALSYFGRSVDGRLDLDGDDLVDVAVGAQGAAILLSSRPIVHLTPSLEVTPQAISVVQRDCRRRGQEAVCLTAALCFQVTSRTPGRWDHQFYMRFTASLDEWTAGARAAFDGSGQRLSPRRLRLSVGNVTCEQLHFHVLDTSDYLRPVALTVTFALDNTTKPGPVLNEGSPTSIQKLVPFSKDCGPDNECVTDLVLQVNMDIRGSRKAPFVVRGGRRKVLVSTTLENRKENAYNTSLSLIFSRNLHLASLTPQRESPIKVECAAPSAHARLCSVGHPVFQTGAKVTFLLEFEFSCSSLLSQVFVKLTASSDSLERNGTLQDNTAQTSAYIQYEPHLLFSSESTLHRYEVHPYGTLPVGPGPEFKTTLRVQNLGCYVVSGLIISALLPAVAHGGNYFLSLSQVITNNASCIVQNLTEPPGPPVHPEELQHTNRLNGSNTQCQVVRCHLGQLAKGTEVSVGLLRLVHNEFFRRAKFKSLTVVSTFELGTEEGSVLQLTEASRWSESLLEVVQTRPILISLWILIGSVLGGLLLLALLVFCLWKLGFFAHKKIPEEEKREEKLEQ

SEQ ID NO: 47137 - protein, 125 aa, Homo sapiens
MREDYDSVEQDGDEPGPQRSVEGWILFVTGVHEEATEEDIHDKFAEYGEIKNIHLNLDRRTGYLKGYTLVEYETYKEAQAAMEGLNGQDLMGQPISVDWCFVRGPPKGKRRGGRRRSRSPDRRRR

SEQ ID NO: 47138 - protein, 389 aa, Homo sapiens [sequence omitted]

SEQ ID NO: 47139 - protein, 1344 aa, Homo sapiens
MGLKNGAGNGAKGKGKRERSISADSFDQRDPGTPNDDSDIKECNSADHIKSQDSQHTPHSMTPSNATAPRSSTPSHGQTTATEPTPAQKTPAKVVYVFSTEMANKAAEAVLKGQVETIVSFHIQNISNNKTERSTAPLNTQISALRNDPKPLPQQPPAPANQDQNSSQNTRLQPTPPIPAPAPKPAAPPRPLDRESPGVENKLIPSVGSPASSTPLPPDGTGPNSTPNNRAVTPVSQGSNSSSADPKAPPPPPVSSGEPPTLGENPDGLSQEQLEHRERSLQTLRDIQRMLFPDEKEFTGAQSGGPQQNPGVLDGPQKKPEGPIQAMMAQSQSLGKGPGPRTDVGAPFGPQGHRDVPFSPDEMVPPSMNSQSGTIGPDHLDHMTPEQIAWLKLQQEFYEEKRRKQEQVVVQQCSLQDMMVHQHGPRGVVRGPPPPYQMTPSEGWAPGGTEPFSDGINMPHSLPPRGMAPHPNMPGSQMRLPGFAGMINSEMEGPNVPNPASRPGLSGVSWPDDVPKIPDGRNFPPGQGIFSGPGRGERFPNPQGLSEEMFQQQLAEKQLGLPPGMAMEGIRPSMEMNRMIPGSQRHMEPGNNPIFPRIPVEGPLSPSRGDFPKGIPPQMGPGRELEFGMVPSGMKGDVNLNVNMGSNSQMIPQKMREAGAGPEEMLKLRPGGSDMLPAQQKMVPLPFGEHPQQEYGMGPRPFLPMSQGPGSNSGLRNLREPIGPDQRTNSRLSHMPPLPLNPSSNPTSLNTAPPVQRGLGRKPLDISVAGSQVHSPGINPLKSPTMHQVQSPMLGSPSGNLKSPQTPSQLAGMLAGPAAAASIKSPPVLGSAAASPVHLKSPSLPAPSPGWTSSPKPPLQSPGIPPNHKAPLTMASPAMLGNVESGGPPPPTASQPASVNIPGSLPSSTPYTMPPEPTLSQNPLSIMMSRMSKFAMPSSTPLYHDAIKTVASSDDDSPPARSPNLPSMNNMPGMGINTQNPRISGPNPVVPMPTLSPMGMTQPLSHSNQMPSPNAVGPNIPPHGVPMGPGLMSHNPIMGHGSQEPPMVPQGRMGFPQGFPPVQSPPQQVPFPHNGPSGGQGSFPGGMGFPGEGPLGRPSNLPQSSADAALCKPGGPGGPDSFTVLGNSMPSVFTDPDLQEVIRPGATGIPEFDLSRIIPSEKPSQTLQYFPRGEVPGRKQPQGPGPGFSHMQGMMGEQAPRMGLALPGMGGPGPVGTPDIPLGTAPSMPGHNPMRPPAFLQQGMMGPHHRMMSPAQSTMPGQPTLMSNPAAAVGMIPGKDRGPAGLYTHPGPVGSPGMMMSMQGMMGPQQNIMIPPQMRPRGMAADVGMGGFSQGPGNPGNMMF

SEQ ID NO: 47140 - protein, 937 aa, Homo sapiens
MQQKYEASREDIYKRNIELKVEVESLKRELQDKKQHLDKTWADVENLNSQNEAELRRQFEERQQETEHVYELLENKIQLLQEESRLAKNEAARMAALVEAEKECNLELSEKLKGVTKNWEDVPGDQVKPDQYTEALAQRDKRIEELNQSLAAQERLVEQLSREKQQLLHLLEEPTSMEVQPMTEELLKQQKLNSHETTITQQSVSDSHLAELQEKIQQTEATNKILQEKLNEMSYELKCAQESSQKQDGTIQNLKETLKSRERETEELYQVIEGQNDTMAKLREMLHQSQLGQLHSSEGTSPAQQQVALLDLQSALFCSQLEIQKLQRVVRQKERQLADAKQCVQFVEAAAHESEQQKEASWKHNQELRKALQQLQEELQNKSQQLRAWEAEKYNEIRTQEQNIQHLNHSLSHKEQLLQEFRELLQYRDNSDKTLEANEMLLEKLRQRIHDKAVALERAIDEKFSALEEKEKELRQLRLAVRERDHDLERLRDVLSSNEATMQSMESLLRAKGLEVEQLSTTCQNLQWLKEEMETKFSRWQKEQESIIQQLQTSLHDRNKEVEDLSATLLCKLGPGQSEIAEELCQRLQRKERMLQDLLSDRNKQVLEHEMEIQGLLQSVSTREQESQAAAEKLVQALMERNSELQALRQYLGGRDSLMSQAPISNQQAEVTPTGRLGKQTDQGSMQIPSRDDSTSLTAKEDVSIPRSTLGDLDTVAGLEKELSNAKEELELMAKKERESQMELSALQSMMAVQEEELQVQAADMESLTRNIQIKEDLIKDLQMQLVDPEDIPAMERLTQEVLLLREKVASVESQGQEISGNRRQQLLLMLEGLVDERSRLNEALQAERQLYSSLVKFHAHPESSERDRTLQVELEGAQVLRSRLEEVLGRSLERLNRLETLAAIGGAAAGDDTEDTSTEFTDSIEEEAAHHSHQQL

SEQ ID NO: 47141 - protein, 684 aa, Homo sapiens
MLVALEQAGRLNWWVSVDPTSQRLLPLATTGDGNCLLHAASLGMWGFHDRDLMLRKALYALMEKGVEKEALKRRWRWQQTQQNKESGLVYTEDEWQKEWNELIKLASSEPRMHLGTNGANCGGVESSEEPVYESLEEFHVFVLAHVLRRPIVVVADTMLRDSGGEAFAPIPFGGIYLPLEVPASQCHRSPLVLAYDQAHFSALVSMEQKENTKEQAVIPLTDSEYKLLPLHFAVDPGKGWEWGKDDSDNVRLASVILSLEVKLHLLHSYMNVKWIPLSSDAQAPLAQPESPTASAGDEPRSTPESGDSDKESVGSSSTSNEGGRRKEKSKRDREKDKKRADSVANKLGSFGKTLGSKLKKNMGGLMHSKGSKPGGVGTGLGGSSGTETLEKKKKNSLKSWKGGKEEAAGDGPVSEKPPAESVGNGGSKYSQEVMQSLSILRTAMQGEGKFIFVGTLKMGHRHQYQEEMIQRYLSDAEERFLAEQKQKEAERKIMNGGIGGGPPPAKKPEPDAREEQPTGPPAESRAMAFSTGYPGDFTIPRPSGGGVHCQEPRRQLAGGPCVGGLPPYATFPRQCPPGRPYPHQDSIPSLEPGSHSKDGLHRGALLPPPYRVADSYSNGYREPPEPDGWAGGLRGLPPTQTKCKQPNCSFYGHPETNNFCSCCYREELRRREREPDGELLVHRF

SEQ ID NO: 47142 - protein, 408 aa, Homo sapiens
MKKNNSAKRGPQDGNQQPAPPEKVGWVRKFCGKGIFREIWKNRYVVLKGDQLYISEKEVKDEKNIQEVFDLSDYEKCEELRKSKSRSKKNHSKFTLAHSKQPGNTAPNLIFLAVSPEEKESWINALNSAITRAKNRILDEVTVEEDSYLAHPTRDRAKIQHSRRPPTRGHLMAVASTSTSDGMLTLDLIQEEDPSPEEPTSCAESFRVDLDKSVAQLAGSRRRADSDRIQPSADRASSLSRPWEKTDKGATYTPQAPKKLTPTEKGRCASLEEILSQRDAASARTLQLRAEEPPTPALPNPGQLSRIQDLVARKLEETQELLAEVQGLGDGKRKAKDPPRSPPDSESEQLLLETERLLGEASSNWSQAKRVLQEVRELRDLYRQMDLQTPDSHLRQTTPHSQYRKSLM

SEQ ID NO: 47143 - protein, 780 aa, Homo sapiens
MTSDVPSLGPAIASGNSGPGIQGGGAIVQRAIKRRPGLDFDDDGEGNSKFLRCDDDQMSNDKERFARSDDEQSSADKERLARENHSEIERRRRNKMTAYITELSDMVPTCSALARKPDKLTILRMAVSHMKSLRGTGNTSTDGSYKPSFLTDQELKHLILEAADGFLFIVSCETGRVVYVSDSVTPVLNQPQSEWFGSTLYDQVHPDDVDKLREQLSTSENALTGRILDLKTGTVKKEGQQSSMRMCMGSRRSFICRMRCGSSSVDPVSVNRLSFVRNRCRNGLGSVKDGEPHFVVVHCTGYIKAWPPAGVSLPDDDPEAGQGSKFCLVAIGRLQVTSSPNCTDMSNVCQPTEFISRHNIEGIFTFVDHRCVATVGYQPQELLGKNIVEFCHPEDQQLLRDSFQQVVKLKGQVLSVMFRFRSKNQEWLWMRTSSFTFQNPYSDEIEYIICTNTNVKNSSQEPRPTLSNTIQRPQLGPTANLPLEMGSGQLAPRQQQQQTELDMVPGRDGLASYNHSQVVQPVTTTGPEHSKPLEKSDGLFAQDRDPRFSEIYHNINADQSKGISSSTVPATQQLFSQGNTFPPTPRPAENFRNSGLAPPVTIVQPSASAGQMLAQISRHSNPTQGATPTWTPTTRSGFSAQQVATQATAKTRTSQFGVGSFQTPSSFSSMSLPGAPTASPGAAAYPSLTNRGSNFAPETGQTAGQFQTRTAEGVGVWPQWQGQQPHHRSSSSEQHVQQPPAQQPGQPEVFQEMLSMLGDQSNSYNNEEFPDLTMFPPFSE

SEQ ID NO: 47144 - protein, 51 aa, Homo sapiens
MIGEPMNFVHLTHIGSGEMGAGDGLAMTGAVQEQMRSKGNRDRPWSNSRGL

SEQ ID NO: 47145 - protein, 74 aa, Homo sapiens [sequence omitted]

SEQ ID NO: 47146 - protein, 251 aa, Homo sapiens
MQNQVNVNPERANPVTDPVSMAAPFIFTSGEVVNLASLISSTNTKTTSANTEEIIEGNSVDSSIQQVMGSGGQRVITIVTDGVPLGNIQTSIPTGGIGQPFIVTVQDGQQVLTVPAGKVAEETVIKEEEEEKLPLTKKPRIGEKTNSVEESKEGNERELLQQQLQEANRRAQEYRHQLLKKEQEAEQYRLKLEAIARQQPNGVDFTMVEEVAEVDAVVVTEGELEERETKVTGSAGTTEPHTRVSMATVSS

SEQ ID NO: 47147 - protein, 289 aa, Homo sapiens
MQNQVNVNPERANPVTDPVSMAAPFIFTSGEVVNLASLISSTNTKTTSGDPHASTVQFSNSTTSVLATLAALAEASVPLSNSHRATANTEEIIEGNSVDSSIQQVMGSGGQRVITIVTDGVPLGNIQTSIPTGGIGQPFIVTVQDGQQVLTVPAGKVAEETVIKEEEEEKLPLTKKPRIGEKTNSVEESKEGNERELLQQQLQEANRRAQEYRHQLLKKEQEAEQYRLKLEAIARQQPNGVDFTMVEEVAEVDAVVVTEGELEERETKVTGSAGTTEPHTRVSMATVSS

SEQ ID NO: 47148 - protein, 232 aa, Homo sapiens [sequence omitted]

SEQ ID NO: 47149 - protein, 374 aa, Homo sapiens
MVCVDNSEYMRNGDFLPTRLQAQQDAVNIVCHSKTRSNPENNVGLITLANDCEVLTTLTPDTGRILSKLHTVQPKGKITFCTGIRVAHLALKHRQGKNHKMRIIAFVGSPVEDNEKDLVKLAKRLKKEKVNVDIINFGEEEVNTEKLTAFVNTLNGKDGTGSHLVTVPPGPSLADALISSPILAGEGGAMLGLGASDFEFGVDPSADPELALALRVSMEEQRQRQEEEARRAAAASAAEAGIATTGTEGERDSDDALLKMTISQQEFGRTGLPDLSSMTEEEQIAYAMQMSLQGAEFGQAESADIDASSAMDTSEPAKEEDDYDVMQDPEFLQSVLENLPGVDPNNEAIRNAMGSLASQATKDGKKDKKEEDKK

SEQ ID NO: 47150 - protein, 698 aa, Homo sapiens [sequence omitted]

SEQ ID NO: 47151 - protein, 85 aa, Homo sapiens
MDPASALYRGPITRTQNPMVTGTSVLGVKFEGGVVIAADMLGSYGSLARFRNISRIMRVNNSTMLGASGDYADFQYLKQVLGQMD

SEQ ID NO: 47152 - protein, 20 aa, Homo sapiens
MNPLWNTMVIGGYADGERFI

SEQ ID NO: 47153 - protein, 1279 aa, Homo sapiens
MQNANHVTSSPVASQPIFITTQGFPVRNVRPVQNAMNQVGIVLNVQQGQTVRPITLVPAPGTQFVKPTVGVPQVFSQMTPVRPGSTMPVRPTTNTFTTVIPATLTIRSTVPQSQSQQTKSTPSTSTTPTATQPTSLGQLAVQSPGQSNQTTNPKLAPSFPSPPAVSIASFVTVKRPGVTGENSNEVAKLVNTLNTIPSLGQSPGPVVVSNNSSAHGSQRTSGPESSMKVTSSIPVFDLQDGGRKICPRCNAQFRVTEALRGHMCYCCPEMVEYQKKGKSLDSEPSVPSAAKPPSPEKTAPVASTPSSTPIPALSPPTKVPEPNENVGDAVQTKLIMLVDDFYYGRDGGKVAQLTNFPKVATSFRCPHCTKRLKNNIRFMNHMKHHVELDQQNGEVDGHTICQHCYRQFSTPFQLQCHLENVHSPYESTTKCKICEWAFESEPLFLQHMKDTHKPGEMPYVCQVCQYRSSLYSEVDVHFRMIHEDTRHLLCPYCLKVFKNGNAFQQHYMRHQKRNVYHCNKCRLQFLFAKDKIEHKLQHHKTFRKPKQLEGLKPGTKVTIRASRGQPRTVPVSSNDTPPSALQEAAPLTSSMDPLPVFLYPPVQRSIQKRAVRKMSVMGRQTCLECSFEIPDFPNHFPTYVHCSLCRYSTCCSRAYANHMINNHVPRKSPKYLALFKNSVSGIKLACTSCTFVTSVGDAMAKHLVFNPSHRSSSILPRGLTWIAHSRHGQTRDRVHDRNVKNMYPPPSFPTNKAATVKSAGATPAEPEELLTPLAPALPSPASTATPPPTPTHPQALALPPLATEGAECLNVDDQDEGSPVTQEPELASGGGGSGGVGKKEQLSVKKLRVVLFALCCNTEQAAEHFRNPQRRIRRWLRRFQASQGENLEGKYLSFEAEEKLAEWVLTQREQQLPVNEETLFQKATKIGRSLEGGFKISYEWAVRFMLRHHLTPHARRAVAHTLPKDVAENAGLFIDFVQRQIHNQDLPLSMIVAIDEISLFLDTEVLSSDDRKENALQTVGTGEPWCDVVLAILADGTVLPTLVFYRGQMDQPANMPDSILLEAKESGYSDDEIMELWSTRVWQKHTACQRSKGMLVMDCHRTHLSEEVLAMLSASSTLPAVVPAGCSSKIQPLDVCIKRTVKNFLHKKWKEQAREMADTACDSDVLLQLVLVWLGEVLGVIGDCPELVQRSFLVASVLPGPDGNINSPTRNADMQEELIASLEEQLKLSGEHSESSTPRPRSSPEETIEPESLHQLFEGESETESFYGFEEADLDLMEI

SEQ ID NO: 47154 - protein, 93 aa, Homo sapiens
MEHAMETMMFTFHKFAGDKGYLTKEDLRVLMEKEFPGFLENQKDPLAVDKIMKDLDQCRDGKVGFQSFFSLIAGLTIACNDYFVVHMKQKGKK

SEQ ID NO: 47155 - protein, 185 aa, Homo sapiens [sequence omitted]

SEQ ID NO: 47156 - protein, 1017 aa, Homo sapiens [sequence omitted]

SEQ ID NO: 47157 - protein, 519 aa, Homo sapiens
MSNLRLANPAGGRPGSKGEPGRAADDGEGIVGAAMPDSGPLPLLQDMNKLSGGGGRRTRVEGGQLGGEEWTRHGSFVNKPTRGWLHPNDKVMGPGVSYLVRYMGCVEVLQSMRALDFNTRTQVTREAISLVCEAVPGAKGATRRRKPCSRPLSSILGRSNLKFAGMPITLTVSTSSLNLMAADCKQIIANHHMQSISFASGGDPDTAEYVAYVAKDPVNQRACHILECPEGLAQDVISTIGQAFELRFKQYLRNPPKLVTPHDRMAGFDGSAWDEEEEEPPDHQYYNDFPGKEPPLGGVVDMRLREGAAPGAARPTAPNAQTPSHLGATLPVGQPVGGDPEVRKQMPPPPPCPGRELFDDPSYVNVQNLDKARQAVGGAGPPNPAINGSAPRDLFDMKPFEDALRVPPPPQSVSMAEQLRGEPWFHGKLSRREAEALLQLNGDFLVRESTTTPGQYVLTGLQSGQPKHLLLVDPEGVVRTKDHRFESVSHLISYHMDNHLPIISAGSELCLQQPVERKL

SEQ ID NO: 47158 - protein, 520 aa, Homo sapiens
MSNLRLANPAGGRPGSKGEPGRAADDGEGIVGAAMPDSGPLPLLQDMNKLSGGGGRRTRVEGGQLGGEEWTRHGSFVNKPTRGWLHPNDKVMGPGVSYLVRYMGCVEVLQSMRALDFNTRTQVTREAISLVCEAVPGAKGATRRRKPCSRPLSSILGRSNLKFAGMPITLTVSTSSLNLMAADCKQIIANHHMQSISFASGGDPDTAEYVAYVAKDPVNQRACHILECPEGLAQDVISTIGQAFELRFKQYLRNPPKLVTPHDRMAGFDGSAWDEEEEEPPDHQYYNDFPGKEPPLGGVVDMRLREGAAPGAARPTAPNAQTPSHLGATLPVGQPVGGDPEVRKQMPPPPPCPAGRELFDDPSYVNVQNLDKARQAVGGAGPPNPAINGSAPRDLFDMKPFEDALRVPPPPQSVSMAEQLRGEPWFHGKLSRREAEALLQLNGDFLVRESTTTPGQYVLTGLQSGQPKHLLLVDPEGVVRTKDHRFESVSHLISYHMDNHLPIISAGSELCLQQPVERKL

SEQ ID NO: 47159 - protein, 233 aa, Homo sapiens [sequence omitted]

SEQ ID NO: 47160 - protein, 154 aa, Homo sapiens
MGEFFQIQVRRQEAVAENRHQLHSSSAQEPHPSSFAALPLPAQDDYLDLFGDPSVTGKIGTDIQDNKCSWLVVQCLQRATPEQYQILKENYGQKEAEKVARVKALYEELDLPAVFLQYEEDSYSHIMALIEQYAAPLPPAVFLGLARKIYKRRK

SEQ ID NO: 47161 - protein, 1457 aa, Homo sapiens
MEDTSLSSGMLTQNTNVPILEGVDVAISQGITLPSLESFHPLNIHIGKGKLHATGSKRGKKMTLRPGPVTQEDRCDHLTLKEPFSGEPSEEVKEEGGKPQMNSEGEIPSLPSGSQSAKPVSQPRKSTQPDVCASPQEKPLRTLFHQPEEEIEDGGLFIPMEEQDNEESEKRRKKKKGTKRKRDGRGQEGTLAYDLKLDDMLDRTLEDGAKQHNLTAVNVRNILHEVITNEHVVAMMKAAISETEDMPMFEPKMTRSKLKEVVEKGVVIPTWNISPIKKANEIKPPQFVDIHLEEDDSSDEEYQPDDEEEDETAEESLLESDVESTASSPRGAKKSRLRQSSEMTETDEESGILSEAEKVTTPAIRHISAEVVPMGPPPPPKPKQTRDSTFMEKLHAVDEELASSPVCMDSFQPMDDSLIAFRTRSKMPLKDVPLGQLEAELQAPDITPDMYDPNTADDEDWKMWLGGLMNDDVGNEDEADDDDDPEYNFLEDLDEPDTEDFRTDRAVRITKKEVNELMEELFETFQDEMGFSNMEDDGPEEEECVAEPRPNFNTPQALRFEEPLANLLNEQHRTVKELFEQLKMKKSSAKQLQEVEKVKPQSEKVHQTLILDPAQRKRLQQQMQQHVQLLTQIHLLATCNPNLNPEATTTRIFLKELGTFAQSSIALHHQYNPKFQTLFQPCNLMGAMQLIEDFSTHVSIDCSPHKTVKKTANEFPCLPKQVAWILATSKVFMYPELLPVCSLKAKNPQDKIVFTKAEDNLLALGLKHFEGTEFPNPLISKYLLTCKTAHQLTVRIKNLNMNRAPDNIIKFYKKTKQLPVLGKCCEEIQPHQWKPPIEREEHRLPFWLKASLPSIQEELRHMADGAREVGNMTGTTEINSDRSLEKDNLELGSESRYPLLLPKGVVLKLKPVATRFPRKAWRQKRSSVLKPLLIQPSPSLQPSFNPGKTPARSTHSEAPPSKMVLRIPHPIQPATVLQTVPGVPPLGVSGGESFESPAALPAVPPEARTSFPLSESQTLLSSAPVPKVMLPSLAPSKFRKPYVRRRPSKRRGVKASPCMKPAPVIHHPASVIFTVPATTVKIVSLGGGCNMIQPVNAAVAQSPQTIPITTLLVNPTSFPCPLNQSLVASSVSPLIVSGNSVNLPIPSTPEDKAHVNVDIACAVADGENAFQGLEPKLEPQELSPLSATVFPKVEHSPGPPLADAECQEGLSENSACRWTVVKTEEGRQALEPLPQGIQESLNNPTPGDLEEIVKMEPEEAREEISGSPERDICDDIKVEHAVELDTGAPSEELSSAGEVTKQTVLQKEEERSQPTKTPSSSQEPPDEGTSGTDVNKGSSKNALSSMDPEVRLSSPPGKPEDSSSVDGQSVGTPVGPETGGEKNGPEEEEEEDFDDLTQDEEDEMSSASEESVLSVPELQVRAGEYSQVFRGLSNMYHLLICHLLACCTMDSPKIICI

SEQ ID NO: 47162 - protein, 37 aa, Homo sapiens
MPSWQGGGRWRSCSYRSRPSSRPGRLYTENRGSWLLC

SEQ ID NO: 47163 - protein, 1457 aa, Homo sapiens
MASELAKYGLQLPAFSKIGGILANELSVDEAAVHAAVLAINEAVERGVVEDTLAALQNPSALLENLREPLAAVYQEMLAQAKMEKAANARNHDDRESQDIYDHYLTQAEIQGNINHVNVHGALEVVDDALERQSPEALLKALQDPALALRGVRRDFADWYLEQLNSDREQKAQELGLVELLEKEEVQAGVAAANTKGDQEQAMLHAVQRINKAIRRRVAADTVKELMCPEAQLPPVYPVASSMYQLELAVLQQQQGELGQEELFVAVEMLSAVVLINRALEARDASGFWSSLVNPATGLAEVEGENAQRYFDALLKLRQERGMGEDFLSWNDLQATVSQVNAQTQEETDRVLAVSLINEALDKGSPEKTLSALLLPAAGLDDVSLPVAPRYHLLLVAAKRQKAQVTGDPGAVLWLEEIRQGVVRANQDTNTAQRMALGVAAINQAIKEGKAAQTERVLRNPAVALRGVVPDCANGYQRALESAMAKKQRPADTAFWVQHDMKDGTAYYFHLQTFQGIWEQPPGCPLNTSHLTREEIQSAVTKVTAAYDRQQLWKANVGFVIQLQARLRGFLVRQKFAEHSHFLRTWLPAVIKIQAHWRGYRQRKIYLEWLQYFKANLDAIIKIQAWARMWAARRQYLRRLHYFQKNVNSIVKIQAFFRARKAQDDYRILVHAPHPPLSVVRRFAHLLNQSQQDFLAEAELLKLQEEVVRKIRSNQQLEQDLNIMDIKIGLLVKNRITLQEVVSHCKKLTKRNKEQLSDMMVLDKQKGLKSLSKEKRQKLEAYQHLFYLLQTQPIYLAKLIFQMPQNKTTKFMEAVIFSLYNYASSRREAYLLLQLFKTALQEEIKSKVEQPQDVVTGNPTVVRLVVRFYRNGRGQSALQEILGKVIQDVLEDKVLSVHTDPVHLYKNWINQTEAQTGQRSHLPYDVTPEQALSHPEVQRRLDIALRNLLAMTDKFLLAITSSVDQIPYGMRYVAKVLKATLAEKFPDATDSEVYKVVGNLLYYRFLNPAVVAPDAFDIVAMAAGGALAAPQRHALGAVAQLLQHAAAGKAFSGQSQHLRVLNDYLEETHLKFRKFIHRACQVPEPEERFAVDEYSDMVAVAKPMVYITVGELVNTHRLLLEHQDCIAPDHQDPLHELLEDLGELPTIPDLIGESIAADGHTDLSKLEVSLTLTNKFEGLEADADDSNTRSLLLSTKQLLADIIQFHPGDTLKEILSLSASREQEAAHKQLMSRRQACTAQTPEPLRRHRSLTAHSLLPLAEKQRRVLRNLRRLEALGLVSARNGYQGLVDELAKDIRNQHRHRHRRKAELVKLQATLQGLSTKTTFYEEQGDYYSQYIRACLDHLAPDSKSSGKGKKQPSLHYTAAQLLEKGVLVEIEDLPASHFRNVIFDITPGDEAGKFEVNAKFLGVDMERFQLHYQDLLQLQYEGVAVMKLFNKAKVNVNLLIFLLNKKFLRK

SEQ ID NO: 47164 - protein, 1329 aa, Homo sapiens
MSLSLEVATYRTLLEAENSRLQTPGGGSKTSLSFQDPKLELQFPRTPEGRRLGSLLPVLSPTSLPSPLPATLETPVPAFLKNQEFLQARTPTLASTPIPPTPQAPSPAVDAEIRAQDAPLSLLQTQGGRKQAPEPLRAEARVAIPASVLPGPEEPGGQRQEASTGQSPEDHASLAPPLSPDHSSLEAKDGESGGSRVFSICRGEGEGQIWGLVEKETAIEGKVVSSLQQEIWEEEDLNRKEIQDSQVPLEKETLKSLGEEIQESLKTLENQSHETLERENQECPRSLEEDLETLKSLEKENKELLKDVEVVRPLEKEAVGQLKPTGKEDTQTLQSLQKENQELMKSLEGNLETFLFPGTENQELVSSLQENLESLTALEKENQEPLRSPEVGDEEALRPLTKENQEPLRSLEDENKEAFRSLEKENQEPLKTLEEEDQSIVRPLETENHKSLRSLEEQDQETLRTLEKETQQRRRSLGEQDQMTLRPPEKVDLEPLKSLDQEIARPLENENQEFLKSLKEESVEAVKSLETEILESLKSAGQENLETLKSPETQAPLWTPEEINQGAMNPLEKEIQEPLESVEVNQETFRLLEEENQESLRSLGAWNLENLRSPEEVDKESQRNLEEEENLGKGEYQESLRSLEEEGQELPQSADVQRWEDTVEKDQELAQESPPGMAGVENEDEAELNLREQDGFTGKEEVVEQGELNATEEVWIPGEGHPESPEPKEQRGLVEGASVKGGAEGLQDPEGQSQQVGAPGLQAPQGLPEAIEPLVEDDVAPGGDQASPEVMLGSEPAMGESAAGAEPGPGQGVGGLGDPGHLTREEVMEPPLEEESLEAKRVQGLEGPRKDLEEAGGLGTEFSELPGKSRDPWEPPREGREESEAEAPRGAEEAFPAETLGHTGSDAPSPWPLGSEEAEEDVPPVLVSPSPTYTPILEDAPGPQPQAEGSQEASWGVQGRAEALGKVESEQEELGSGEIPEGPQEEGEESREESEEDELGETLPDSTPLGFYLRSPTSPRWDPTGEQRPPPQGETGKEGWDPAVLASEGLEAPPSEKEEGEEGEEECGRDSDLSEEFEDLGTEAPFLPGVPGEVAEPLGQVPQLLLDPAAWDRDGESDGFADEEESGEEGEEDQEEGREPGAGRWGPGSSVGSLQALSSSQRGEFLESDSVSVSVPWDDSLRGAVAGAPKTALETESQDSAEPSGSEEESDPVSLEREDKVPGPLEIPSGMEDAGPGADIIGVNGQGPNLEGKSQHVNGGVMNGLEQSEEVGQGMPLVSEGDRGSPFQEEEGSALKTSWAGAPVHLGQGQFLKFTQREGDRESWSSGED

SEQ ID NO: 47165 - protein, 194 aa, Homo sapiens
MSPPGSVADKRKNPPWIRRRPVVVEPISDEDWYLFCGDTVEILEGKDAGKQGKVVQVIRQRNWVVVGGLNTHYRYIGKTMDYRGTMIPSEAPLLHRQVKLVDPMDRKPTEIEWRFTEAGERVRVSTRSGRIIPKPEFPRADGIVPETWIDGPKDTSVEDALERTYVPCLKTLQEEVMEAMGIKETRKYKKVYWY

SEQ ID NO: 47166 - protein, 245 aa, Homo sapiens
MKIYPVTYILPITLHLLPDRDNDKSLRQFRYTFQACLYELLKRLCNRAVLLFVAVAGLTFFALSFGFYYEYGWEFLEHTYFYHLTRRDIRHNFSPYFYMLYLTAESKWSFSLGIAAFLPQLILLSAVSFAYYRDLVFCCFLHTSIFVTFNKVCTSQYFLWYLCLLPLVMPLVRMPWKRAVVLLMLWFIGQAMWLAPAYVLEFQGKNTFLFIWLAGLFFLLINCSILIQIISHYKEEPLTERIKYD

SEQ ID NO: 47167 - protein, 1185 aa, Homo sapiens [sequence omitted]

SEQ ID NO: 47168 - protein, 221 aa, Homo sapiens [sequence omitted]

SEQ ID NO: 47169 - protein, 103 aa, Homo sapiens
MSICHRGTGIALSAGVSLFGMSALLLPGNFESYLELVKSLCLGPALIHTAKFALVFPLMYHTWNGIRHLMWDLGKGLKIPQLYQSGVVVLVLTVLSSMGLAAM

SEQ ID NO: 47170 - protein, 604 aa, Homo sapiens
MPWESDIWDINNQICTVKDIKAEPQPLSPASSSYSVSSPRSVDSYSSTQHVPEELDLSSSSQMSPLSLYGENSNSLSSAEPLKEDKPVTGPRNKTENGLTPKKKIQVNSKPSIQPKPLLLPAAPKTQTNSSVPAKTIIIQTVPTLMPLAKQQPIISLQPAPTKGQTVLLSQPTVVQLQAPGVLPSAQPVLAVAGGVTQLPNHVVNVVPAPSANSPVNGKLSVTKPVLQSTMRNVGSDIAVLRRQQRMIKNRESACQSRKKKKEYMLGLEARLKAALSENEQLKKENGTLKRQLDEVVSENQRLKVPSPKRRVVCVMIVLAFIILNYGPMSMLEQDSRRMNPSVSPANQRRHLLGFSAKEAQDTSDGIIQKNSYRYDHSVSNDKALMVLTEEPLLYIPPPPCQPLINTTESLRLNHELRGWVHRHEVERTKSRRMTNNQQKTRILQGALEQGSNSQLMAVQYTETTSSISRNSGSELQVYYASPRSYQDFFEAIRRRGDTFYVVSFRRDHLLLPATTHNKTTRPKMSIVLPAININENVINGQDYEVMMQIDCQVMDTRILHIKSSSVPPYLRDQQRNQTNTFFGSPPAATEATHVVSTIPESLQ

SEQ ID NO: 47171 - protein, 541 aa, Homo sapiens
MILIPRMLLVLFLLLPILSSAKAQVNPAICRYPLGMSGGQIPDEDITASSQWSESTAAKYGRLDSEEGDGAWCPEIPVEPDDLKEFLQIDLHTLHFITLVGTQGRHAGGHGIEFAPMYKINYSRDGTRWISWRNRHGKQVLDGNSNPYDIFLKDLEPPIVARFVRFIPVTDHSMNVCMRVELYGCVWLDGLVSYNAPAGQQFVLPGGSIIYLNDSVYDGAVGYSMTEGLGQLTDGVSGLDDFTQTHEYHVWPGYDYVGWRNESATNGYIEIMFEFDRIRNFTTMKVHCNNMFAKGVKIFKEVQCYFRSEASEWEPNAISFPLVLDDVNPSARFVTVPLHHRMASAIKCQYHFADTWMMFSEITFQSDAAMYNNSEALPTSPMAPTTYDPMLKVDDSNTRILIGCLVAIIFILLAIIVIILWRQFWQKMLEKASRRMLDDEMTVSLSLPSDSSMFNNNRSSSPSEQGSNSTYDRIFPLRPDYQEPSRLIRKLPEFAPGEEESDLVCRCSWPNLSNSPLLLNIRCVEGPTYQKRKKKIIKHVN

SEQ ID NO: 47172 - protein, 187 aa, Homo sapiens [sequence omitted]

SEQ ID NO: 47173 - protein, 377 aa, Homo sapiens [sequence omitted]

SEQ ID NO: 47174 - protein, 854 aa, Homo sapiens
MEELIPLVNRLQDAFSALGQSCLLELPQIAVVGGQSAGKSSVLENFVGRDFLPRGSGIVTRRPLVLQLVTSKAEYAEFLHCKGKKFTDFDEVRLEIEAETDRVTGMNKGISSIPINLRVYSPHVLNLTLIDLPGITKVPVGDQPPDIEYQIREMIMQFITRENCLILAVTPANTDLANSDALKLAKEVDPQGLRTIGVITKLDLMDEGTDARDVLENKLLPLRRGYVGVVNRSQKDIDGKKDIKAAMLAERKFFLSHPAYRHIADRMGTPHLQKVLNQQLTNHIRDTLPNFRNKLQGQLLSIEHEVEAYKNFKPEDPTRKTKALLQMVQQFAVDFEKRIEGSGDQVDTLELSGGAKINRIFHERFPFEIVKMEFNEKELRREISYAIKNIHGIRTGLFTPDMAFEAIVKKQIVKLKGPSLKSVDLVIQELINTVKKCTKKLANFPRLCEETERIVANHIREREGKTKDQVLLLIDIQVSYINTNHEDFIGFANAQQRSSQVHKKTTVGNQVIRKGWLTISNIGIMKGGSKGYWFVLTAESLSWYKDDEEKEKKYMLPLDNLKVRDVEKSFMSSKHIFALFNTEQRNVYKDYRFLELACDSQEDVDSWKASLLRAGVYPDKSVAENDENGQAENFSMDPQLERQVETIRNLVDSYMSIINKCIRDLIPKTIMHLMINNVKDFINSELLAQLYSSEDQNTLMEESAEQAQRRDEMLRMYQALKEALGIIGDISTATVSTPAPPPVDDSWIQHSRRSPPPSPTTQRRPTLSAPLARPTSGRGPAPAIPSPGPHSGAPPVPFRPGPLPPFPSSSDSFGAPPQVPSRPTRAPPSVPSRRPPPSPTRPTIIRPLESSLLD

SEQ ID NO: 47175 - protein, 796 aa, Homo sapiens
MNSEEFVLVPQYADDNSTKHEEKPQLKIVSNGDEQLEKAMEEILRDSEKRPSSLLVDCQSSSEISDHSFGDIPASQTNKPSLQLILDPSNTEISTPRPSSPGGLPEEDSVLFNKLTYLGCMKVSSPRNEVEALRAMATMKSSSQYPFPVTLYVPNVPEGSVRIIDQSSNVEIASFPIYKVLFCARGHDGTTESNCFAFTESSHGSEEFQIHVFSCEIKEAVSRILYSFCTAFKRSSRQVSDVKDSVIPTPDSDVFTFSVSLEVKEDDGKGNFSPVPKDRDKFYFKLKQGIEKKVVITVQQLSNKELAIERCFGMLLSPGRNVKNSDMHLLDMESMGKSYDGRAYVITGMWNPNAPVFLALNEETPKDKQVYMTVAVDMVVTEVVEPVRFLLETVVRVYPANERFWYFSRKTFTETFFMRLKQSEGKGHTNAGDAIYEVVSLQRESDKEEPVTPTSGGGPMSPQDDEAEEESDNELSSGTGDVSKDCPEKILYSWGELLGKWHSNLGARPKGLSTLVKSGVPEALRAEVWQLLAGCHDNQAMLDRYRILITKDSAQESVITRDIHRTFPAHDYFKDTGGDGQESLYKICKAYSVYDEDIGYCQGQSFLAAVLLLHMPEEQAFCVLVKIMYDYGLRDLYRNNFEDLHCKFYQLERLMQEQLPDLHSHFSDLNLEAHMYASQWFLTLFTAKFPLCMVFHIIDLLLCEGLNIIFHVALALLKTSKEDLLQADFEGALKFFRVQLPKRYRAEENARRLMEQACNIKVPTKKLKKYEKEYQTMRESQLQQEDPMDRYKFVYL

SEQ ID NO: 47176 - protein, 124 aa, Homo sapiens [sequence omitted]

SEQ ID NO: 47177 - protein, 1624 aa, Homo sapiens
MAATTTTAIFTTLNEPKPETQRRGWAKSRQRRQVWKRRAEDGQGDSGISSHFQPWPKHSLKHRVKKSPPEESNQNGGEGSYREAETFNSQVGLPILYFSGRRERLLLRPEVLAEIPREAFTVEAWVKPEGGQNNPAIIAGVFDNCSHTVSDKGWALGIRSGKDKGKRDARFFFSLCTDRVKKATILISHSRYQPGTWTHVAATYDGRHMALYVDGTQVASSLDQSGPLNSPFMASCRSLLLGGDSSEDGHYFRGHLGTLVFWSTALPQSHFQHSSQHSSGEEEATDLVLTASFEPVNTEWVPFRDEKYPRLEVLQGFEPEPEILSPLQPPLCGQTVCDNVELISQYNGYWPLRGEKVIRYQVVNICDDEGLNPIVSEEQIRLQHEALNEAFSRYNISWQLSVHQVHNSTLRHRVVLVNCEPSKIGNDHCDPECEHPLTGYDGGDCRLQGRCYSWNRRDGLCHVECNNMLNDFDDGDCCDPQVADVRKTCFDPDSPKRAYMSVKELKEALQLNSTHFLNIYFASSVREDLAGAATWPWDKDAVTHLGGIVLSPAYYGMPGHTDTMIHEVGHVLGLYHVFKGVSERESCNDPCKETVPSMETGDLCADTAPTPKSELCREPEPTSDTCGFTRFPGAPFTNYMSYTDDNCTDNFTPNQVARMHCYLDLVYQQWTESRKPTPIPIPPMVIGQTNKSLTIHWLPPISGVVYDRASGSLCGACTEDGTFRQYVHTASSRRVCDSSGYWTPEEAVGPPDVDQPCEPSLQAWSPEVHLYHMNMTVPCPTEGCSLELLFQHPVQADTLTLWVTSFFMESSQVLFDTEILLENKESVHLGPLDTFCDIPLTIKLHVDGKVSGVKVYTFDERIEIDAALLTSQPHSPLCSGCRPVRYQVLRDPPFASGLPVVVTHSHRKFTDVEVTPGQMYQYQVLAEAGGELGEASPPLNHIHGAPYCGDGKVSERLGEECDDGDLVSGDGCSKVCELEEGFNCVGEPSLCYMYEGDGICEPFERKTSIVDCGIYTPKGYLDQWATRAYSSHEDKKKCPVSLVTGEPHSLICTSYHPDLPNHRPLTGWFPCVASENETQDDRSEQPEGSLKKEDEVWLKVCFNRPGEARAIFIFLTTDGLVPGEHQQPTVTLYLTDVRGSNHSLGTYGLSCQHNPLIINVTHHQNVLFHHTTSVLLNFSSPRVGISAVALRTSSRIGLSAPSNCISEDEGQNHQGQSCIHRPCGKQDSCPSLLLDHADVVNCTSIGPGLMKCAITCQRGFALQASSGQYIRPMQKEILLTCSSGHWDQNVSCLPVDCGVPDPSLVNYANFSCSEGTKFLKRCSISCVPPAKLQGLSPWLTCLEDGLWSLPEVYCKLECDAPPIILNANLLLPHCLQDNHDVGTICKYECKPGYYVAESAEGKVRNKLLKIQCLEGGIWEQGSCIPVVCEPPPPVFEGMYECTNGFSLDSQCVLNCNQEREKLPILCTKEGLWTQEFKLCENLQGECPPPPSELNSVEYKCEQGYGIGAVCSPLCVIPPSDPVMLPENITADTLEHWMEPVKVQSIVCTGRRQWHPDPVLVHCIQSCEPFQADGWCDTINNRAYCHYDGGDCCSSTLSSKKVIPFAADCDLDECTCRDPKAEENQ

SEQ ID NO: 47178 - protein, 498 aa, Homo sapiens
MDVPVFKAIQPDELSSCGWNKKEKYSSAPNAVAFTRRFNHVSFWVVREILHAQTLKIRAEVLSHYIKTAKKLYELNNLHALMAVVSGLQSAPIFRLTKTWALLSRKDKTTFEKLEYVMSKEDNYKRLRDYISSLKMTPCIPYLGIYLSDLTYIDSAYPSTGSILENEQRSNLMNNILRIISDLQQSCEYDIPMLPHVQKYLNSVQYIEELQKFVEDDNYKLSLKIEPGTSTPRSAASREDLVGPEVGASPQSGRKSVAAEGALLPQTPPSPRNLIPHGHRKCHSLGYNFIHKMNTAEFKSATFPNAGPRHLLDDSVMEPHAPSRGQAESSTLSSGISIGSSDGSELSEETSWPAFESSAESEDLAVHLYPGAVTIQGVLRRKTLLKEGKKPTVASWTKYWAALCGTQLFYYAAKSLKATERKHFKSTSNKNVSVIGWMVMMADDPEHPDLFLLTDSEKGNSYKFQAGNRMNAMLWFKHLSAACQSNKQQVPTNLMTFE

SEQ ID NO: 47179 - protein, 524 aa, Homo sapiens
MDVPVFKAIQPDELSSCGWNKKEKYSSAPNAVAFTRRFNHVSFWVVREILHAQTLKIRAEVLSHYIKTAKKLYELNNLHALMAVVSGLQSAPIFRLTKTWALLSRKDKTTFEKLEYVMSKEDNYKRLRDYISSLKMTPCIPYLGIYLSDLTYIDSAYPSTGSILENEQRSNLMNNILRIISDLQQSCEYDIPMLPHVQKYLNSVQYIEELQKFVEDDNYKLSLKIEPGTSTPRSAASREDLVGPEVGASPQSGRKSVAAEGALLPQTPPSPRNLIPHGHRKCHSLGYNFIHKMNTAEFKSATFPNAGPRHLLDDSVMEPHAPSRGQAESSTLSSGISIGSSDGSELSEETSWPAFERNRLYHSLGPVTRVARNGYRSHMKASSSAESEDLAVHLYPGAVTIQGVLRRKTLLKEGKKPTVASWTKYWAALCGTQLFYYAAKSLKATERKHFKSTSNKNVSVIGWMVMMADDPEHPDLFLLTDSEKGNSYKFQAGNRMNAMLWFKHLSAACQSNKQQVPTNLMTFE

SEQ ID NO: 47180 - protein, 2951 aa, Homo sapiens
MIGSREERNIRSCDFESSQSSVINDTVVRFLNDRPAIDALQNSECLIRMGASMRTEEEMPNRTKGSENNLKLSVNNMAHDTDPKALRLTDSSPSSTSTSNSQRLDILKRRQHDVKLEKLKERIRKQWEHSEETNGRGQKLGHIDHPVMVVNVDNSVTAKVRKVATAPPAPAYKGFNPSETKIRTPDGKVWQEAEFQNMSRELYRDLALHFADDISIKEKPAEKSKEKKVVKPVRKVQKVAQLSSTECRTGSSHLISTSSWRDGQKLVKKILGPAPRMEPKEQRTASSDRGGRERTAKSGGHIGRAESDPRLDVLHRHLQRNSERSRSKSRSENNIKKLASSLPDNKQEENTALNKDFLPIEIRGILDDLQLDSTAHTAKQDTVELQNQKSSAPVHAPRSHSPVKRKPDKITANEDPPVISKRRHYDTDEVRQYIVRQQEERKRKQNEEKKAQKEATEQKNKRLQELYRKQKEAFTKVKNVPPSEPSATRRLQETYSKLLLEKTLLEEPSHQHVTQETQAKPGYQPSGESDKENKVQERPPSASSSSDMSLSEPPQPLARKDLMESTWMQPERLSPQVHHSQPQPFAGTAGSLLSHLLSLEHVGILHKDFESILPTRKNHNMASRPLTFTPQPYVTSPAAYTDALLKPSASQYKSKLDRIEALKATAASLSSRIESEAKKLAGASINYGSAWNTEYDVQQAPQEDGPWTKAVTPPVKDDNEDVFSARIQKMLGSCVSHATFDDDLPGVGNLSEFKKLPEMIRPQSAISSFRVRSPGPKPEGLLAQLCKRQTDSSSSDMQACSQDKAKISLGSSIDSVSEGPLLSEGSLSEEEGDQDGQPLLKVAEILKEKEFCPGERNSYEPIKEFQKEAEKFLPLFGHIGGTQSKGPWEELAKGSPHSVINIFTKSYQLYGKGFEDKLDRGTSTSRPLNATATPLSGVSYEDDFVSSPGTGTSTEKKSTLEPHSTLSPQEDHSNRKSAYDPSSVDVTSQHSSGAQSAASSRSSTSSKGKKGKKEKTEWLDSFTGNVQNSLLDEEKAERGSHQGKKSGTSSKLSVKDFEQTLDTDSTLEDLSGHSVSVSSDKGRSQKTPTSPLSPSSQKSLQFDVAGTSSERSKSSVMPPTITGFKPNAPLTDLNPAASRTTTENMAPIPGSKRFSPAGLHHRMAAELSYLNAIEESVRQLSDVERVRGISLAQQESVSLAQIIKAQQQRHERDLALLKLKAEQEALESQRQLEETRNKAAQVHAESLQQVVQSQREVTEVLQEATCKIAAQQSETARLTTDAARQICEMAELTRTHISDAVVASGAPLAILYDHQRQHLPDFVKQLRTRTETDRKSPSVSLSQSKEGTLDSKHQKYSASYDSYSESSGYKNHDRRSSSGSSRQESPSVPSCKENEKKLNGEKIESSIDEQVQTAADDSLRSDSVPSLPDEKDSTSIATEYSLKFDESMTEDEIEEQSFRSLLPSESHRRFNMEKRRGHHDDSDEEASPEKTTLSTAKELNMPFSGGQDSFSKFTMEMVRQYMKEEEMRAAHQSSLLRLREKALKEKTKAELAWLEHQKKHLRDKGEDDKMPPLRKKQRGLLLRLQQEKAEIKRLQEANKAARKERQLILKQQEEIEKIRQTTIKLQEKLKSAGESKLDSHSDDDTKDNKATSPGPTDLETRSPSPISISSSETSSIMQKLKKMRSRMDEKFLTKREQKLMQRRQHAEELLEWKRRLDAEEAEIRQMEKQALAAWDKELIKPKTPKKELEDQRTEQKEIASEEESPVPLYSHLNSESSIPEELGSPAVEYVPSESIGQEQPGSPDHSILTEEMICSQELESSTSPSKHSLPKSCTSVSKQESSKGSHRTGGQCHLPIKSHQHCYSWSDESLSMTQSETTSDQSDIEGRIRALKDELRKRKSVVNQLKKEQKKRQKERLKAQEASLIKQLESYDEFIKKTEAELSQDLETSPTAKPQIKTLSSASEKPKIKPLTPLHRSETAKNWKSLTESERSRGSLESIAEHVDASLSGSERSVSERSLSAYAKRVNEWDSRTEDFQTPSPVLRSSRKIREESGDSLENVPALHLLKELNATSRILDMSDGKVGESSKKSEIKEIEYTKLKKSKIEDAFSKEGKSDVLLKLVLEQGDSSEILSKKDLPLDSENVQKDLVGLAIENLHKSEEMLKERQSDQDMNHSPNIQSGKDIHEQKNTKEKDLSWSEHLFAPKEIPYSEDFEVSSFKKEISAELYKDDFEVSSLLSLRKDSQSCRDKPQPMRSSTSGATSFGSNEEISECLSEKSLSIHSNVHSDRLLELKSPTELMKSKERSDVEHEQQVTESPSLASVPTADELFDFHIGDRVLIGNVQPGILRFKGETSFAKGFWAGVELDKPEGNNNGTYDGIAYFECKEKHGIFAPPQKISHIPENFDDYVDINEDEDCYSDERYQCYNQEQNDTEGPKDREKDVSEYFYEKSLPSVNDIEASVNRSRSLKIETDNVQDISGVLEAHVHQQSSVDSQISSKENKDLISDATEKVSIAAEDDTLDNTFSEELEKQQQFTEEEDNLYAEASEKLCTPLLDLLTREKNQLEAQLKSSLNEEKKSKQQLEKISLLTDSLLKVFVKDTVNQLQQIKKTRDEKIQLSNQELLGDDQKKVTPQDLSQNVEEQSPSISGCFLSSELEDEKEEISSPDMCPRPESPVFGASGQEELAKRLAELELSREFLSALGDDQDWFDEDFGLSSSHKIQKNKAEETIVPLMAEPKRVTQQPCETLLAVPHTAEEVEILVHNAAEELWKWKELGHDLHSISIPTKLLGCASKGLDIESTSKRVYKQAVFDLTKEIFEEIFAEDPNLNQPVWMKPCRINSSYFRRVKNPNNLDEIKSFIASEVLKLFSLKKEPNHKTDWQKMMKFGRKKRDRVDHILVQELHEEEAQWVNYDEDELCVKMQLADGIFETLIKDTIDVLNQISEKQGRMLLV

SEQ ID NO: 47181 - protein, 1126 aa, Homo sapiens
MAPQPPRVWGVQLQGPSVLESKVRALKEKMTVAKQGVSPCSASQEWSSPKKPQCRRGKAGRAGTPSEGSFLPGAVVAPRTQNLPDGQLDGSINEEQPARDGGPRLPRPPAPGREYCNRGSPWPPEAEWTLPDHDRGPLLGPSSLQQSPIHGVTPGRPGGPGHCNKIIHIPSPRTGRSYPFPDGVVTEADLDSTSLTSEEVFVPRTALLGERWRAGDLEALGAGSSVLSLSDRVERNRLLLQEMLNVSGQSPRKVGTPAWTPSWDTAAPERPVGDVDWASGTSLQDSGQNRTVGPNPEPVLSPRHEEATHLLQRARMKARTRPLRASHDIVPTITQGSRDGHRSPARDPRTTPACRDSLQNGHTSDSSSGESSGGHRPRRGPSPSHVRFEDESAREAEFRHLERLQQRQRQVLSTVLQAADQGPLRSKPDLADYINGAPRLRDAGQGTFHRLVGSLDRRGHPAPPAPGSERRCQACGSCIDDPRPAQGKAPPVPRTLQELQAACGMERVLGGLSSPLRLLPAEPRLHMEWIRETHIGDTVCPAEVDSALDSTDNSDNCRTDSEEAGTSQAGWACGRTQGSSPRLRLRGSRPRGHRWSKKAEAELPWGLQAQQHLPRADDVEVENEVKEGRGHTPEGTLFLREDAKPPDLELKRVSLGPQWQPGPGLGSHQPHPLDSRTPCRTAYATTAPMTPESSGPGGQAQVTESHESLEIVSPSSLQQSHAEPSAPHQAWQPTASLCPEGWAPTPPPSRKTTSPVSHRKAALAGLLRLGDQTEPVGIPRPPSRSAVLRTCELPPSQTQPSRPQVRHPLLALSTNNCNNSAPRGLQEPYGGAVHEGRVERGPCSREPEPPLENSRDGGPQGFLGSADVATINSTGITLSLSSEESESSKESEGSLQRTGSGSGGHVLSRASAGAGTGPGSPSAAPLDQNKKRSSSIASTLGLKKLFSALGQSSRPKLGKSRSYSVEQLQPAPPGLTSQSRAPSLQSLHPVSPSHQRRKAASFQNLHSLLSSKGNRSSLYLVAGPGDHSAAGRPAKTSPRRALSVEDVGAPSLARTVGRLVEVFPDGTSQLQLQRSPGGTFGFCVASGNGRPDSGMPSPLPQPHGWGGLSKQGRAFWLWSEAFLVFG

SEQ ID NO: 47182 - protein, 893 aa, Homo sapiens
MPLGKTLPCGLTKTYTFRLNEHPSNNWSPQLSYFEYRRLLRNLTALRIRATYGEYSTGYIDNVTLISARPVSGAPAPWVEQCICPVGYKGQFCQDCASGYKRDSARLGPFGTCIPCNCQGGGACDPDTGDCYSGDENPDIECADCPIGFYNDPHDPRSCKPCPCHNGFSCSVMPETEEVVCNNCPPGVTGARCELCADGYFGDPFGEHGPVRPCQPCQCNNNVDPSASGNCDRLTGRCLKCIHNTAGIYCDQCKAGYFGDPLAPNPADKCRACNCNPMGSEPVGCRSDGTCVCKPGFGGPNCEHGAFSCPACYNQVKIQMDQFMQQLQRMEALISKAQGGDGVVPDTELEGRMQQAEQALQDILRDAQISEGASRSLGLQLAKVRSQENSYQSRLDDLKMTVERVRALGSQYQNRVRDTHRLITQMQLSLAESEASLGNTNIPASDHYVGPNGFKSLAQEATRLAESHVESASNMEQLTRETEDYSKQALSLVRKALHEGVGSGSGSPDGAVVQGLVEKLEKTKSLAQQLTREATQAEIEADRSYQHSLRLLDSVSRLQGVSDQSFQVEEAKRIKQKADSLSSLVTRHMDEFKRTQKNLGNWKEEAQQLLQNGKSGREKSDQLLSRANLAKSRAQEALSMGNATFYEVESILKNLREFDLQVDNRKAEAEEAMKRLSYISQKVSDASDKTQQAERALGSAAADAQRAKNGAGEALEISSEIEQEIGSLNLEANVTADGALAMEKGLASLKSEMREVEGELERKELEFDTNMDAVQMVITEAQKVDTRAKNAGVTIQDTLNTLDGLLHLMDQPLSVDEEGLVLLEQKLSRAKTQINSQLRPMMSELEERARQQRGHLHLLETSIDGILADVKNLENIRDNLPPGCYNTQALEQQ

SEQ ID NO: 47183 - protein, 1166 aa, Homo sapiens [sequence omitted]

SEQ ID NO: 47184 - protein, 101 aa, Homo sapiens
MTAALQAALKNPPINTKSQAVKDRAGSIVLKVLISFKANDIEKAVQSLDKNGVDLLMKYIYKGFESPSDNSSAMLLQWHEKALAAGGVGSIVRVLTARKTV

SEQ ID NO: 47185 - protein, 865 aa, Homo sapiens [sequence omitted]

SEQ ID NO: 47186 - protein, 1458 aa, Homo sapiens
MADKKYKETFSAPSRANENVALKYSSNRPPIASLSQTEVVRSGHLTTKPTQSKLDIKVLGTGNLYHRSIGKEIAKTSNKFGSLEKRTPTKCTTEHKLTTKCSLPQLKSPAPSILKNRMSNLQVKQRPKSSFLANKQERSAENTILPEEETVVQNTSAGKDPLKVENSQVTVAVRVRPFTKREKIEKASQVVFMSGKEITVEHPDTKQVYNFIYDVSFWSFDECHPHYASQTTVYEKLAAPLLERAFEGFNTCLFAYGQTGSGKSYTMMGFSEEPGIIPRFCEDLFSQVARKQTQEVSYHIEMSFFEVYNEKIHDLLVCKDENGQRKQPLRVREHPVYGPYVEALSMNIVSSYADIQSWLELGNKQRATAATGMNDKSSRSHSVFTLVMTQTKTEFVEGEEHDHRITSRINLIDLAGSERCSTAHTNGDRLKEGVSINKSLLTLGKVISALSEQANQRSVFIPYRESVLTWLLKESLGGNSKTAMIATISPAASNIEETLSTLRYANQARLIVNIAKVNEDMNAKLIRELKAEIAKLKAAQRNSRNIDPERYRLCRQEITSLRMKLHQQERDMAEMQRVWKEKFEQAEKRKLQETKELQKAGIMFQMDNHLPNLVNLNEDPQLSEMLLYMIKEGTTTVGKYKPNSSHDIQLSGVLIADDHCTIKNFGGTVSIIPVGEAKTYVNGKHILEITVLRHGDRVILGGDHYFRFNHPVEVQKGKRPSGRDTPISEGPKDFEFAKNELLMAQRSQLEAEIKEAQLKAKEEMMQGIQIAKEMAQQELSSQKAAYESKIKALEAELREESQRKKMQEINNQKANHKIEELEKAKQHLEQEIYVNKKRLEMETLATKQALEDHSIRHARILEALETEKQKIAKEVQILQQNRNNRDKTFTVQTTWSSMKLSMMIQEANAISSKLKTYYVFGRHDISDKSSSDTSIRVRNLKLGISTFWSLEKFESKLAAMKELYESNGSNRGEDAFCDPEDEWEPDITDAPVSSLSRRRSRSLMKNRRISGCLHDIQVHPIKNLHSSHSSGLMDKSSTIYSNSAESFLPGICKELIGSSLDFFGQSYDEERTIADSLINSFLKIYNGLFAISKAHEEQDEESQDNLFSSDRAIQSLTIQTACAFEQLVVLMKHWLSDLLPCTNIARLEDELRQEVKKLGGYLQLFLQGCCLDISSMIKEAQKNAIQIVQQAVKYVGQLAVLKGSKLHFLENGNNKAASVQEEFMDAVCDGVGLGMKILLDSGLEKAKELQHELFRQCTKNEVTKEMKTNAMGLIRSLENIFAESKIKSFRRQVQEENFEYQDFKRMVNRAPEFLKLKHCLEKAIEIIISALKGCHSDINLLQTCVESIRNLASDFYSDFSVPSTSVGSYESRVTHIVHQELESLAKSLLFCFESEESPDLLKPWETYNQNTKEEHQQSKSSGIDGSKNKGVPKRVYELHGSSPAVSSEECTPSRIQWV

SEQ ID NO: 47187 - protein, 77 aa, Homo sapiens
MSKKVTPASTQCVRFPFPSTVVCKKNLDSTTVAVHGEEIYCKSCYGKKYGPKGYGYGQGAGTLSTDKGESLGIKHEE

SEQ ID NO: 47188 - protein, 1817 aa, Homo sapiens
MLGSSVKSVQPEVELSSGGGDEGADEPRGAGRKAAAADGRGMLPKRAKAPGGGGGMAKASAAELKVFKSGSVDSRVPGGPPASNLRKQKSLTNLSFLTDSEKKLQLYEPEWSDDMAKAPKGLGKVGSKGREAPLMSKTLSKSEHSLFQAKGSPAGGAKTPLAPLAPNLGKPSRIPRGPYAEVKPLSKAPEAAVSEDGKSDDELLSSKAKAQKSSGPVPSAKGQEERAFLKVDPELVVTVLGDLEQLLFSQMLDPESQRKRTVQNVLDLRQNLEETMSSLRGSQVTHSSLEMTCYDSDDANPRSVSSLSNRSSPLSWRYGQSSPRLQAGDAPSVGGSCRSEGTPAWYMHGERAHYSHTMPMRSPSKLSHISRLELVESLDSDEVDLKSGYMSDSDLMGKTMTEDDDITTGWDESSSISSGLSDASDNLSSEEFNASSSLNSLPSTPTASRRNSTIVLRTDSEKRSLAESGLSWFSESEEKAPKKLEYDSGSLKMEPGTSKWRRERPESCDDSSKGGELKKPISLGHPGSLKKGKTPPVAVTSPITHTAQSALKVAGKPEGKATDKGKLAVKNTGLQRSSSDAGRDRLSDAKKPPSGIARPSTSGSFGYKKPPPATGTATVMQTGGSATLSKIQKSSGIPVKPVNGRKTSLDVSNSAEPGFLAPGARSNIQYRSLPRPAKSSSMSVTGGRGGPRPVSSSIDPSLLSTKQGGLTPSRLKEPTKVASGRTTPAPVNQTDREKEKAKAKAVALDSDNISLKSIGSPESTPKNQASHPTATKLAELPPTPLRATAKSFVKPPSLANLDKVNSNSLDLPSSSDTTHASKVPDLHATSSASGGPLPSCFTPSPAPILNINSASFSQGLELMSGFSVPKETRMYPKLSGLHRSMESLQMPMSLPSAFPSSTPVPTPPAPPAAPTEEETEELTWSGSPRAGQLDSNQRDRNTLPKKGLRYQLQSQEETKERRHSHTIGGLPESDDQSELPSPPALPMSLSAKGQLTNIVHGSVLSLASSASSTYSSAEERMQSEQIRKLRRELESSQEKVATLTSQLSANANLVAAFEQSLVNMTSRLRHLAETAEEKDTELLDLRETIDFLKKKNSEAQAVIQGALNASETTPKELRIKRQNSSDSISSLNSITSHSSIGSSKDADAKKKKKKSWLRSSFNKAFSIKKGPKSASSYSDIEEIATPDSSAPSSPKLQHGSTETASPSIKSSTSSSVGTDVTEGPAHPAPHTRLFHANEEEEPEKKEVSELRSELWEKEMKLTDIRLEALNSAHQLDQLRETMHNMQLEVDLLKAENDRLKVAPGPSSGSTPGQVPGSSALSSPRRSLGLALTHSFGPSLADTDLSPMDGISTCGPKEEVTLRVVVRMPPQHIIKGDLKQQEFFLGCSKVSGKVDWKMLDEAVFQVFKDYISKMDPASTLGLSTESIHGYSISHVKRVLDAEPPEMPPCRRGVNNISVSLKGLKEKCVDSLVFETLIPKPMMQHYISLLLKHRRLVLSGPSGTGKTYLTNRLAEYLVERSGREVTEGIVSTFNMHQQSCKDLQLYLSNLANQIDRETGIGDVPLVILLDDLSEAGSISELVNGALTCKYHKCPYIIGTTNQPVKMTPNHGLHLSFRMLTFSNNVEPANGFLVRYLRRKLVESDSDINANKEELLRVLDWVPKLWYHLHTFLEKHSTSDFLIGPCFFLSCPIGIEDFRTWFIDLWNNSIIPYLQEGAKDGIKVHGQKAAWEDPVEWVRDTLPWPSAQQDQSKLYHLPPPTVGPHSIASPPEDRTVKDSTPSSLDSDPLMAMLLKLQEAANYIESPDRETILDPNLQATL

SEQ ID NO: 47189 - protein, 104 aa, Homo sapiens
MGSTLSLAERPKGMIRSGSFRDPTDDVHGSVLSLASSASSTYSSQIRKLRRELESSQEKVATLTSQLSANVSAMKYGKIKAVILTIVRQVQPREENYLVRYPLD

SEQ ID NO: 47190 - protein, 1027 aa, Homo sapiens
MRRAEQLRRWRGSLTEQEPAERRGAGRQPLTRRGSPRVRFEDGAVFLAACSSGDTDEVRKLLARGADINTVNVDGLTALHQACIDENLDMVKFLVENRANVNQQDNEGWTPLHAAASCGYLNIAEYFINHGASVGIVNSEGEVPSDLAEEPAMKDLLLEQVKKQGVDLEQSRKEEEQQMLQDARQWLNSGKIEDVRQARSGATALHVAAAKGYSEVLRLLIQAGYELNVQDYDGWTPLHAAAHWGVKEACSILAEALCDMDIRNKLGQTPFDVADEGLVEHLELLQKKQNVLRSEKETRNKLIESDLNSKIQSGFFKNKEKMLYEEETPKSQEMEEENKESSSSSSEEEEGEDEASESETEKEADKKPEAFVNHSNSESKSSITEQIPAPAQNTFSASSARRFSSGLFNKPEEPKDESPSSWRLGLRKTGSHNMLSEVANSREPIRDRGSSIYRSSSSPRISALLDNKDKERENKSYISSLAPRKLNSTSDIEEKENRESAVNLVRSGSYTRQLWRDEAKGNEIPQTIAPSTYVSTYLKSASFGRSSDPTSPYISANRNSSPATSPITIGSSTSRGSQWQPASSCPAPISANTTASVHHGRTPHKSQADTTAEKTADNVSSSTPLCVITNRPLPSTANGVTATPVLSITGTDSSVEAREKRRSYLTPVRDEEAESLRKARSRQARQTRRSTQGVTLTDLQEAERTFSRSRAERQAQEQPREKPTDTEGLEGSPEKHEPSAVPATEAGEGQQPWGRSLDEEPICHRLRCPAQPDKPTTPASPSTSRPSLYTSSHLLWTNRFSVPDSESSETTTNTTTAKEMDKNENEEADLDEQSSKRLSIRERRRPKERRRGTGINFWTKDEDETDGSEEVKETWHERLSRLESGGSNPTTSDSYGDRASARARREAREARLATLTSRVEEDSNRDYKKLYESALTENQKLKTKLQEAQLELADIKSKLEKVAQQKQEKTSDRSSVLEMEKRERRALERKMSEMEEEMKVLTELKSDNQRLKDENGALIRVISKLSK

SEQ ID NO: 47191 - protein, 623 aa, Homo sapiens [sequence omitted]

SEQ ID NO: 47192 - protein, 445 aa, Homo sapiens
MFTVKEVMHYLGQYIMVKQLYDQQEQHMVYCGGDLLGELLGRQSFSVKDPSPLYDMLRKNLVTLATATTDAAQTLALAQDHSMDIPSQDQLKQSAEESSTSRKRTTEDDIPTLPTSEHKCIHSREDEDLIENLAQDETSRLDLGFEEWDVAGLPWWFLGNLRSNYTPRSNGSTDLQTNQDVGTAIVSDTTDDLWFLNESVSEQLGVGIKVEAADTEQTSEEVGKVSDKKVIEVGKNDDLEDSKSLSDDTDVEVTSEDEWQCTECKKFNSPSKRYCFRCWALRKDWYSDCSKLTHSLSTSDITAIPEKENEGNDVPDCRRTISAPVVRPKDAYIKKENSKLFDPCNSVEFLDLAHSSESQETISSMGEQLDNLSEQRTDTENMEDCQNLLKPCSLCEKRPRDGNIIHGRTGHLVTCFHCARRLKKAGASCPICKKEIQLVIKVFIA

SEQ ID NO: 47193 - protein, 429 aa, Homo sapiens
MLTSGLKGRGFSVLHTYQDHLWRSGNKSSPPSIAPLALDSADLSEEKGSVQMDSTLQGDMRHMTLEGEEENGEVHQAREDKSLSEAPEDTSTRGLNQDSTDSKTLQEQMDELLQQCFLHALKCRVKKADLPLLTSTFLGSHMFSCCPEGRQLDIKKSSYKKLSKFLQQMQQEQIIQVKELSKGVESIVAVDWKHPRITSFVIPEPSPTSQTIQEGSREQPYHPPDIKPLYCVPASMTLLFQESGHKKGSFLEGSEVRTIVINYAKKNDLVDADNKNLVRLDPILCDCILEKNEQHTVMKLPWDSLLTRCLEKLQPAYQVTLPGQEPIVKKGRICPIDITLAQRASNKKVTVVRNLEAYGLDPYSVAAILQQRCQASTTVNPAPGAKDSLQVQIQGNQVHHLGWLLLEEYQLPRKHIQGLEKALKPGKKK

SEQ ID NO: 47194 - protein, 307 aa, Homo sapiens
MLQDCPKARREVELHWRASQCPHIVRIVDVYENLYAGRKCLLIVMECLDGGELFSRIQDRGDQAFTEREASEIMKSIGEAIQYLHSINIAHRDVKPENLLYTSKRPNAILKLTDFGFAKETTSHNSLTTPCYTPYYVAPEVLGPEKYDKSCDMWSLGVIMYILLCGYPPFYSNHGLAISPGMKTRIRMGQYEFPNPEWSEVSEEVKMLIRNLLKTEPTQRMTITEFMNHPWIMQSTKVPQTPLHTSRVLKEDKERWEDVKEEMTSALATMRVDYEQIKIKKIEDASNPLLLKRRKKARALEAAALAH

SEQ ID NO: 47195 - protein, 463 aa, Homo sapiens
MIGLPARGKTYVSKKLTRYLNWIGVPTKVFNLGVYRREAVKSYKSYDFFRHDNEEAMKIRKQCALVALEDVKAYLTEENGQIAVFDATNTTRERRDMILNFAEQNSFKVFFVESVCDDPDVIAANILEVKVSSPDYPERNRENVMEDFLKRIECYKVTYRPLDPDNYDKDLSFIKVINVGQRFLVNRVQDYIQSKIVYYLMNIHVQPRTIYLCRHGESEFNLLGKIGGDSGLSVRGKQFAQALRKFLEEQEITDLKVWTSQLKRTIQTAESLGVPYEQWKILNEIDAGVCEEMTYAEIEKRYPEEFALRDQEKYLYRYPGGESYQDLVQRLEPVIMELERQGNVLVISHQAVMRCLLAYFLDKGADELPYLRCPLHTIFKLTPVAYGCKVETIKLNVEAVNTHRDKPTNNFPKNQTPVRMRRNSFTPLSSSNTIRRPRNYSVGSRPLKPLSPLRAQDMQEGAD

SEQ ID NO: 47196 - protein, 1909 aa, Homo sapiens
MSTHRSRLLTAAPLSMEQRRPWPRALEVDSRSVVLLSVVWVLLAPPAAGMPQFSTFHSENRDWTFNHLTVHQGTGAVYVGAINRVYKLTGNLTIQVAHKTGPEEDNKSCYPPLIVQPCSEVLTLTNNVNKLLIIDYSENRLLACGSLYQGVCKLLRLDDLFILVEPSHKKEHYLSSVNKTGTMYGVIVRSEGEDGKLFIGTAVDGKQDYFPTLSSRKLPRDPESSAMLDYELHSDFVSSLIKIPSDTLALVSHFDIFYIYGFASGGFVYFLTVQPETPEGVAINSAGDLFYTSRIVRLCKDDPKFHSYVSLPFGCTRAGVEYRLLQAAYLAKPGDSLAQAFNITSQDDVLFAIFSKGQKQYHHPPDDSALCAFPIRAINLQIKERLQSCYQGEGNLELNWLLGKDVQCTKAPVPIDDNFCGLDINQPLGGSTPVEGLTLYTTSRDRMTSVASYVYNGYSVVFVGTKSGKLKKIRADGPPHGGVQYEMVSVLKDGSPILRDMAFSIDQRYLYVMSERQVTRVPVESCEQYTTCGECLSSGDPHCGWCALHNMCSRRDKCQQAWEPNRFAASISQCVSLAVHPSSISVSEHSRLLSLVVSDAPDLSAGIACAFGNLTEVEGQVSGSQVICISPGPKDVPVIPLDQDWFGLELQLRSKETGKIFVSTEFKFYNCSAHQLCLSCVNSAFRCHWCKYRNLCTHDPTTCSFQEGRINISEDCPQLVPTEEILIPVGEVKPITLKARNLPQPQSGQRGYECVLNIQGAIHRVPALRFNSSSVQCQNSSYQYDGMDISNLAVDFAVVWNGNFIIDNPQDLKVHLYKCAAQRESCGLCLKADRKFECGWCSGERRCTLHQHCTSPSSPWLDWSSHNVKCSNPQITEILTVSGPPEGGTRVTIHGVNLGLDFSEIAHHVQVAGVPCTPLPGEYIIAEQIVCEMGHALVGTTSGPVRLCIGECKPEFMTKSHQQYTFVNPSVLSLNPIRGPESGGTMVTITGHYLGAGSSVAVYLGNQTCEFYGRSMSEIVCVSPPSSNGLGPVPVSVSVDRAHVDSNLQFEYIDDPRVQRIEPEWSIASGHTPLTITGFNLDVIQEPRIRVKFNGKESVNVCKVVNTTTLTCLAPSLTTDYRPGLDTVERPDEFGFVFNNVQSLLIYNDTKFIYYPNPTFELLSPTGVLDQKPGSPIILKGKNLCPPASGGAKLNYTVLIGETPCAVTVSETQLLCEPPNLTGQHKVMVHVGGMVFSPGSVSVISDSLLTLPAIVSIAAGGSLLLIIVIIVLIAYKRKSRENDLTLKRLQMQMDNLESRVALECKEAFAELQTDINELTSDLDRSGIPYLDYRTYAMRVLFPGIEDHPVLRELEVQGNGQQHVEKALKLFAQLINNKVFLLTFIRTLELQRSFSMRDRGNVASLIMTGLQGRLEYATDVLKQLLSDLIDKNLENKNHPKLLLRRTESVAEKMLTNWFAFLLHKFLKECAGEPLFMLYCAIKQQMEKGPIDAITGEARYSLSEDKLIRQQIEYKTLILNCVNPDNENSPEIPVKVLNCDTITQVKEKILDAVYKNVPYSQRPRAVDMDLEWRQGRIARVVLQDEDITTKIEGDWKRLNTLMHYQVSDRSVVALVPKQTSSYNIPASASISRTSISRYDSSFRYTGSPDSLRSRAPMITPDLESGVKVWHLVKNHDHGDQKEGDRGSKMVSEIYLTRLLATKGTLQKFVDDLFETLFSTVHRGSALPLAIKYMFDFLDEQADRHSIHDTDVRHTWKSNCLPLRFWVNVIKNPQFVFDIHKGSITDACLSVVAQTFMDSCSTSEHRLGKDSPSNKLLYAKDIPSYKSWVERYYADIAKLPAISDQDMNAYLAEQSRLHAVEFNMLSALNEIYSYVSKYSEELIGALEQDEQARRQRLAYKVEQLINAMSIES

SEQ ID NO: 47197 - protein, 652 aa, Homo sapiens [sequence omitted]

SEQ ID NO: 47198 - protein, 486 aa, Homo sapiens
MVLEVVVSRVTSSLAMLSDSFHMLSDVLALVVALVAERFARRTHATQKNTFGWIRAEVMGALVNAIFLTGLCFAILLEAIERFIEPHEMQQPLVVLGVGVAGLLVNVLGLCLFHHHSGFSQDSGHGHSHGGHGHGHGLPKGPRVKSTRPGSSDINVAPGEQGPDQEETNTLVANTSNSNGLKLDPADPENPRSGDTVEVQVNGNLVREPDHMELEEDRAGQLNMRGVFLHVLGDALGSVIVVVNALVFYFSWKGCSEGDFCVNPCFPDPCKAFVEIINSTHASVYEAGPCWVLYLDPTLCVVMVCILLYTTYPLLKESALILLQTVPKQIDIRNLIKELRNVEGVEEVHELHVWQLAGSRIIATAHIKCEDPTSYMEVAKTIKDVFHNHGIHATTIQPEFASVGSKSSVVPCELACRTQCALKQCCGTLPQAPSGKDAEKTPAVSISCLELSNNLEKKPRRTKAENIPAVVIEIKNMPNKQPESSL

SEQ ID NO: 47199 - protein, 936 aa, Homo sapiens
MELDKGLRSGKLGEQCEAVVRFPRLFQKYPFPILINSAFLKLADVFRVGNNFLRLCVLKVTQQSEKHLEKILNVDEFVKRIFSVIHSNDPVARAITLRMLGSLASIIPERKNAHHSIRQSLDSHDNVEVEAAVFAAANFSAQSKDFAVGICNKISEMIQGLATPVDLKLKLIPILQHMHHDAILASSARQLLQQLVTSYPSTKMVIVSLHTFTLLAASSLVDTPKQIQLLLQYLKNDPRKAVKRLAIQDLKLLANKTPHTWSRENIQALCECALQTPYDSLKLGMLSVLSTLSGTIAIKHYFSIVPGNVSSSPRSSDLVKLAQECCYHNNRGIAAHGVRVLTNITVSCQEKDLLALEQDAVFGLESLLVLCSQDDSPGAQATLKIALNCMVKLAKGRPHLSQSVVETLLTQLHSAQDAARILMCHCLAAIAMQLPVLGDGMLGDLMELYKVIGRSATDKQQELLVSLATVIFVASQKALSVESKAVIKQQLESVSNGWTVYRIARQASRMGNHDMAKELYQSLLTQVASEHFYFWLNSLKEFSHAEQCLTGLQEENYSSALSCIAESLKFYHKGIASLTAASTPLNPLSFQCEFVKLRIDLLQAFSQLICTCNSLKTSPPPAIATTIAMTLGNDLQRCGRISNQMKQSMEEFRSLASRYGDLYQASFDADSATLRNVELQQQSCLLISHAIEALILDPESASFQEYGSTGTAHADSEYERRMMSVYNHVLEEVESLNRKYTPVSYMHTACLCNAIIALLKVPLSFQRYFFQKLQSTSIKLALSPSPRNPAEPIAVQNNQQLALKVEGVVQHGSKPGLFRKIQSVCLNVSSTLQSKSGQDYKIPIDNMTNEMEQRVEPHNDYFSTQFLLNFAILGTHNITVESSVKDANGIVWKTGPRTTIFVKSLEDPYSQQIRLQQQQAQQPLQQQQQRNAYTRF

SEQ ID NO: 47200 - protein, 668 aa, Homo sapiens
MEHVLAVANEEGFVRLYNTESQSFRKKCFKEWMAHWNAVFDLAWVPGELKLVTAAGDQTAKFWDVKAGELIGTCKGHQCSLKSVAFSKFEKAVFCTGGRDGNIMVWDTRCNKKDGFYRQVNQISGAHNTSDKQTPSKPKKKQNSKGLAPSVDFQQSVTVVLFQDENTLVSAGAVDGIIKVWDLRKNYTAYRQEPIASKSFLYPGSSTRKLGYSSLILDSTGSTLFANCTDDNIYMFNMTGLKTSPVAIFNGHQNSTFYVKSSLSPDDQFLVSGSSDEAAYIWKVSTPWQPPTVLLGHSQEVTSVCWCPSDFTKIATCSDDNTLKIWRLNRGLEEKPGGDKLSTVGWASQKKKESRPGLVTVTSSQSTPAKAPRAKCNPSNSSPSSAACAPSCAGDLPLPSNTPTFSIKTSPAKARSPINRRGSVSSVSPKPPSSFKMSIRNWVTRTPSSSPPITPPASETKIMSPRKALIPVSQKSSQAEACSESRNRVKRRLDSSCLESVKQKCVKSCNCVTELDGQVENLHLDLCCLAGNQEDLSKDSLGPTKSSKIEGAGTSISEPPSPISPYASESCGTLPLPLRPCGEGSEMVGKENSSPENKNWLLAMAAKRKAENPSPRSPSSQTPNSRRQSGKKLPSPVTITPSSMRKICTYFHRKSQEDFCGPEHSTEL

SEQ ID NO: 47201 - protein, 522 aa, Homo sapiens
MFPHHSRSLGRDWTTPWENLQRCCWNRHISSCMRWPGHYSRAPYPYFSSRHFSLNWRPPCLFESRTQFQYCNWRPDNLSQTSLIHLSSYVMNAEGDEPSSKRRKHQGVIKRNWEYICSHDKEKTKILGDKNVDPKCEDSENKFDFSVMSYNILSQDLLEDNSHLYRHCRRPVLHWSFRFPNILKEIKHFDADVLCLQEVQEDHYGAEIRPSLESLGYHCEYKMRTGRKPDGCAICFKHSKFSLLSVNPVEFFRPDISLLDRDNVGLVLLLQPKIPYAACPAICVANTHLLYNPRRGDIKLTQLAMLLAEISSVAHQKDGSFCPIVMCGDFNSVPGSPLYSFIKEGKLNYEGLPIGKVSGQEQSSRGQRILSIPIWPPNLGISQNCVYEVQQVPKVEKTDSDLTQTQLKQTEVLVTAEKLSSNLQHHFSLSSVYSHYFPDTGIPEVTTCHSRSAITVDYIFYSAEKEDVAGHPGAEVALVGGLKLLARLSLLTEQDLWTVNGLPNENNSSDHLPLLAKFRLEL

SEQ ID NO: 47202 - protein, 769 aa, Homo sapiens
MRAESISSLYGKPQLDDVSQPPGSLSSRPLWNLRSPAEELKAFRVLGVIDKVLLVMDTRTEQTFILKGLRKSSEYSRNRKTIIPRCVPNMVCLHKYIISEESVFLVLQHAEGGKLWSYISKFLNRSPEESFDIKEVKKPTLAKVHLQQPTSSPQDSSSFESRGSDGGSMLKALPLKSSLTPSSQDDSNQEDDGQDSSPKWPDSGSSSEEECTTSYLTLCNEYGQEKIEPGSLNEEPFMKTEGNGVDTKAIKSFPAHLAADSDSPSTQLRAHELKFFPNDDPEAVSSPRTSDSLSRSKNSPMEFFRIDSKDSASELLGLDFGEKLYSLKSEPLKPFFTLPDGDSASRSFNTSESKVEFKAQDTISRGSDDSVPVISFKDAAFDDVSGTDEGRPDLLVNLPGELESTREAAAMGPTKFTQTNIGIIENKLLEAPDVLCLRLSTEQCQAHEEKGIEELSDPSGPKSYSITEKHYAQEDPRMLFVAAVDHSSSGDMSLLPSSDPKFQGLGVVESAVTANNTEESLFRICSPLSGANEYIASTDTLKTEEVLLFTDQTDDLAKEEPTSLFQRDSETKGESGLVLEGDKEIHQIFEDLDKKLALASRFYIPEGCIQRWAAEMVVALDALHREGIVCRDLNPNNILLNDRGHIQLTYFSRWSEVEDSCDSDAIERMYCAPEVGAITEETEACDWWSLGAVLFELLTGKTLVECHPAGINTHTTLNMPECVSEEARSLIQQLLQFNPLERLGAGVAGVEDIKSHPFFTPVDWAELMR

SEQ ID NO: 47203 - protein, 141 aa, Homo sapiens
MCQVLTDLIDEEVKSGIKKNRILIGGFSMGGCMAIHLAYRNHQDVAGVFALSSFLNKASAVYQALQKSNGVLPELFQCHGTADELVLHSWAEETNSMLKSLGVTTKFHSFPNVYHELSKTELDILKLWILTKLPGEMEKQK

SEQ ID NO: 47204 - protein, 1305 aa, Homo sapiens
MVIAREQKAVFLVPKWKYSDKGKEEMQFAVGWSGSLNVEEGECVTSALCIPLASQKRSSTGRPDWTCIVVGFTSGYVRFYTENGVLLLAQLLNEDPVLQLKCRTYEIPRHPGVTEQNEELSILYPAAIVTIDGFSLFQSLRACRNQVAKAAASGNENIQPPPLAYKKWGLQDIDTIIDHASVGIMTLSPFDQMKTASNIGGFNAAIKNSPPAMSQYITVGSNPFTGFFYALEGSTQPLLSHVALAVASKLTSALFNAASGWLGWKSKHEEEAVQKQKPKVEPATPLAVRFGLPDSRRHGESICLSPCNTLAAVTDDFGRVILLDVARGIAIRMWKGYRDAQIGWIQTVEDLHERVPEKADFSPFGNSQGPSRVAQFLVIYAPRRGILEVWSTQQGPRVGAFNVGKHCRLLYPGYKIMGLNNVTSQSWQPQTYQICLVDPVSGSVKTVNVPFHLALSDKKSERAKDMHLVKKLAALLKTKSPNLDLVETEIKELILDIKYPATKKQALESILASERLPFSCLRNITQTLMDTLKSQELESVDEGLLQFCANKLKLLQLYESVSQLNSLDFHLDTPFSDNDLALLLRLDEKELLKLQALLEKYKQENTRTNVRFSDDKDGVLPVKTFLEYLEYEKDVLNIKKISEEEYVALGSFFFWKCLHGESSTEDMCHTLESAGLSPQLLLSLLLSVWLSKEKDILDKPQSICCLHTMLSLLSKMKVAIDETWDSQSVSPWWQQMRTACIQSENNGAALLSAHVGHSVAAQISNNMTEKKFSQTVLGADSEALTDSWEALSLDTEYWKLLLKQLEDCLILQTLLHSKGNTQTSKVSSLQAEPLPRLSVKKLLEGGKGGIADSVAKWIFKQDFSPEVLKLANEERDAENPDEPKEGVNRSFLEVSEMEMDLGAIPDLLHLAYEQFPCSLELDVLHAHCCWEYVVQWNKDPEEARFFVRSIEHLKQIFNAHVQNGIALMMWNTFLVKRFSAATYLMDKVGKSPKDRLCRRDVGMSDTAMTSFLGSCLDLLQILMEADVSRDEIQVPVLDTEDAWLSVEGPISIVELALEQKHIHYPLVEHHSILCSILYAVMRFSLKTVKPLSLFDSKGKNAFFKDLTSIQLLPSGEMDPNFISVRQQFLLKVVSAAVQAQHSATKVKDPTEEATPTPFGKDQDWPALAVDLAHHLQVSEDVVRRHYVGELYNYGVDHLGEEAILQVHDKEVLASQLLVLTGQRLAHALLHTQTKEGMELLARLPPTLCTWLKAMDPQDLQNTEVPIATTAKLVNKVIELLPEKHGQYGLALHLIEAVEAISLPSL

SEQ ID NO: 47205 - protein, 1861 aa, Homo sapiens
MYRGEALEDFTGPDCRFVNFKKGDPVYVYYKLARGWPEVWAGSVGRTFGYFPKDLIQVVHEYTKEELQVPTDETDFVCFDGGRDDFHNYNVEELLGFLELYNSAATDSEKAVEKTLQDMEKNPELSKEREPEPEPVEANSEESDSVFSENTEDLQEQFTTQKHHSHANSQANHAQGEQASFESFEEMLQDKLKVPESENNKTSNSSQVSNEQDKIDAYKLLKKEMTLDLKTKFGSTADALVSDDETTRLVTSLEDDFDEELDTEYYAVGKEDEENQEDFDELPLLTFTDGEDMKTPAKSGVEKYPTDKEQNSNEEDKVQLTVPPGIKNDDKNILTTWGDTIFSIVTGGEETRDTMDLESSSSEEEKEDDDDALVPDSKQGKPQSATDYSDPDNVDDGLFIVDIPKTNNDKEVNAEHHIKGKGRGVQESKRGLVQDKTELEDENQEGMTVHSSVHSNNLNSMPAAEKGKDTLKSAYDDTENDLKGAAIHISKGMLHEEKPGEQILEGGSESESAQKAAGNQMNDRKIQQESLGSAPLMGDDHPNASRDSVEGDALVNGAKLHTLSVEHQREELKEELVLKTQNQPRFSSPDEIDLPRELEDEVPILGRNLPWQQERDVAATASKQMSEKIRLSEGEAKEDSLDEEFFHHKAMQGTEVGQTDQTDSTGGPAFLSKVEEDDYPSEELLEDENAINAKRSKEKNPGNQGRQFDVNLQVPDRAVLGTIHPDPEIEESKQETSMILDSEKTSETAAKGVNTGGREPNTMVEKERPLADKKAQRPFERSDFSDSIKIQTPELGEVFQNKDSDYLKNDNPEEHLKTSGLAGEPEGELSKEDHENTEKYMGTESQGSAAAEPEDDSFHWTPHTSVEPGHSDKREDLLIISSFFKEQQSLQRFQKYFNVHELEALLQEMSSKLKSAQQESLPYNMEKVLDKVFRASESQILSIAEKMLDTRVAENRDLGMNENNIFEEAAVLDDIQDLIYFVRYKHSTAEETATLVMAPPLEEGLGGAMEEMQPLHEDNFSREKTAELNVQVPEEPTHLDQRVIGDTHASEVSQKPNTEKDLDPGPVTTEDTPMDAIDANKQPETAAEEPASVTPLENAILLIYSFMFYLTKSLVATLPDDVQPGPDFYGLPWKPVFITAFLGIASFAIFLWRTVLVVKDRVYQVTEQQISEKLKTIMKENTELVQKLSNYEQKIKESKKHVQETRKQNMILSDEAIKYKDKIKTLEKNQEILDDTAKNLRVMLESEREQNVKNQDLISENKKSIEKLKDVISMNASEFSEVQIALNEAKLSEEKVKSECHRVQEENARLKKKKEQLQQEIEDWSKLHAELSEQIKSFEKSQKDLEVALTHKDDNINALTNCITQLNLLECESESEGQNKGGNDSDELANGEVGGDRNEKMKNQIKQMMDVSRTQTAISVVEEDLKLLQLKLRASVSTKCNLEDQVKKLEDDRNSLQAAKAGLEDECKTLRQKVEILNELYQQKEMALQKKLSQEEYERQEREHRLSAADEKAVSAAEEVKTYKRRIEEMEDELQKTERSFKNQIATHEKKAHENWLKARAAERAIAEEKREAANLRHKLLELTQKMAMLQEEPVIVKPMPGKPNTQNPPRRGPLSQNGSFGPSPVSGGECSPPLTVEPPVRPLSATLNRRDMPRSEFGSVDGPLPHPRWSAEASGKPSPSDPGSGTATMMNSSSRGSSPTRVLDEGKVNMAPKGPPPFPGVPLMSTPMGGPVPPPIRYGPPPQLCGPFGPRPLPPPFGPGMRPPLGLREFAPGVPPGRRDLPLHPRGFLPGHAPFRPLGSLGPREYFIPGTRLPPPTHGPQEYPPPPAVRDLLPSGSRDEPPPASQSTSQDCSQALKQSP

SEQ ID NO: 47206 - protein, 1186 aa, Homo sapiens
MYRGEALEDFTGPDCRFVNFKKGDPVYVYYKLARGWPEVWAGSVGRTFGYFPKDLIQVVHEYTKEELQVPTDETDFVCFDGGRDDFHNYNVEELLGFLELYNSAATDSEKAVEKTLQDMEKNPELSKEREPEPEPVEANSEESDSVFSENTEDLQEQFTTQKHHSHANSQANHAQGEQASFESFEEMLQDKLKVPESENNKTSNSSQVSNEQDKIDAYKLLKKEMTLDLKTKFGSTADALVSDDETTRLVTSLEDDFDEELDTEYYAVGKEDEENQEDFDELPLLTFTDGEDMKTPAKSGVEKYPTDKEQNSNEEDKVQLTVPPGIKNDDKNILTTWGDTIFSIVTGGEETRDTMDLESSSSEEEKEDDDDALVPDSKQGKPQSATDYSDPDNVDDGLFIVDIPKTNNDKEVNAEHHIKGKGRGVQESKRGLVQDKTELEDENQEGMTVHSSVHSNNLNSMPAAEKGKDTLKSAYDDTENDLKGAAIHISKGMLHEEKPGEQILEGGSESESAQKAAGNQMNDRKIQQESLGSAPLMGDDHPNASRDSVEGDALVNGAKLHTLSVEHQREELKEELVLKTQNQPRFSSPDEIDLPRELEDEVPILGRNLPWQQERDVAATASKQMSEKIRLSEGEAKEDSLDEEFFHHKAMQGTEVGQTDQTDSTGGPAFLSKVEEDDYPSEELLEDENAINAKRSKEKNPGNQGRQFDVNLQVPDRAVLGTIHPDPEIEESKQETSMILDSEKTSETAAKGVNTGGREPNTMVEKERPLADKKAQRPFERSDFSDSIKIQTPELGEVFQNKDSDYLKNDNPEEHLKTSGLAGEPEGELSKEDHENTEKYMGTESQGSAAAEPEDDSFHWTPHTSVEPGHSDKREDLLIISSFFKEQQSLQRFQKYFNVHELEALLQEMSSKLKSAQQESLPYNMEKVLDKVFRASESQILSIAEKMLDTRVAENRDLGMNENNIFEEAAVLDDIQDLIYFVRYKHSTAEETATLVMAPPLEEGLGGAMEEMQPLHEDNFSREKTAELNVQVPEEPTHLDQRVIGDTHASEVSQKPNTEKDLDPGPVTTEDTPMDAIDANKQPETAAEEPASVTPLENAILLIYSFMFYLTKSLVATLPDDVQPGPDFYGLPWKPVFITAFLGIASFAIFLWRTVLVVSKLMHTLTHKFKYGFIITVLLFLFQFLI

SEQ ID NO: 47207 - protein, 355 aa, Homo sapiens
MKNAADSYFSLLQGFINSLDESTQESKLRYIQNFKWTDTLQGQVPSAQQDAVFELISMGFNVALWYTKYASRLAGKENITEDEAKEVHRSLKIAAGIFKHLKESHLPKLITPAEKGRDLESRLIEAYVIQCQAEAQEVTIARAIELKHAPGLIAALAYETANFYQKADHTLSSLEPAYSAKWRKYLHLKMCFYTAYAYCYHGETLLASDKCGEAIRSLQEAEKLYAKAEALCKEYGETKGPGPTVKPSGHLFFRKLGNLVKNTLEKCQRENGFIYFQKIPTEAPQLELKANYGLVEPIPFEFPPTSVQWTPETLAAFDLTKRPKDDSTKPKPEEEVKPVKEPDIKPQKDTGCYIS

SEQ ID NO: 47208 - protein, 323 aa, Homo sapiens
MKNAADSYFSLLQGFINSLDESTQESKLRYIQNFKWTDTLQGQVPSITEDEAKEVHRSLKIAAGIFKHLKESHLPKLITPAEKGRDLESRLIEAYVIQCQAEAQEVTIARAIELKHAPGLIAALAYETANFYQKADHTLSSLEPAYSAKWRKYLHLKMCFYTAYAYCYHGETLLASDKCGEAIRSLQEAEKLYAKAEALCKEYGETKGPGPTVKPSGHLFFRKLGNLVKNTLEKCQRENGFIYFQKIPTEAPQLELKANYGLVEPIPFEFPPTSVQWTPETLAAFDLTKRPKDDSTKPKPEEEVKPVKEPDIKPQKDTGCYIS

SEQ ID NO: 47209 - protein, 1125 aa, Homo sapiens
MFLTVYLSNNEQHFTEVPVTPETICRDVVDLCKEPGESDCHLAEVWCGSERPVADNERMFDVLQRFGSQRNEVRFFLRHERPPGRDIVSGPRSQDPSLKRNGVKVPGEYRRKENGVNSPRMDLTLAELQEMASRQQQQIEAQQQLLATKEQRLKFLKQQDQRQQQQVAEQEKLKRLKEIAENQEAKLKKVRALKGHVEQKRLSNGKLVEEIEQMNNLFQQKQRELVLAVSKVEELTRQLEMLKNGRIDSHHDNQSAVAELDRLYKELQLRNKLNQEQNAKLQQQRECLNKRNSEVAVMDKRVNELRDRLWKKKAALQQKENLPVSSDGNLPQQAASAPSRVAAVGPYIQSSTMPRMPSRPELLVKPALPDGSLVIQASEGPMKIQTLPNMRSGAASQTKGSKIHPVGPDWSPSNADLFPSQGSASVPQSTGNALDQVDDGEVPLREKEKKVRPFSMFDAVDQSNAPPSFGTLRKNQSSEDILRDAQVANKNVAKVPPPVPTKPKQINLPYFGQTNQPPSDIKPDGSSQQLSTVVPSMGTKPKPAGQQPRVLLSPSIPSVGQDQTLSPGSKQESPPAAAVRPFTPQPSKDTLLPPFRKPQTVAASSIYSMYTQQQAPGKNFQQAVQSALTKTHTRGPHFSSVYGKPVIAAAQNQQQHPENIYSNSQGKPGSPEPETEPVSSVQENHENERIPRPLSPTKLLPFLSNPYRNQSDADLEALRKKLSNAPRPLKKRSSITEPEGPNGPNIQKLLYQRTTIAAMETISVPSYPSKSASVTASSESPVEIQNPYLHVEPEKEVVSLVPESLSPEDVGNASTENSDMPAPSPGLDYEPEGVPDNSPNLQNNPEEPNPEAPHVLDVYLEEYPPYPPPPYPSGEPEGPGEDSVSMRPPEITGQVSLPPGKRTNLRKTGSERIAHGMRVKFNPLALLLDSSLEGEFDLVQRIIYEVDDPSLPNDEGITALHNAVCAGHTEIVKFLVQFGVNVNAADSDGWTPLHCAASCNNVQVCKFLVESGAAVFAMTYSDMQTAADKCEEMEEGYTQCSQFLYGVQEKMGIMNKGVIYALWDYEPQNDDELPMKEGDCMTIIHREDEDEIEWWWARLNDKEGYVPRNLLGLYPRIKPRQRSLA

SEQ ID NO: 47210 - protein, 927 aa, Homo sapiens
MKSGGGPGPSGSETPPPPRRAVLSPGSVFSPGRGASFLFPPAESLSPEEPRSPGGWRSGRRRLNSSSGSGSGSSGSSVSSPSWAGRLRGDRQQVVAAGTLSPPGPEEAKRKLRILQRELQNVQVNQKVGMFEAHIQAQSSAIQAPRSPRLGRARSPSPCPFRSSSQPPGRVLVQGARSEERRTKSWGEQCPETSGTDSGRKGGPSLCSSQVKKGMPPLPGRAAPTGSEAQGPSAFVRMEKGIPASPRCGSPTAMEIDKRGSPTPGTRSCLAPSLGLFGASLTMATEVAARVTSTGPHRPQDLALTEPSGRARELEDLQPPEALVERQGQFLGSETSPAPERGGPRDGEPPGKMGKGYLPCGMPGSGEPEVGKRPEETTVSVQSAESSDSLSWSRLPRALASVGPEEARSGAPVGGGRWQLSDRVEGGSPTLGLLGGSPSAQPGTGNVEAGIPSGRMLEPLPCWDAAKDLKEPQCPPGDRVGVQPGNSRVWQGTMEKAGLAWTRGTGVQSEGTWESQRQDSDALPSPELLPQDPDKPFLRKACSPSNIPAVIITDMGTQEDGALEETQGSPRGNLPLRKLSSSSASSTGFSSSYEDSEEDISSDPERTLDPNSAFLHTLDQQKPRVSKSWRKIKNMVHWSPFVMSFKKKYPWIQLAGHAGSFKAAANGRILKKHCESEQRCLDRLMVDVLRPFVPAYHGDVVKDGERYNQMDDLLADFDSPCVMDCKMGIRTYLEEELTKARKKPSLRKDMYQKMIEVDPEAPTEEEKAQRAVTKPRYMQWRETISSTATLGFRIEGIKKEDGTVNRDFKKTKTREQVTEAFREFTKGNHNILIAYRDRLKAIRTTLEVSPFFKCHEVIGSSLLFIHDKKEQAKVWMIDFGKTTPLPEGQTLQHDVPWQEGNREDGYLSGLNNLVDILTEMSQDAPLA

SEQ ID NO: 47211 - protein, 228 aa, Homo sapiens
MAPVGRWQKGRDLTWYAKGRAPCAGPSREEELAAVREAEREALLAALGYKNVKKQPTGLSKEDFAEVCKREGGDPEEKGVDRLLGLGSASGSVGRVAMSREDKEAAKLGLSVFTHHRVESGGPGTSAASARRKPRAEDQTESSCESHRKSKKEKKKKKKRKHKKEKKKKDKEHRRPAEATSSPTSPERPRHHHHDSDSNSPCCKRRKRGHSGDRRSPSRRWHDRGSEA

SEQ ID NO: 47212 - protein, 225 aa, Homo sapiens
MNRICVLDVDLQGVRNIKATDLRPIYISVQPPSLHVLEQRLRQRNTETEESLVKRLAAAQADMESSKEPGLFDVVIINDSLDQAYAELKEALSEVGPSLCLPGQGPRGGLGARPLLSMRPLRLDGTVLPKHWHETPRSTVEGEQEAQPFLDTSPPNSLSSSLAGNQESSKDRRLRLAVCSRHPGPIQDQGSSIEPPPWQAIRQLCALGQHVEWRRCCPCGWNILG

SEQ ID NO: 47213 - protein, 732 aa, Homo sapiens [sequence omitted]

SEQ ID NO: 47214 - protein, 733 aa, Homo sapiens [sequence omitted]

SEQ ID NO: 47215 - protein, 312 aa, Homo sapiens [sequence omitted]

SEQ ID NO: 47216 - protein, 162 aa, Homo sapiens
MFAIAALGWSAVAQSQLTAALNSWAQAILLPRPPQVAGTTEQTAYFIGIFTFLWVERPMTAKKKPNFILLLKALLLSSYGKLLLIPAVIWEHDYTSVCLKLIKVFVLTSNFQAIRVTLNINRKLSFLAVLSGLLLESIMVYFFQSMEWDVGSDYAIFKSQDF

SEQ ID NO: 47217 - protein, 484 aa, Homo sapiens
MLALRLQEEWNLQEAERDHAQESLSLVDASWELVDPTPDLQALFVQFNDQFFWGQLEAVEVKWSVRMTLCAGICSYEGKGGMCSIRLSEPLLKLRPRKDLVETLLHEMIHAYLFVTNNDKDREGHGPEFCKHMHRINSLTGANITVYHTFHDEVDEYRRHWWRCNGPCQHRPPYYGYVKRATNREPSAHDYWWAEHQKTCGGTYIKIKEPENYSKKGKGKAKLGKEPVLAAENKDKPNRGEAQLVIPFSGKGYVLGETSNLPSPGKLITSHAINKTQDLLNQNHSANAVRPNSKIKVKFEQNGSSKNSHLVSPAVSNSHQNVLSNYFPRVSFANQKAFRGVNGSPRISVTVGNIPKNSVSSSSQRRVSSSKISLRNSSKVTESASVMPSQDVSGSEDTFPNKRPRLEDKTVFDNFFIKKEQIKSSGNDPKYSTTTAQNSSSSSSQSKMVNCPVCQNEVLESQINEHLDWCLEGDSIKVKSEESL

SEQ ID NO: 47218 - protein, 1453 aa, Homo sapiens
MGRDRDKPFKRRLKSESVETSLFRKLRTVKSEHETFKFTSELEESRLERGIRPWNCQRCFAHYDVQSILFNINEAMATRANVGKRKNITTGASAASQTQMPTGQTGNCESPLGSKEDLNSKENLDADEGDGKSNDLVLSCPYFRNETGGEGDRRIALSRANSSSFSSGESCSFESSLSSHCTNAGVSVLEVPRENQPIHREKVKRYIIEHIDLGAYYYRKFFYGKEHQNYFGIDENLGPVAVSIRREKVEDAKEKEGSQFNYRVAFRTSELTTLRGAILEDAIPSTARHGTARGLPLKEVLEYVIPELSIQCLRQASNSPKVSEQLLKLDEQGLSFQHKIGILYCKAGQSTEEEMYNNETAGPAFEEFLDLLGQRVRLKGFSKYRAQLDNKTDSTGTHSLYTTYKDYELMFHVSTLLPYMPNNRQQLLRKRHIGNDIVTIVFQEPGALPFTPKSIRSHFQHVFVIVKVHNPCTENVCYSVGVSRSKDVPPFGPPIPKGVTFPKSAVFRDFLLAKVINAENAAHKSEKFRAMATRTRQEYLKDLAENFVTTATVDTSVKFSFITLGAKKKEKVKPRKDAHLFSIGAIMWHVIARDFGQSADIECLLGISNEFIMLIEKDSKNVVFNCSCRDVIGWTSGLVSIKVFYERGECVLLSSVDNCAEDIREIVQRLVIVTRGCETVEMTLRRNGLGQLGFHVNFEGIVADVEPFGFAWKAGLRQGSRLVEICKVAVATLTHEQMIDLLRTSVTVKVVIIQPHDDGSPRRGCSELCRIPMVEYKLDSEGTPCEYKTPFRRNTTWHRVPTPALQPLSRASPIPGTPDRLPCQQLLQQAQAAIPRSTSFDRKLPDGTRSSPSNQSSSSDPGPGGSGPWRPQVGYDGCQSPLLLEHQGSGPLECDGAREREDTMEASRHPETKWHGPPSKVLGSYKERALQKDGSCKDSPNKLSHIGDKSCSSHSSSNTLSSNTSSNSDDKHFGSGDLMDPELLGLTYIKGASTDSGIDTAPCMPATILGPVHLAGSRSLIHSRAEQWADAADVSGPDDEPAKLYSVHGYASTISAGSAAEGSMGDLSEISSHSSGSHHSGSPSAHCSKSSGSLDSSKVYIVSHSSGQQVPGSMSKPYHRQGAVNKYVIGWKKSEGSPPPEEPEVTECPGMYSEMDVMSTATQHQTVVGDAVAETQHVLSKEDFLKLMLPDSPLVEEGRRKFSFYGNLSPRRSLYRTLSDESICSNRRGSSFGSSRSSVLDQALPNDILFSTTPPYHSTLPPRAHPAPSMGSLRNEFWFSDGSLSDKSKCADPGLMPLPDTATGLDWTHLVDAARAFEGLDSDEELGLLCHHTSYLDQRVASFCTLTDMQHGQDLEGAQELPLCVDPGSGKEFMDTTGERSPSPLTGKVNQLELILRQLQTDLRKEKQDKAVLQAEVQHLRQDNMRLQEESQTATAQLRKFTEWFFTTIDKKS

SEQ ID NO: 47219 - protein, 560 aa, Homo sapiens
MIWDFTEPVCRGCVNYEGADRVEFVIETARQLKRAHGCFPEGRSPPGAAASAAAKPPPLSAKDILLQQQQQLGHGGPEAAPRAPQALERYPLAAAAERPPRLGSDFGSSRPAASLAQPPTPQPPPVNGILVPNGFSKLEEPPELNRQSPNPRRGHAVPPTLVPLMNGSATPLPTALGLGGRAAASLAAVSGTAAASLGSAQPTDLGAHKRPASVSSSAAVEHEQREAAAKEKQPPPPAHRGPADSLSTAAGAAELSAEGAGKSRGSGEQDWVNRPKTVRDTLLALHQHGHSGPFESKFKKEPALTAGRLLGFEANGANGSKAVARTARKRKPSPEPEGEVGPPKINGEAQPWLSTSTEGLKIPMTPTSSFVSPPPPTASPHSNRTTPPEAAQNGQSPMAALILVADNAGGSHASKDANQVHSTTRRNSNSPPSPSSMNQRRLGPREVGGQGAGNTGGLEPVHPASLPDSSLATSAPLCCTLCHERLEDTHFVQCPSVPSHKFCFPCSRQSIKQQGASGEVYCPSGEKCPLVGSNVPWAFMQGEIATILAGDVKVKKERDS

SEQ ID NO: 47220 - protein, 544 aa, Homo sapiens
MIWDFTEPVCRGCVNYEGADRVEFVIETARQLKRAHGCFPEGRSPPGAAASAAAKPPPLSAKDILLQQQQQLGHGGPEAAPRAPQALERYPLAAAAERPPRLGSDFGSSRPAASLAQPPTPQPPPVNGILVPNGFSKLEEPPELNRQSPNPRRGHAVPPTLVPLMNGSATPLPTALGLGGRAAASLAAVSGTAAASLGSAQPTDLGAHKRPASVSSSAAVEHEQREAAAKEKQPPPPAHRGPADSLSTAAGAAELSAEGAGKSRGSGEQDWVNRPKTVRDTLLALHQHGHSGPFESKFKKEPALTAVARTARKRKPSPEPEGEVGPPKINGEAQPWLSTSTEGLKIPMTPTSSFVSPPPPTASPHSNRTTPPEAAQNGQSPMAALILVADNAGGSHASKDANQVHSTTRRNSNSPPSPSSMNQRRLGPREVGGQGAGNTGGLEPVHPASLPDSSLATSAPLCCTLCHERLEDTHFVQCPSVPSHKFCFPCSRQSIKQQGASGEVYCPSGEKCPLVGSNVPWAFMQGEIATILAGDVKVKKERDS

SEQ ID NO: 47221 - protein, 25 aa, Homo sapiens
MLLTKLPTISQRIVSAQSLAEDDVE

SEQ ID NO: 47222 - protein, 59 aa, Homo sapiens
MTIQKVKGLLSRLLKVPVSDLLLSYESPKKPGREIELENDLKSLQFYSVENGDCLLVRW

SEQ ID NO: 47223 - protein, 2062 aa, Homo sapiens
MRQGRHLCFQLVSPTGTAVSTLSYISRTNQLAVGFSDGYLALWNMKSMKREYYIQLESGQVPVYAVTFQEPENDPRNCCYLWAVQSTQDSEGDVLSLHLLQLAFGNRKCLASGQILYEGLEYCEERYTLDLTGGMFPLRGQTSNTKLLGCQSIEKFRSHGDREEGVNEALSPDTSVSVFTWQVNIYGQGKPSVYLGLFDINRWYHAQMPDSLRSGEYLHNCSYFALWSLESVVSRTSPHGILDILVHERSLNRGVPPSYPPPEQFFNPSTYNFDATCLLNSGVVHLTCTGFQKETLTFLKKSGPSLNELIPDGYNRCLVAGLLSPRFVDVQPSSLSQEEQLEAILSAAIQTSSLGLLTGYIRRWITEEQPNSATNLRFVLEWTWNKVVLTKEEFDRLCVPLFDGSCHFMDPQTIQSIQQCYLLLSNLNIVLSCFASEAREITERGLIDLSNKFVVSHLICQYAQVVLWFSHSGLLPEGIDDSVQLSRLCYNYPVIQNYYTSRRQKFERLSRGKWNPDCLMIDGLVSQLGERIEKLWKRDEGGTGKYPPASLHAVLDMYLLDGVTEAAKHSITIYLLLDIMYSFPNKTDTPIESFPTVFAISWGQVKLIQGFWLIDHNDYESGLDLLFHPATAKPLSWQHSKIIQAFMSQGEHRQALRYIQTMKPTVSSGNDVILHLTVLLFNRCMVEAWNFLRQHCNRLNIEELLKHMYEVCQEMGLMEDLLKLPFTDTEQECLVKFLQSSASVQNHEFLLVHHLQRANYVPALKLNQTLKINVMNDRDPRLRERSLARNSILDQYGKILPRVHRKLAIERAKPYHLSTSSVFRLVSRPKPLSAVPKQVVTGTVLTRSVFINNVLSKIGEVWASKEPINSTTPFNSSKIEEPSPIVYSLPAPELPEAFFGTPISKASQKISRLLDLVVQPVPRPSQCSEFIQQSSMKSPLYLVSRSLPSSSQLKGSPQAISRASELHLLETPLVVKKAKSLAMSVTTSGFSEFTPQSILRSTLRSTPLASPSPSPGRSPQRLKETRISFVEEDVHPKWIPGAADDSKLEVFTTPKKCAVPVETEWLKSKDRTTSFFLNSPEKEHQEMDEGSQSLEKLDVSKGNSSVSITSDETTLEYQDAPSPEDLEETVFTASKPKSSSTALTTNVTEQTEKDGDKDVFASEVTPSDLQKQMGNLEDAETKDLLVAAEAFSELNHLSPVQGTEASLCAPSVYEGKIFTQKSKVPVLDEGLTSVETYTPAIRANDNKSMADVLGDGGNSSLTISEGPIVSERRLNQEVALNLKEDHEVEVGVLKESVDLPEEKLPISDSPPDTQEIHVIEQEKLEAQDSGEEARNLSFNELYPSGTLKLQYNFDTIDQQFCDLADNKDTAECDIAEVDGELFVAQSNFTLILEGEEGEVEPGDFASSDVLPKAANTATEEKLVCSGENDNHGQIANLPSAVTSDQKSQKVDTLPYVPEPIKVAIAENLLDVIKDTRSKEITSDTMEQSIHETIPLVSQNIMCPTKLVKSAFKTAQETSTMTMNVSQVDDVVSSKTRTRGQRIQNVNVKSAQQEASADVATPKMPGQSVRKKTRKAKEISEASENIYSDVRGLSQNQQIPQNSVTPRRGRRKKEVNQDILENTSSVEQELQITTGRESKRLKSSQLLEPAVEETTKKEVKVSSVTKRTPRRIKRSVENQESVEIINDLKVSTVTSPSRMIRKLRSTNLDASENTGNKQDDKSSDKQLRIKHVRRVRGREVSPSDVREDSNLESSQLTVQAEFDMSAIPRKRGRPRKINPSEDVGSKAVKEERSPKKKEAPSIRRRSTRNTPAKSENVDVGKPALGKSILVPNEELSMVMSSKKKLTKKTESQSQKRSLHSVSEERTDEMTHKETNEQEERLLATASFTKSSRSSRTRSSKAILLPDLSEPNNEPLFSPASEVPRKAKAKKIEVPAQLKELVSDLSSQFVISPPALRSRQKNTSNKNKLEDELKDDAQSVETLGKPKAKRIRTSKTKQASKNTEKESAWSPPPIEIRLISPLASPADGVKSKPRKTTEVTGTGLGRNRKKLSSYPKQILRRKML

SEQ ID NO: 47224 - protein, 346 aa, Homo sapiens
MQETCRNLASVGSQWKDQNIEDHFEKPGKDIRNHIVQRLCESKEDGQYGEVVSQIPNLDLNENISTGLKPCECSICGKVFVRHSLLNRHILAHSGYKPYGEKQYKCEQCGKFFVSVPGVRRHMIMHSGNPAYKCTICGKAFYFLNSVERHQRTHTGEKPYKCKQCGKAFTVSGSCLIHERTHTGEKPYECKECGKTFRFSCSFKTHERTHTGERPYKCTKCDKAFSCSTSLRYHGSIHTGERPYECKQCGKAFSRLSSLCNHRSTHTGEKPYECKQCDQAFSRLSSLHLHERIHTGEKPYECKKCGKAYTRSSHLTRHERSHDIEAGCSDSAYNPSTLGGQGVWIA

SEQ ID NO: 47225 - protein, 235 aa, Homo sapiens
MADKNRLDPTWQEMLNHATCKVNEAEEERLRGEREHQRVTRLCQQAEARVQALQKTLRRAIGKSRPYFELKAQFSQILEEHKAKVTELEQQVAQAKTRYSVALRNLEQISEQIHARRRGGLPPHPLGPRRSSPVGAEAGPEDMEDGDSGIEGAEGAGLEEGSSLGPGPAPDTDTLSLLSLRTVASDLQKCDSVEHLRGLSDHVSLDGQELGTRSGGRRGSDGGARGGRHQRSVSL

SEQ ID NO: 47226 - protein, 562 aa, Homo sapiens
MSRVHGMHPKETTRQLSLAVKDGLIVETLTVGCKGSKAGIEQEGYWLPGDEIDWETENHDWYCFECHLPGEVLICDLCFRVYHSKCLSDEFRLRDSSSPWQCPVCRSIKKKNTNKQEMGTYLRFIVSRMKERAIDLNKKGKDNKHPMYRRLVHSAVDVPTIQEKVNEGKYRSYEEFKADAQLLLHNTVIFYGADSEQADIARMLYKDTCHELDELQLCKNCFYLSNARPDNWFCYPCIPNHELVWAKMKGFGFWPAKVMQKEDNQVDVRFFGHHHQRAWIPSENIQDITVNIHRLHVKRSMGWKKACDELELHQRFLREGRFWKSKNEDRGEEEAESSISSTSNEQLKVTQEPRAKKGRRNQSVEPKKEEPEPETEAVSSSQEIPTMPQPIEKVSVSTQTKKLSASSPRMLHRSTQTTNDGVCQSMCHDKYTKIFNDFKDRMKSDHKRETERVVREALEKLRSEMEEEKRQAVNKAVANMQGEMDRKCKQVKEKCKEEFVEEIKKLATQHKQLISQTKKKQWCYNCEEEAMYHCCWNTSYCSIKCQQEHWHAEHKRTCRRKR

SEQ ID NO: 47227 - protein, 508 aa, Homo sapiens
MSRVHGMHPKETTRQLSLAVKDGLIVETLTVGCKGSKAGIEQEGYWLPGDEISIKKKNTNKQEMGTYLRFIVSRMKERAIDLNKKGKDNKHPMYRRLVHSAVDVPTIQEKVNEGKYRSYEEFKADAQLLLHNTVIFYGADSEQADIARMLYKDTCHELDELQLCKNCFYLSNARPDNWFCYPCIPNHELVWAKMKGFGFWPAKVMQKEDNQVDVRFFGHHHQRAWIPSENIQDITVNIHRLHVKRSMGWKKACDELELHQRFLREGRFWKSKNEDRGEEEAESSISSTSNEQLKVTQEPRAKKGRRNQSVEPKKEEPEPETEAVSSSQEIPTMPQPIEKVSVSTQTKKLSASSPRMLHRSTQTTNDGVCQSMCHDKYTKIFNDFKDRMKSDHKRETERVVREALEKLRSEMEEEKRQAVNKAVANMQGEMDRKCKQVKEKCKEEFVEEIKKLATQHKQLISQTKKKQWCYNCEEEAMYHCCWNTSYCSIKCQQEHWHAEHKRTCRRKR

SEQ ID NO: 47228 - protein, 477 aa, Homo sapiens
MSRVHGMHPKETTRQLSLAVKDGLIVETLTVGCKGSKAGIEQEGYWLPGDEISIKKKNTNKQEMGTYLRFIVSRMKERKVNEGKYRSYEEFKADAQLLLHNTVIFYGADSEQADIARMLYKDTCHELDELQLCKNCFYLSNARPDNWFCYPCIPNHELVWAKMKGFGFWPAKVMQKEDNQVDVRFFGHHHQRAWIPSENIQDITVNIHRLHVKRSMGWKKACDELELHQRFLREGRFWKSKNEDRGEEEAESSISSTSNEQLKVTQEPRAKKGRRNQSVEPKKEEPEPETEAVSSSQEIPTMPQPIEKVSVSTQTKKLSASSPRMLHRSTQTTNDGVCQSMCHDKYTKIFNDFKDRMKSDHKRETERVVREALEKLRSEMEEEKRQAVNKAVANMQGEMDRKCKQVKEKCKEEFVEEIKKLATQHKQLISQTKKKQWCYNCEEEAMYHCCWNTSYCSIKCQQEHWHAEHKRTCRRKR

SEQ ID NO: 47229 - protein, 531 aa, Homo sapiens
MSRVHGMHPKETTRQLSLAVKDGLIVETLTVGCKGSKAGIEQEGYWLPGDEIDWETENHDWYCFECHLPGEVLICDLCFRVYHSKCLSDEFRLRDSSSPWQCPVCRSIKKKNTNKQEMGTYLRFIVSRMKERKVNEGKYRSYEEFKADAQLLLHNTVIFYGADSEQADIARMLYKDTCHELDELQLCKNCFYLSNARPDNWFCYPCIPNHELVWAKMKGFGFWPAKVMQKEDNQVDVRFFGHHHQRAWIPSENIQDITVNIHRLHVKRSMGWKKACDELELHQRFLREGRFWKSKNEDRGEEEAESSISSTSNEQLKVTQEPRAKKGRRNQSVEPKKEEPEPETEAVSSSQEIPTMPQPIEKVSVSTQTKKLSASSPRMLHRSTQTTNDGVCQSMCHDKYTKIFNDFKDRMKSDHKRETERVVREALEKLRSEMEEEKRQAVNKAVANMQGEMDRKCKQVKEKCKEEFVEEIKKLATQHKQLISQTKKKQWCYNCEEEAMYHCCWNTSYCSIKCQQEHWHAEHKRTCRRKR

SEQ ID NO: 47230 - protein, 1614 aa, Homo sapiens
MALPLEVRARLAELELELSEGDITQKGYEKKRSKLIGAYLPQPPTANGAAVVRCRLQHSEGAPRRTFRSAHIGVCDVREAAARERVASTAGNRPLFYFRFGVDQALPQERRAPVTPSSASRYHRRRSSGSRDERYRSDVHTEAVQAALAKHKERKMAVPMPSKRRSLVVQTSMDAYTPPDTSSGSEDEGSVQGDSQGTPTSSQGSINMEHWISQAIHGSTTSTTSSSSTQSGGSGAAHRLADVMAQTHIENHSAPPDVTTYTSEHSIQVERPQGSTGSRTAPKYGNAELMETGDGVPVSSRVSAKIQQLVNTLKRPKRPPLREFFVDDFEELLEVQQPDPNQPKPEGAQMLAMRGEQLGVVTNWPPSLEAALQRWGTISPKAPCLTTMDTNGKPLYILTYGKLWTRSMKVAYSILHKLGTKQEPMVRPGDRVALVFPNNDPAAFMAAFYGCLLAEVVPVPIEVPLTRKDAGSQQIGFLLGSCGVTVALTSDACHKGLPKSPTGEIPQFKGWPKLLWFVTESKHLSKPPRDWFPHIKDANNDTAYIEYKTCKDGSVLGVTVTRTALLTHCQALTQACGYTEAETIVNVLDFKKDVGLWHGILTSVMNMMHVISIPYSLMKVNPLSWIQKVCQYKAKVACVKSRDMHWALVAHRDQRDINLSSLRMLIVADGANPWSISSCDAFLNVFQSKGLRQEVICPCASSPEALTVAIRRPTDDSNQPPGRGVLSMHGLTYGVIRVDSEEKLSVLTVQDVGLVMPGAIMCSVKPDGVPQLCRTDEIGELCVCAVATGTSYYGLSGMTKNTFEVFPMTSSGAPISEYPFIRTGLLGFVGPGGLVFVVGKMDGLMVVSGRRHNADDIVATALAVEPMKFVYRGRIAVFSVTVLHDERIVIVAEQRPDSTEEDSFQWMSRVLQAIDSIHQVGVYCLALVPANTLPKTPLGGIHLSETKQLFLEGSLHPCNVLMCPHTCVTNLPKPRQKQPEIGPASVMVGNLVSGKRIAQASGRDLGQIEDNDQARKFLFLSEVLQWRAQTTPDHILYTLLNCRGAIANSLTCVQLHKRAEKIAVMLMERGHLQDGDHVALVYPPGIDLIAAFYGCLYAGCVPITVRPPHPQNIATTLPTVKMIVEVSRSACLMTTQLICKLLRSREAAAAVDVRTWPLILDTDDLPKKRPAQICKPCNPDTLAYLDFSVSTTGMLAGVKMSHAATSAFCRSIKLQCELYPSREVAICLDPYCGLGFVLWCLCSVYSGHQSILIPPSELETNPALWLLAVSQYKVRDTFCSYSVMELCTKGLGSQTESLKARGLDLSRVRTCVVVAEERPRIALTQSFSKLFKDLGLHPRAVSTSFGCRVNLAICLQPHRLWTLAEQGTSGPDPTTVYVDMRALRHDRVRLVERGSPHSLPLMESGKILPGVRIIIANPETKGPLGDSHLGEIWVHSAHNASGYFTIYGDESLQSDHFNSRLSFGDTQTIWARTGYLGFLRRTELTDANGERHDALYVVGALDEAMELRGMRYHPIDIETSVIRAHKSVTECAVFTWTNLLVVVVELDGSEQEALDLVPLVTNVVLEEHYLIVGVVVVVDIGVIPINSRGEKQRMHLRDGFLADQLDPIYVAYNM

SEQ ID NO: 47231 - protein, 711 aa, Homo sapiens [sequence omitted]

SEQ ID NO: 47232 - protein, 204 aa, Homo sapiens
MSLKPGEELSPTDENGKVIFDIVDLCTTWEAMEKCKDAGLAKSIGVSNFNRRQLEMILNKPGLKYKPVCNQVECHPYFNRSKLLDFCKSKDIVLVAYSALGSQRDKRWVDPNSPVLLEDPVLCALAKKHKRTPALIALRYQLQRGVVVLAKSYNEQRIRQNVQVFEFQLTAEDMKAIDGLDRNLHYFNSDSFASHPNYPYSDEY

SEQ ID NO: 47233 - protein, 153 aa, Homo sapiens
MSGSSECVRLLIDVGANLEAHDCHFGTPLHVACAREHLDCVKVLLNAGANVNAAKLHETALHHAAKVKNVDLIEMLIEFGGNIYARDNRGKKPSDYTWSSSAPAKCFEYYEKTPLTLSQLCRVNLRKATGVRGLEKIAKLNIPPRLIDYLSYN

SEQ ID NO: 47234 - protein, 2413 aa, Homo sapiens
MSPWKGKLIVQDRMLCDIALWSTYGAMIPTQLPQELDFKYVMKVSSLKKRLPEAAFRKQNYLEEKVCFQDLCFNLYEVELSNRQGENIDKLTECIKNKQLAIIKCLEDRGFFILLTSSALLSEPDFGGKQMGLHGLHLFRSPLSTGVKDLKVEDDISMKVIPILSTLNCALLETKKSLPEERIHPNTLVKRHFQELYKADRSPSLSVAPQDRMKDPTFLGKLPSGFDLIPPAEKCPSESLTQLNSYFSDPSAYILEVSTALDLLAEHPQSPCVSDGICDAGFSLVMTPDPEFLVSEAEVRKETETKKDSEEMLKAKKRVFPLSPASNLRVQPKRKASMPHMVQSKKVNLCRPFPKRTASRADNSSDSPTTLKLVKGQFPQKRKRGAEVLTAQFVQKTKLDRKNQEAPISKDVPVPTNAKRARKQEKSPVKTVPRAKPPVKKSPQKQRVNIVKGNENPRNRKQLQPVKGETASKLQSEISRGCQEDGISINSVQPENTTAAHNDLPENSIVNYDSQALNMLADLALSSATSSTPVSEARNLHCSSELPQNDVLLSKENSLRGTSDHEYHRGVKTQKGELLPNPSSDRKSNSGSDLTVSQDEESLVPCSQAPAKAQSALTEEMLESSDASQSSSVSVEHSYALLLTEHSKKHLQEREILSPLFPRNGTKSPEAATPVGKVMPFRHQPGLLLQQKPPDDPVVKPKDRPPSARVKKSSCSRIVLSCDDSVKITFKCETEYAFSLDSKYTNNPLEKTVVRALHGPWNTDLPDNVEEVKLLLHMWVALFYSNQNKIIRSSRKVVEHSNPAKYVSINSTLESCELREIEESLGLEKCSADSLLETNEISRAHAAEVSFRDPNCLLPFIKTPLTQGLELCVQNEQKKTFARECDPDTQEDQNFICSYNNEVTGEEAKQESLETSNLVLSGIGSTQTNGPSVPSEEEIVQPLDSTRVASYSGTVTQATFTRTYDGPGSQPVICQSSVYGTLENKVDILDAAVQTKTGTLQDLIQHGSPINNECHPSLERKDDNMGCAVINPEPITLTFEKNAHVPIQTEGVNTADERTTFKKELIKQVSPAASLRHPVSTSENARTQGLRDIPSLVVAGQKGTKYLCASSVGGETLDKAVCSLQKETPLPVSLPSDKTMVMEALSLAKSSSHLSPSEEVRCTQDFLSQTQSLLGLSSEGLLELTQVEVDSSSASTTLGRQCSLNCISSGCHTSGDSLELRKNHKNGPNTENMNLEAFDSVFIKQTSLSVSREVSLELSEEDSDIDLALTISPPTSPREEMPAGEIEQFEEAPFSNLELQDVAEEIGEPEEVALTESREVSSADNVSVYPSVSEEPVENKERKGDNLQPVTLILSKENCTLEIAEEINVTSDFPFDSVIEEVSPASSPEPPVPVKETRPYQAVTPCILKLHGTQCEKSNQISQCESEDLGITEKENVFVGPTHPVGQDNFTQVQQMQVSAEMPLILTDHPGRTGRPTLPGKVTEEIVSSEHDEGLSFSGKVQCYGRELNQPASAAKCTGDFSPSPEKLVKSGNPLQPVSIENRNLDLKHLVLESSEPPFGPRNVIENKSLSDTLVSTTAPSGIVNVSVKQQTSPKSSQNHLFPGDLKTDEGIYLQVKSLTAASVDGAYSTQGCMCSVVPTLCSSSDNATLTHYVRPINAEPVFQAQEIPAGRMASLLKNGEPEAELHKETTGPGTAGPQSNTTSSLKGERKAIHTLQDVSTCETKELLNVGVSSLCAGPYQNTADTKENLSKEPLASFVSESFDTSVCGIATEHVEIENSGEGLRAEAGSETLGRDGEVGVNSDMHYELSGDSDLDLLGDCRNPRLDLEDSYTLRGSYTRKKDVPTDGYESSLNFHNNNQEDWGCSSWVPGMETSLPPGHWTAAVKKEEKCVPPYVQIRDLHGILRTYANFSITKELKDTMRTSHGLRRHPSFSANCGLPSSWTSTWQVADDLTQNTLDLEYLRFAHKLKQTIKNGDSQHSASSANVFPKESPTQISIGAFPSTKISEAPFLHPAPRSRSPLLVTVVESDPRPQGQPRRGYTASSLDSSSSWRERCSHNRDLRNSQRNHTVSFHLNKLKYNSTVKESRNDISLILNEYAEFNKVMKNSNQFIFQDKELNDVSGEATAQEMYLPFPGRSASYEDIIIDVCTNLHVKLRSVVKEACKSTFLFYLVETEDKSFFVRTKNLLRKGGHTEIEPQHFCQAFHRENDTLIIIIRNEDISSHLHQIPSLLKLKHFPSVIFAGVDSPGDVLDHTYQELFRAGGFVISDDKILEAVTLVQLKEIIKILEKLNGNGRWKWLLHYRENKKLKEDERVDSTAHKKNIMLKSFQSANIIELLHYHQCDSRSSTKAEILKCLLNLQIQHIDARFAVLLTDKPTIPREVFENSGILVTDVNNFIENIEKIAAPFRSSYW

SEQ ID NO: 47235 - protein, 364 aa, Homo sapiens
MCQKQCRDENGFKCHCMSESHQRQLLLASENPQQFMDYFSEEFRNDFLELLRRRFGTKRVHNNIVYNEYISHREHIHMNATQWETLTDFTKWLGREGLCKVDETPKGWYIQYIDRDPETIRRQLELEKKKKQDLDDEEKTAKFIEEQVRRGLEGKEQEVPTFTELSRENDEEKVTFNLSKGACSSSGATSSKSSTLGPSALKTIGSSASVKRKESSQSSTQSKEKKKKKSALDEIMEIEEEKKRTARTDYWLQPEIIVKIITKKLGEKYHKKKAIVKEVIDKYTAVVKMIDSGDKLKLDQTHLETVIPAPGKRILVLNGGYRGNEGTLESINEKTFSATIVIETGPLKGRRVEGIQYEDISKLA

SEQ ID NO: 47236 - protein, 857 aa, Homo sapiens [sequence omitted]

SEQ ID NO: 47237 - protein, 219 aa, Homo sapiens [sequence omitted]

SEQ ID NO: 47238 - protein, 520 aa, Homo sapiens
MKLNNQAMKGRFEELSAWTEKQKEERQFFEIQSKEAKERLMALSHENEKLKEELGKLKGKSERSSEDPTDDSRLPRAEAEQEKDQLRTQVVRLQAEKADLLGIVSELQLKLNSSGSSEDSFVEIRMAEGEAEGSVKEIKHSPGPTRTVSTGTALSKYRSRSADGAKNYFEHEELTVSQLLLCLREGNQKVERLEVALKEAKERVSDFEKKTSNRSEIETQTEGSTEKENDEEKGPETVGSEVEALNLQVTSLFKELQEAHTKLSEAELMKKRLQEKCQALERKNSAIPSELNEKQELVYTNKKLELQVESMLSEIKMEQAKTEDEKSKLTVLQMTHNKLLQEHNNALKTIEELTRKESEKVDRAVLKELSEKLELAEKALASKQLQMDEMKQTIAKQEEDLETMTILRAQMEVYCSDFHAERAAREKIHEEKEQLALQLAVLLKENDAFEDGGRQSLMEMQSRHGARTSDSDQQAYLVQRGAEDRDWRQQRNIPIHSCPKCGEVLPDIDTLQIHVMDCII

SEQ ID NO: 47239 - protein, 514 aa, Homo sapiens
MKLNNQAMKGRFEELSAWTEKQKEERQFFEIQSKEAKERLMALSHENEKLKEELGKLKGKSERSSEDPTDDSRLPRAEAEQEKDQLRTQVVRLQAEKADLLGIVSELQLKLNSSGSSEDSFVEIRMAEGEAEGSVKEIKHSPGPTRTVSTGTSRSADGAKNYFEHEELTVSQLLLCLREGNQKVERLEVALKEAKERVSDFEKKTSNRSEIETQTEGSTEKENDEEKGPETVGSEVEALNLQVTSLFKELQEAHTKLSEAELMKKRLQEKCQALERKNSAIPSELNEKQELVYTNKKLELQVESMLSEIKMEQAKTEDEKSKLTVLQMTHNKLLQEHNNALKTIEELTRKESEKVDRAVLKELSEKLELAEKALASKQLQMDEMKQTIAKQEEDLETMTILRAQMEVYCSDFHAERAAREKIHEEKEQLALQLAVLLKENDAFEDGGRQSLMEMQSRHGARTSDSDQQAYLVQRGAEDRDWRQQRNIPIHSCPKCGEVLPDIDTLQIHVMDCII

SEQ ID NO: 47240 - protein, 365 aa, Homo sapiens
MRRLLNDSTGRIYQRVGKEGEKLKEEPQDLDLVWPPRLNSSAEAPQSLHPSSRGVWNELPPQSGQFSGQYGTRSRTFQSQPHPTTSSNGMVVNKHSEGSHGGELPVVNSSAGSNCCTCNCQSTLQAILQELKTMRKLMQIQAVGTQNRQQPPISLICSQRTAVSRKRNKKKKVPPKTVEPLTVKQKPSGSEMEKKSVVASELSALQAAEHTSPEESRVLGFGIVLESPSSDPEVQLAEGFDVFMPKSQLDSILSNYTRSGSLLFRKLVCAFFDDKTLANSLPNGKRKRGLNDNRKGLDQNIVGAIKVFTEKYCTANHVDKLPGPRDWVQILQDQIKLARRRLKRGSEIADSDERLDGIALPPTVV

SEQ ID NO: 47241 - protein, 75 aa, Homo sapiens
MPQMCKATSAALPQSQRSSTPSSEIGATPPSSPHHILTWQTGSYNDSCFLDSSLYPELADVQWYGQEKAKPGTLV

SEQ ID NO: 47242 - protein, 546 aa, Homo sapiens
MELLHSGGRVKDIQSVYLDTTFCDPRFYQIPSREECLSGVLELVRSWITRSPYHVVWLNCKAAYGYEYLFTNLSEELGVQVHVNKLDMFRNMPEILHHLTTDRNTQIHACRHPKAEEYFQWSKLPCGITSRNRIPLHIISIKPSTMWFGERSRKTNVIVRTGESSYRACFSFHSSYSEIKDFLSYLCPVNAYPNVIPVGTTMDKVVEILKPLCRSSQSTEPKYKPLGKLKRARTVHRDSEEEDDYLFDDPLPIPLRHKVPYPETFHPEVFSMTAVSEKQPEKLRQTPGCCRAECMQSSRFTNFVDCEESNSESEEEVGIPASLQGDLGSVLHLQKADGDVPQWEVFFKRNDEITDESLENFPSSTVAGGSQSPKLFSDSDGESTHISSQNSSQSTHITEQGSQGWDSQSDTVLLSSQERNSGDITSLDKADYRPTIKENIPASLMEQNVICPKDTYSDLKSRDKDVTIVPSTGEPTTLSSETHIPEEKSLLNLSTNADSQSSSDFEVPSTPEAELPKREHLQYLYEKLATGESIAVKKRKCSLLDT

SEQ ID NO: 47243 - protein, 1035 aa, Homo sapiens
MLLWSPACQAFNLDVEKLTVYSGPKGSYFGYAVDFHIPDARTASVLVGAPKANTSQPDIVEGGAVYYCPWPAEGSAQCRQIPFDTTNNRKIRVNGTKEPIEFKSNQWFGATVKAHKGKVVACAPLYHWRTLKPTPEKDPVGTCYVAIQNFSAYAEFSPCRNSNADPEGQGYCQAGFSLDFYKNGDLIVGGPGSFYWQGQVITASVADIIANYSFKDILRKLAGEKQTEVAPASYDDSYLGYSVAAGEFTGDSQQELVAGIPRGAQNFGYVSIINSTDMTFIQNFTGEQMASYFGYTVVVSDVNSDGLDDVLVGAPLFMEREFESNPREVGQIYLYLQVSSLLFRDPQILTGTETFGRFGSAMAHLGDLNQDGYNDIAIGVPFAGKDQRGKVLIYNGNKDGLNTKPSQVLQGVWASHAVPSGFGFTLRGDSDIDKNDYPDLIVGAFGTGKVAVYRARPVVTVDAQLLLHPMIINLENKTCQVPDSMTSAACFSLRVCASVTGQSIANTIVLMAEVQLDSLKQKGAIKRTLFLDNHQAHRVFPLVIKRQKSHQCQDFIVYLRDETEFRDKLSPINISLNYSLDESTFKEGLEVKPILNYYRENIVSEQAHILVDCGEDNLCVPDLKLSARPDKHQVIIGDENHLMLIINARNEGEGAYEAELFVMIPEEADYVGIERNNKGFRPLSCEYKMENVTRMVVCDLGNPMVSGTNYSLGLRFAVPRLEKTNMSINFDLQIRSSNKDNPDSNFVSLQINITAVAQVEIRGVSHPPQIVLPIHNWEPEEEPHKEEEVGPLVEHIYELHNIGPSTISDTILEVGWPFSARDEFLLYIFHIQTLGPLQCQPNPNINPQDIKPAASPEDTPELSAFLRNSTIPHLVRKRDVHVVEFHRQSPAKILNCTNIECLQISCAVGRLEGGESAVLKVRSRLWAHTFLQRKNDPYALASLVSFEVKKMPYTDQPAKLPEGSIVIKTSVIWATPNVSFSIPLWVIILAILLGLLVLAILTLALWKCGFFDRARPPQEDMTDREQLTNDKTPEA

SEQ ID NO: 47244 - protein, 515 aa, Homo sapiens
MLLCHFFTDQFQFADGKPGDQILDWQYGVTQAFPHTEEEVEVDSHAYSHRWKRNLDFLKAVDTNRASVGQDSPEPRSFTDLLLDDGQDNNTQIEEDTDHNYYISRIYGPSDSASRDLWVNIDQMEKDKVKIHGILSNTHRQAARVNLSFDFPFYGHFLREITVATGGFIYTGEVVHRMLTATQYIAPLMANFDPSVSRNSTVRYFDNGTALVVQWDHVHLQDNYNLGSFTFQATLLMDGRIIFGYKEIPVLVTQISSTNHPVKVGLSDAFVVVHRIQQIPNVRRRTIYEYHRVELQMSKITNISAVEMTPLPTCLQFNRCGPCVSSQIGFNCSWCSKLQRCSSGFDRHRQDWVDSGCPEESKEKMCENTEPVETSSRTTTTVGATTTQFRVLTTTRRAVTSQFPTSLPTEDDTKIALHLKDNGASTDDSAAEKKGGTLHAGLIIGILILVLIVATAILVTVYMYHHPTSAASIFFIERRPSRWPAMKFRRGSGHPAYAEVEPVGEKEGFIVSEQC

SEQ ID NO: 47245 - protein, 85 aa, Homo sapiens
MYEVIIASFSIGRSLPHITDVSWRLEYQIKTNQLHRMYRPAYLVTLSVQNTDSPSYPEISFSCSMEQLQDFLSSRNASNNENQDH

SEQ ID NO: 47246 - protein, 1858 aa, Homo sapiens
MDRKREAFLEHLKQKYPHHASAIMGHQERLRDQTRSPKLSHSPQPPSLGDPVEHLSETSADSLEAMSEGDAPTPFSRGSRTRASLPVVRSTNQTKERSLGVLYLQYGDETKQLRMPNEITSADTIRALFVSAFPQQLTMKMLESPSVAIYIKDESRNVYYELNDVRNIQDRSLLKVYNKDPAHAFNHTPKTMNGDMRMQRELVYARGDGPGAPRPGSTAHPPHAIPNSPPSTPVPHSMPPSPSRIPYGGTRSMVVPGNATIPRDRISSLPVSRPISPSPSAILERRDVKPDEDMSGKNIAMYRNEGFYADPYLYHEGRMSIASSHGGHPLDVPDHIIAYHRTAIRSASAYCNPSMQAEMHMEQSLYRQKSRKYPDSHLPTLGSKTPPASPHRVSDLRMIDMHAHYNAHGPPHTMQPDRASPSRQAFKKEPGTLVYIEKPRSAAGLSSLVDLGPPLMEKQVFAYSTATIPKDRETRERMQAMEKQIASLTGLVQSALFKGPITSYSKDASSEKMMKTTANRNHTDSAGTPHVSGGKMLSALESTVPPSQPPPVGTSAIHMSLLEMRRSVAELRLQLQQMRQLQLQNQELLRAMMKKAELEISGKVMETMKRLEDPVQRQRVLVEQERQKYLHEEEKIVKKLCELEDFVEDLKKDSTAASRLVTLKDVEDGAFLLRQVGEAVATLKGEFPTLQNKMRAILRIEVEAVRFLKEEPHKLDSLLKRVRSMTDVLTMLRRHVTDGLLKGTDAAQAAQYMAMEKATAAEVLKSQEEAAHTSGQPFHSTGAPGDAKSEVVPLSGMMVRHAQSSPVVIQPSQHSVALLNPAQNLPHVASSPAVPQEATSTLQMSQAPQSPQIPMNGSAMQSLFIEEIHSVSAKNRAVSIEKAEKKWEEKRQNLDHYNGKEFEKLLEEAQANIMKSIPNLEMPPATGPLPRGDAPVDKVELSEDSPNSEQDLEKLGGKSPPPPPPPPRRSYLPGSGLTTTRSGDVVYTGRKENITAKASSEDAGPSPQTRATKYPAEEPASAWTPSPPPVTTSSSKDEEEEEEEGDKIMAELQAFQKCSFMDVNSNSHAEPSRADSHVKDTRSGATVPPKEKKNLEFFHEDVRKSDVEYENGPQMEFQKVTTGAVRPSDPPKWERGMENSISDASRTSEYKTEIIMKENSISNMSLLRDSRNYSQETVPKASFGFSGISPLEDEINKGSKISGLQYSIPDTENQTLNYGKTKEMEKQNTDKCHVSSHTRLTESSVHDFKTEDQEVITTDFGQVVLRPKEARHANVNPNEDGESSSSSPTEENAATDNIAFMITETTVQVLSSGEVHDIVSQKGEDIQTVNIDARKEMTPRQEGTDNEDPVVCLDKKPVIIIFDEPMDIRSAYKRLSTIFEECDEELERMMMEEKIEEEEEEENGDSVVQNNNTSQMSHKKVAPGNLRTGQQVETKSQPHSLATETRNPGGQEMNRTELNKFSHVDSPNSECKGEDATDDQFESPKKKFKFKFPKKQLAALTQAIRTGTKTGKKTLQVVVYEEEEEDGTLKQHKEAKRFEIARSQPEDTPENTVRRQEQPSIESTSPISRTDEIRKNTYRTLDSLEQTIKQLENTISEMSPKALVDTSCSSNRDSVASSSHIAQEASPRPLLVPDEGPTALEPPTSIPSASRKGSSGAPQTSRMPVPMSAKNRPGTLDKPGKQSKLQDPRQYRQANGSAKKSGGDFKPTSPSLPASKIPALSPSSGKSSSLPSSSGDSSNLPNPPATKPSIASNPLSPQTGPPAHSASLIPSVSNGSLKFQSLTHTGKGHHLSFSPQSQNGRAPPPLSFSSSPPSPASSVSLNQGAKGTRTIHTPSLTSYKAQNGSSSKATPSTAKETS

SEQ ID NO: 47247 - protein, 189 aa, Homo sapiens
MATRRTGLSEGDGDKLKACEVSKNKDGKEQSETVSLSEDETFSWPGPKTVTLKRTSQGFGFTLRHFIVYPPESAIQFSYKDEENGNRGGKQRNRLEPMDTIFVKQVKEGGPAFEAGLCTGDRIIKVNGESVIGKTYSQVIALIQNSDTTLELSVMPKDEDILQVVSFIYSYMSCFTVMNVRKIFLRWKY

SEQ ID NO: 47248 - protein, 208 aa, Homo sapiens
MDDWPGYDLNLFTYPQHYYGDLEYVLIPHGIIVDRIERLAKDIMKDIGYSDIMVLCVLKGGYKFCADLVEHLKNISRNSDRFVSMKVDFIRLKSYRNDQSMGEMQIIGGDDLSTLAGKNVLIVEDVVGTGRTMKALLSNIEKYKPNMIKVASLLVKRTSRSDGFRPDYAGFEIPNLFVVGYALDYNEYFRDLNHICVINEHGKEKYRV

SEQ ID NO: 47249 - protein, 647 aa, Homo sapiens
MSVSEKLQDVGNEQFLEEEGKAVLNFSASGSVISLTGSNPMHDASMWHLKKNGIIVYLDVPLLDLICRLKLMKTDRIVGQNSGTSMKDLLKFRRQYYKKWYDARVFCESGASPEEVADKVLNAIKRYQDVDSETFISTRHVWPEDCEQKVSAKFFSEAVIEGLASDGGLFVPAKEFPKLSCGEWKSLVGATYVERAQILLERCIHPADIPAARLGEMIETAYGENFACSKIAPVRHLSGNQFILELFHGPTGSFKDLSLQLMPHIFAHCIPPSCNYMILVATSGDTGSAVLNGFSRLNKNDKQRIAVVAFFPENGVSDFQKAQIIGSQRENGWAVGVESDFDFCQTAIKRIFNDSDFTGFLTVEYGTILSSANSINWGRLLPQVVYHASAYLDLVSQGFISFGSPVDVCIPTGNFGNILAAVYAKMMGIPIRKFICASNQNHVLTDFIKTGHYDLRERKLAQTFSPSIDILKSSNLERHLHLMANKDGQLMTELFNRLESQHHFQIEKALVEKLQQDFVADWCSEGECLAAINSTYNTSGYILDPHTAVAKVVADRVQDKTCPVIISSTAHYSKFAPAIMQALKIKEINETSSSQLYLLGSYNALPPLHEALLERTKQQEKMEYQVCAADMNVLKSHVEQLVQNQFI

SEQ ID NO: 47250 - protein, 1632 aa, Homo sapiens [sequence omitted]

SEQ ID NO: 47251 - protein, 1161 aa, Homo sapiens
MSDGDGERLFQDLYPFIQGEHVLNSQNKGKSRSLPRVLSPESLSCTEIPIPLNERHSPKMPPYPPTCAPNLDSTRNSEKSGCSAPFPRPKFGRPLKPPSYSSHQQSRGGADSSDSQDSQQMDAYVPRHELCLSDPGLEPPVYVPPPSYRSPPQNIPNPYLEDTVPINVCGGHSQQQSPTEKAGASGQPPSGPPGTGNEYGVSPRLPQGLPAHPRPVTAYDGFVQYIPFDDPRLRHFKLAQPQGFCEDIKLDDKSYNSSPVTAQEPAHGGMQPDGAIWNPQSLIPPSGDERGLVLADSSPRWLWGQPPGDGENSGLPNQRDRCVARGQWPDVRGSQHGHTGRQVSSPYSQGESTCETQTKLKKFQTGTRTKKSSKKKMNETIFCLVSIPVKSESHLPDRDMDNNDLKPSADQKNGSDKSPALQEQSLLSMSSTDLELQALTGSMGGRTEFQKQDLGEPEEDRQTNDLSFIHLTKHRELKHSGSWPGHRYRDQQTQTSFSEEPQSSQLLPGAKLGGPSRAALSPKCSDPAASEAQTHTAFPTGDHKQRPSARNLKGHRSLSPSSNSAFSRTSLSVDQAPTPKAGRSQPCVDVHGLGAHPGPKREVVKGEPTGPCNSKQLFGQFLLKPVSRRPWDLISQLESFNKELQEEEESSSSSSSSSSSSEESEAEPQQENRAHCRQEDVGFRGNSPEMRVEPQPRMWVPESPVCRSGRGESKSESWSEELQPGHPRAWPPSPGRFRVEEGGGAPFCSADGSTSAEKRHLEVSNGMDELAGSPFPVTRMSSRSSDAKPLPASYPAEPREPQESPKITSAFSSVKPSEAVPRKFDSGGERGAGLPLSLSNKNRGLSAPDLRSVGLTPGQEQGASELEGSLGEASTIEIPPGESLQARAARILGIEVAVESLLPGIRRAGQNQPAEPDASACTPESPQEELLSRPAPADVPRVSTDAFYGRRKCGWTKSPLFVGDRDSARRAPQAFEHSDVDGVVTSTDPVPEPEPSPLESKFFEQKDVETKPPFRSTLFHFVERTPSVAGSEKRLRSPSKVIESLQEKLASPPRRADPDRLMRMKEVSSVSRMRVLSFRNADSQEDAEELKATTRGQAGLPGGLVSPGSGDRAQRLGHSLSVSKDSISREEKEHPAAQKEKSMDQDFWCPDSYDPSRVERV

SEQ ID NO: 47252 - protein, 464 aa, Homo sapiens
MSTGSDNKEEIDLLIKHLNVSDVIDIMENLYASEEPAVYEPSLMTMCQDSNQNDERSKSLLLSGQEVPWLSSVRYGTVEDLLAFANHISNTAKHFYGQRPQESGILLNMVITPQNGRYQIDSDVLLIPWKLTYRNIGSDFIPRGAFGKVYLAQDIKTKKRMACKLIPVDQFKPSDVEIQACFRHENIAELYGAVLWGETVHLFMEAGEGGSVLEKLESCGPMREFEIIWVTKHVLKGLDFLHSKKVIHHDIKPSNIVFMSTKAVLVDFGLSVQMTEDVYFPKDLRGTEIYMSPEVILCRGHSTKADIYSLGATLIHMQTGTPPWVKRYPRSAYPSYLYIIHKQAPPLEDIADDCSPGMRELIEASLERNPNHRPRAADLLKHEALNPPREDQPRCQSLDSALLERKRLLSRKELELPENIADSSCTGSTEESEMLKRQRSLYIDLGALAGYFNLVRGPPTLEYG

SEQ ID NO: 47253 - protein, 129 aa, Homo sapiens [sequence omitted]

SEQ ID NO: 47254 - protein, 742 aa, Homo sapiens
MVIPVPEAESNIAYYESIYPGEFKMPKQLIHIQPFSLDAEQPDYDLDSEDEVFVNKLKKKMDICPLQFEEMIDRLEKGSGQQPVSLQEAKLLLKEDDELIREVYEYWIKKRKNCRGPSLIPSVKQEKRDGSSTNDPYVAFRRRTEKMQTRKNRKNDEASYEKMLKLRRDLSRAVTILEMIKRREKSKRELLHLTLEIMEKRYNLGDYNGEIMSEVMAQRQPMKPTYAIPIIPITNSSQFKHQEAMDVKEFKVNKQDKADLIRPKRKYEKKPKVLPSSAAATPQQTSPAALPVFNAKDLNQYDFPSSDEEPLSQVLSGSSEAEEDNDPDGPFAFRRKAGCQYYAPHLDQTGNWPWTSPKDGGLGDVRYRYCLTTLTVPQRCIGFARRRVGRGGRVLLDRAHSDYDSVFHHLDLEMLSSPQHSPVNQFANTSETNTSDKSFSKDLSQILVNIKSCRWRHFRPRTPSLHDSDNDELSCRKLYRSINRTGTAQPGTQTCSTSTQSKSSSGSAHFAFTAEQYQQHQQQLALMQKQQLAQIQQQQANSNSSTNTSQGFVSKTLDSASAQFAASALVTSEQLMGFKMKDDVVLGIGVNGVLPASGVYKGLHLSSTTPTALVHTSPSTAGSALLQPSNITQTSSSHSALSHQVTAANSATTQVLIGNNIRLTVPSSVATVNSIAPINARHIPRTLSAVPSSALKLAAAANCQVSKVPSSSSVDSVPRENHESEKPALNNIADNTVAMEVT

SEQ ID NO: 47255 - protein, 6 aa, Homo sapiens
MLAMAY

SEQ ID NO: 47256 - protein, 741 aa, Homo sapiens
MPTSARCDDLEALKKKGCPPDDIENPRGSKDIKKNKNVTNRSKGTAEKLKPEDITQIQPQQLVLRLRSGEPQTFTLKFKRAEDYPIDLYYLMDLSYSMKDDLENVKSLGTDLMNEMRRITSDFRIGFGSFVEKTVMPYISTTPAKLRNPCTSEQNCTSPFSYKNVLSLTNKGEVFNELVGKQRISGNLDSPEGGFDAIMQVAVCGSLIGWRNVTRLLVFSTDAGFHFAGDGKLGGIVLPNDGQCHLENNMYTMSHYYDYPSIAHLVQKLSENNIQTIFAVTEEFQPVYKELKNLIPKSAVGTLSANSSNVIQLIIDAYNSLSSEVILENGKLSEGVTISYKSYCKNGVNGTGENGRKCSNISIGDEVQFEISITSNKCPKKDSDSFKIRPLGFTEEVEVILQYICECECQSEGIPESPKCHEGNGTFECGACRCNEGRVGRHCECSTDEVNSEDMDAYCRKENSSEICSNNGECVCGQCVCRKRDNTNEIYSGKFCECDNFNCDRSNGLICGGNGVCKCRVCECNPNYTGSACDCSLDTSTCEASNGQICNGRGICECGVCKCTDPKFQGQTCEMCQTCLGVCAEHKECVQCRAFNKGEKKDTCTQECSYFNITKVESRDKLPQPVQPDPVSHCKEKDVDDCWFYFTYSVNGNNEVMVHVVENPECPTGPDIIPIVAGVVAGIVLIGLALLLIWKLLMIIHDRREFAKFEKEKMNAKWDTGENPIYKSAVTTVVNPKYEGK

SEQ ID NO: 47257 - protein, 71 aa, Homo sapiens
MPTSARCDDLEALKKKGCPPDDIENPRGSKDIKKNKNVTNRSKGTAEKLKPEDITQIQPQQLDLAHLWKRL

SEQ ID NO: 47258 - protein, 25 aa, Homo sapiens
MNLQPIFWIGLISSVCCVFAQTDFL

SEQ ID NO: 47259 - protein, 642 aa, Homo sapiens
MPNQFNHDTQDEAGLEVHQFWPLVEIQCSPDLKFFLCSMYTPICLEDYKKPLPPCRSVCERAKAGCAPLMRQYGFAWPDRMRCDRLPEQGNPDTLCMDYNRTDLTTAAPSPPRRLPPPPPGEQPPSGSGHGRPPGARPPHRGGGRGGGGGDAAAPPARGGGGGGKARPPGGGAAPCEPGCQCRAPMVSVSSERHPLYNRVKTGQIANCALPCHNPFFSQDERAFTVFWIGLWSVLCFVSTFATVSTFLIDMERFKYPERPIIFLSACYLFVSVGYLVRLVAGHEKVACSGGAPGAGGAGGAGGAAAGAGAAGAGAGGPGGRGEYEELGAVEQHVRYETTGPALCTVVFLLVYFFGMASSIWWVILSLTWFLAAGMKWGNEAIAGYSQYFHLAAWLVPSVKSIAVLALSSVDGDPVAGICYVGNQSLDNLRGFVLAPLVIYLFIGTMFLLAGFVSLFRIRSVIKQQDGPTKTHKLEKLMIRLGLFTVLYTVPAAVVVACLFYEQHNRPRWEATHNCPCLRDLQPDQARRPDYAVFMLKYFMCLVVGITSGVWVWSGKTLESWRSLCTRCCWASKGAAVGGGAGATAAGGGGGPGGGGGGGPGGGGGPGGGGGSLYSDVSTGLTWRSGTASSVSYPKQMPLSQV

SEQ ID NO: 47260 - protein, 632 aa, Homo sapiens
MSFNTVSELVISKINYLGKKSDEFNACGKLLLNIKHDETHTREKNEVLKNRNTLSHRENTLQHEKIQTLDHNFEYSICQETLLEKAVFNTRKRENAEENNCDYNEFGRTFCDSSSLLFHQIPPSKDSHYEFSDCEKFLCVKSTLSKHDGVPVKHYDCGESGNNFRRKLCLSQLQKGDKGEKHFECNECGKAFWEKSHLTRHQRVHTGEKHFQCNQCGKTFWEKSNLTKHQRSHTGEKPFECNECGKAFSHKSALTLHQRTHTGEKPYQCNACGKTFYQKSDLTKHQRTHTGQKPYECYECGKSFCMNSHLTVHQRTHTGEKPFECLECGKSFCQKSHLTQHQRTHIGDKPYECNACGKTFYHKSVLTRHQIIHTGLKPYECYECGKTFCLKSDLTIHQRTHTGEKPFACPECGKFFSHKSTLSQHYRTHTGEKPYECHECGKIFYNKSYLTKHNRTHTGEKPYECNECGKTFCQKSQLTQHQRIHIGEKPYECNECGKAFCHKSALIVHQRTHTQEKPYKCNECGKSFCVKSGLILHERKHTGEKPYECNECGKSFSHKSSLTVHHRAHTGEKSCQCNECGKIFYRKSDLAKHQRSHTGEKPYECNTCRKTFSQKSNLIVHQRTHIGEKPYE

SEQ ID NO: 47261 - protein, 191 aa, Homo sapiens [sequence omitted]

SEQ ID NO: 47262 - protein, 274 aa, Homo sapiens
MDANLCQVIQMELDHERMSYLLYQMLCGIKHLHSAGIIHRDLKPSNIVVKSDCTLKILDFGLARTAGTSFMMTPYVVTRYYRAPEVILGMGYKENVDIWSVGCIMGEMIKGGVLFPGTDHIDQWNKVIEQLGTPCPEFMKKLQPTVRTYVENRPKYAGYSFEKLFPDVLFPADSEHNKLKASQARDLLSKMLVIDASKRISVDEALQHPYINVWYDPSEAEAPPPKIPDKQLDEREHTIEEWKELIYKEVMDLEERTKNGVIRGQPSPLAQVQQ

SEQ ID NO: 47263 - protein, 317 aa, Homo sapiens
MDANLCQVIQMELDHERMSYLLYQMLCGIKHLHSAGIIHRDLKPSNIVVKSDCTLKILDFGLARTAGTSFMMTPYVVTRYYRAPEVILGMGYKENVDIWSVGCIMGEMIKGGVLFPGTDHIDQWNKVIEQLGTPCPEFMKKLQPTVRTYVENRPKYAGYSFEKLFPDVLFPADSEHNKLKASQARDLLSKMLVIDASKRISVDEALQHPYINVWYDPSEAEAPPPKIPDKQLDEREHTIEEWKELIYKEVMDLEERTKNGVIRGQPSPLGAAVINGSQHPSSSSSVNDVSSMSTDPTLASDTDSSLEAAAGPLGCCR

SEQ ID NO: 47264 - protein, 59 aa, Homo sapiens
MDANLCQVIQMELDHERMSYLLYQMLCGIKHLHSAGIIHRVSRRNYRHTLCFLIEVKFM

SEQ ID NO: 47265 - protein, 119 aa, Homo sapiens
MKKLQPTVRTYVENRPKYAGYSFEKLFPDVLFPADSEHNKLKASQARDLLSKMLVIDASKRISVDEALQHPYINVWYDPSEAEAVSYFLNVYRTYCILRVRMTVRFGGDLLILNKNVDT

SEQ ID NO: 47266 - protein, 894 aa, Homo sapiens
MDTKGIKTAESESLDSKENNNTRIESMMSSVQKDNFYQHNVEKLENVSQLSLDKSPTEKSTQYLNQHQTAAMCKWQNEGKHTEQLLESEPQTVTLVPEQFSNANIDRSPQNDDHSDTDSEENRDNQQFLTTVKLANAKQTTEDEQAREAKSHQKCSKSCDPGEDCASCQQDEIDVVPESPLSDVGSEDVGTGPKNDNKLTRQESCLGNSPPFEKESEPESPMDVDNSKNSCQDSEADEETSPGFDEQEDGSSSQTANKPSRFQARDADIEFRKRYSTKGGEVRLHFQFEGGESRTGMNDLNAKLPGNISSLNVECRNSKQHGKKDSKITDHFMRLPKAEDRRKEQWETKHQRTERKIPKYVPPHLSPDKKWLGTPIEEMRRMPRCGIRLPLLRPSANHTVTIRVDLLRAGEVPKPFPTHYKDLWDNKHVKMPCSEQNLYPVEDENGERTAGSRWELIQTALLNKFTRPQNLKDAILKYNVAYSKKWDFTALIDFWDKVLEEAEAQHLYQSILPDMVKIALCLPNICTQPIPLLKQKMNHSITMSQEQIASLLANAFFCTFPRRNAKMKSEYSSYPDINFNRLFEGRSSRKPEKLKTLFCYFRRVTEKKPTGLVTFTRQSLEDFPEWERCEKPLTRLHVTYEGTIEENGQGMLQVDFANRFVGGGVTSAGLVQEEIRFLINPELIISRLFTEVLDHNECLIITGTEQYSEYTGYAETYRWSRSHEDGSERDDWQRRCTEIVAIDALHFRRYLDQFVPEKMRRELNKAYCGFLRPGVSSENLSAVATGNWGCGAFGGDARLKALIQILAAAAAERDVVYFTFGDSELMRDIYSMHIFLTERKLTVGDVYKLLLRYYNEECRNCSTPGPDIKLYPFIYHAVESCAETADHSGQRTGT

SEQ ID NO: 47267 - protein, 73 aa, Homo sapiens
MYHTKGQEGSVCLRSSDCASGLCCARHFWSKICKPVLKEGQVCTKHRRKGSHGLEIFQRCYCGEGEFHISSFV

SEQ ID NO: 47268 - protein, 42 aa, Homo sapiens
MINLHIQKDNPKIVHAFDMEDLGDKAVYCRCWRSKKVGYITC

SEQ ID NO: 47269 - protein, 110 aa, Homo sapiens
MGPPDSAYQGGVFFLTVHFPTDYPFKPPKIAFTTKIYHPNINSNGSICLDILRSQWSPALTVSKVLLSICSLLCDPNPDDPLVPDIAQIYKSDKEKYNRHAREWTQKYAM

SEQ ID NO: 47270 - protein, 2301 aa, Homo sapiens
MTFLDDVVHSLLKGENIGITSRRRSRANQNVNAVHSHYTRAQANSPRPAMNSQAAVPKQNTHQQQQQRSIRPNKRKGSDSSIPDEEKMKEEKYDYISRGENPKGKNKHLMNKRRKPEEDEKKLNMKRLRTDNVSDFSESSDSENSNKRIIDNSSEQKPENELKNKNTSKINGEEGKPHNNEKAGEETLKNSQPPWDQIQEDKKHEEAEKRKSVDTQLQEDMIIHSSEQSTVSDHNSNDLLPQECNMDKTHTMELLPKEKFVSRPPTPKCVIDITNDTNLEKVAQENSSTFGLQTLQKMDPNVSDSKHSIANAKFLETAKKDSDQSWVSDVVKVDLTQSSVTNASSGNDHLNMEKEKYVSYISPLSAVSVMEDKLHKRSPPPETIKSKLNTSVDTHKIKSSPSPEVVKPKITHSPDSVKSKATYVNSQATGERRLANKIEHELSRCSFHPIPTRSSTLETTKSPLIIDKNEHFTVYRDPALIGSETGANHISPFLSQHPFPLHSSSHRTCLNPGTHHPALTPAPHLLAGSSSQTPLPTINTHPLTSGPHHAVHHPHLLPTVLPGVPTASLLGGHPRLESAHASSLSHLALAHQQQQQLLQHQSPHLLGQAHPSASYNQLGLYPIIWQYPNGTHAYSGLGLPSSKWVHPENAVNAEASLRRNSPSPWLHQPTPVTSADGIGLLSHIPVRPSSAEPHRPLKITAHSSPPLTKTLVDHHKEELERKAFMEPLRSVASTSAKNDLDLNRSQTGKDCHLHRHFVDPVLNQLQRPPQETGERLNKYKEEHRRILQESIDVAPFTTKIKGLEGERENYSRVASSSSSPKSHIIKQDMDVERSVSDLYKMKHSVPQSLPQSNYFTTLSNSVVNEPPRSYPSKEVSNIYGDKQSNALAAAAANPQTLTSFITSLSKPPPLIKHQPESEGLVGKIPEHLPHQIASHSVTTFRNDCRSPTHLTVSSTNTLRSMPALHRAPVFHPPIHHSLERKEGSYSSLSPPTLTPVMPVNAGGKVQESQKPPTLIPEPKDSQANFKSSSEQSLTEMWRPNNNLSKEKTEWHVEKSSGKLQAAMASVIVRPSSSTKTDSMPAMQLASKDRVSERSSAGAHKTDCLKLAEAGETGRIILPNVNSDSVHTKSEKNFQAVSQGSVPSSVMSAVNTMCNTKTDVITSAADTTSVSSWGGSEVISSLSNTILASTSSECVSSKSVSQPVAQKQECKVSTTAPVTLASSKTGSVVQPSSGFSGTTDFIHLKKHKAALAAAQYKSSNASETEPNAIKNQTLSASLPLDSTVICSTINKANSVGNGQASQTSQPNYHTKLKKAWLTRHSEEDKNTNKMENSGNSVSEIIKPCSVNLIASTSSDIQNSVDSKIIVDKYVKDDKVNRRKAKRTYESGSESGDSDESESKSEQRTKRQPKPTYKKKQNDLQKRKGEIEEDLKPNGVLSRSAKERSKLKLQSNSNTGIPRSVLKDWRKVKKLKQTGESFLQDDSCCEIGPNLQKCRECRLIRSKKGEEPAHSPVFCRFYYFRRLSFSKNGVVRIDGFSSPDQYDDEAMSLWTHENFEDDELDIETSKYILDIIGDKFCQLVTSEKTALSWVKKDAKIAWKRAVRGVREMCDACEATLFNIHWVCQKCGFVVCLDCYKAKERKSSRDKELYAWMKCVKGQPHDHKHLMPTQIIPGSVLTDLLDAMHTLREKYGIKSHCHCTNKQNLQVGNFPTMNGVSQVLQNVLNHSNKISLCMPESQQQNTPPKSEKNGGSSPESDVGTDNKLTPPESQSPLHWLADLAEQKAREEKKENKELTLENQIKEEREQDNSESPNGRTSPLVSQNNEQGSTLRDLLTTTAGKLRVGSTDAGIAFAPVYSMGAPSSKSGRTMPNILDDIIASVVENKIPPSKTSKINVKPELKEEPEESIISAVDENNKLYSDIPHSWICEKHILWLKDYKNSSNWKLFKECWKQGQPAVVSGVHKKMNISLWKAESISLDFGDHQADLLNCKDSIISNANVKEFWDGFEEVSKRQKNKSGETVVLKLKDWPSGEDFKTMMPARYEDLLKSLPLPEYCNPEGKFNLASHLPGFFVRPDLGPRLCSAYGVVAAKDHDIGTTNLHIEVSDVVNILVYVGIAKGNGILSKAGILKKFEEEDLDDILRKRLKDSSEIPGALWHIYAGKDVDKIREFLQKISKEQGLEVLPEHDPIRDQSWYVNKKLRQRLLEEYGVRTCTLIQFLGDAIVLPAGALHQVQNFHSCIQVTEDFVSPEHLVESFHLTQELRLLKEEINYDDKLQVKNILYHAVKEMVRALKIHEDEVEDMEEN

SEQ ID NO: 47271 - protein, 1256 aa, Homo sapiens
MKDRRLTLEQVVAIEALTQLSEAPSENSSPSKSEKDEESEQRTASLLNSCKAILYTVRKDLQDPNLQGEPPKLNHCPSLEKQSSCNTVVFNGQTTTLSNSHINSATNQASTKSHEYSKVTNSLSLFIPKSNSSKIDTNKSIAQGIITLDNCSNDLHQLPPRNNEVEYCNQLLDSSKKLDSDDLSCQDATHTQIEEDVATQLTQLASIIKINYIKPEDKKVESTPTSLVTCNVQQKYNQEKGTIQQKPPSSVHNNHGSSLTKQKNPTQKKTKSTPSRDRRKKKPTVVSYQENDRQKWEKLSYMYGTICDIWIASKFQNFGQFCPHDFPTVFGKISSSTKIWKPLAQTRSIMQPKTVFPPLTQIKLQRYPESAEEKVKVEPLDSLSLFHLKTESNGKAFTDKAYNSQVQLTVNANQKAHPLTQPSSPPNQCANVMAGDDQIRFQQVVKEQLMHQRLPTLPGISHETPLPESALTLRNVNVVCSGGITVVSTKSEEEVCSSSFGTSEFSTVDSAQKNFNDYAMNFFTNPTKNLVSITKDSELPTCSCLDRVIQKDKGPYYTHLGAGPSVAAVREIMENRYGQKGNAIRIEIVVYTGKEGKSSHGCPIAKWVLRRSSDEEKVLCLVRQRTGHHCPTAVMVVLIMVWDGIPLPMADRLYTELTENLKSYNGHPTDRRCTLNENRTCTCQGIDPETCGASFSFGCSWSMYFNGCKFGRSPSPRRFRIDPSSPLHEKNLEDNLQSLATRLAPIYKQYAPVAYQNQVEYENVARECRLGSKEGRPFSGVTACLDFCAHPHRDIHNMNNGSTVVCTLTREDNRSLGVIPQDEQLHVLPLYKLSDTDEFGSKEGMEAKIKSGAIEVLAPRRKKRTCFTQPVPRSGKKRAAMMTEVLAHKIRAVEKKPIPRIKRKNNSTTTNNSKPSSLPTLGSNTETVQPEVKSETEPHFILKSSDNTKTYSLMPSAPHPVKEASPGFSWSPKTASATPAPLKNDATASCGFSERSSTPHCTMPSGRLSGANAAAADGPGISQLGEVAPLPTLSAPVMEPLINSEPSTGVTEPLTPHQPNHQPSFLTSPQDLASSPMEEDEQHSEADEPPSDEPLSDDPLSPAEEKLPHIDEYWSDSEHIFLDANIGGVAIAPAHGSVLIECARRELHATTPVEHPNRNHPTRLSLVFYQHKNLNKPQHGFELNKIKFEAKEAKNKKMKASEQKDQAANEGPEQSSEVNELNQIPSHKALTLTHDNVVTVSPYALTHVAGPYNHWV

SEQ ID NO: 47272 - protein, 655 aa, Homo sapiens
MQSHSLDVDIHIVLNDICFGAAHADDLFPFFLRHAKQIFPVLDCKDDLRKISDLRIPPNWYPDARAMQRKIIFHSGPTNSGKTYHAIQKYFSAKSGVYCGPLKLLAHEIFEKSNAAGVPCDLVTGEERVTVQPNGKQASHVSCTVEMCSVTTPYEVAVIDEIQMIRDPARGWAWTRALLGLCAEEVHLCGEPAAIDLVMELMYTTGEEVEVRDYKRLTPISVLDHALESLDNLRPGDCIVCFSKNDIYSVSRQIEIRGLESAVIYGSLPPGTKLAQAKKFNDPNDPCKILVATDAIGMGLNLSIRRIIFYSLIKPSINEKGERELEPITTSQALQIAGRAGRFSSRFKEGEVTTMNHEDLSLLKEILKRPVDPIRAAGLHPTAEQIEMFAYHLPDATLSNLIDIFVDFSQVDGQYFVCNMDDFKFSAELIQHIPLSLRVRYVFCTAPINKKQPFVCSSLLQFARQYSRNEPLTFAWLRRYIKWPLLPPKNIKDLMDLEAVHDVLDLYLWLSYRFMDMFPDASLIRDLQKELDGIIQDGVHNITKLIKMSETHKLLNLEGFPSGSQSRLSGTLKSQARRTRGTKALGSKATEPPSPDAGELSLASRLVQQGLLTPDMLKQLEKEWMTQQTEHNKEKTESGTHPKGTRRKKKEPDSD

SEQ ID NO: 47273 - protein, 363 aa, Homo sapiens
MSKLSRSARAGVIFPVGRLMRYLKKGTFKYRISVGAPVYMAAVIEYLAAEILELAGNAARDNKKARIAPRHILLAVANDEELNQLLKGVTIASGGVLPRIHPELLAKKRGTKGKSETILSPPPEKRGRKATSGKKGGKKSKAAKPRTSKKSKPKDSDKEGTSNSTSEDGPGDGFTILSSKSLVLGQKLSLTQSDISHIGSMRVEGIVHPTTAEIDLKEDIGKALEKAGGKEFLETVKELRKSQGPLEVAEAAVSQSSGLAAKFVIHCHIPQWGSDKCEEQLEETIKNCLSAAEDKKLKSVAFPPFPSGRNCFPKQTAAQVTLKAISAHFDDSSASSLKNVYFLLFDSESIGIYVQEMAKLDAK

SEQ ID NO: 47274 - protein, 332 aa, Homo sapiens
MKDSFHHNVAALRASVETGFAKKTFISYSVTFKDNFRQGLVVGIDLKNQMVLLQGGEALPFSHLILATGSTGPFPGKFNEVSSQQAAIQAYEDMVRQVQRSRFIVVVGGGSAGVEMAAEIKTEYPEKEVTLIHSQVALADKELLPSVRQEVKEILLRKGVQLLLSERVSNLEELPLNEYREYIKVQTDKGTEVATNLVILCTGIKINSSAYRKAFESRLASSGALRVNEHLQVEGHSNVYAIGDCADVRTPKMAYLAGLHANIAVANIVNSVKQRPLQAYKPGALTFLLSMGRNDGVGQISGFYVGRLMVRLTKSRDLFVSTSWKTMRQSPP

SEQ ID NO: 47275 - protein, 55 aa, Homo sapiens
MTRVALQAEKLDHHPEWFNVYNKVHITLSTHECAGLSERDINLASFIEQVAVSMT

SEQ ID NO: 47276 - protein, 442 aa, Homo sapiens
MVAFLGASAVTASTGLLWKRAHAESPPCVDNLKSDIGDKGKNKDEGDVCNHEKKTADLAPHPEEKKKKRSGFRDRKVMEYENRIRAYSTPDKIFRYFATLKVISEPGEAEVFMTPEDFVRSITPNEKQPEHLGLDQYIIKRFDGKKISQEREKFADEGSIFYTLGECGLISFSDYIFLTTVLSTPQRNFEIAFKMFDLNGDGEVDMEEFEQVQSIIRSQTSMGMRHRDRPTTGNTLKSGLCSALTTYFFGADLKGKLTIKNFLEFQRKLQHDVLKLEFERHDPVDGRITERQFGGMLLAYSGVQSKKLTAMQRQLKKHFKEGKGLTFQEVENFFTFLKNINDVDTALSFYHMAGASLDKVTMQQVARTVAKVELSDHVCDVVFALFDCDGNGELSNKEFVSIMKQRLMRGLEKPKDMGFTRLMQAMWKCAQETAWDFALPKQ

SEQ ID NO: 47277 - protein, 1775 aa, Homo sapiens
MRDGLVIPLVELSAKQVAFHIPFEVVEKVYPPVPEQLQLRIAFWSFPENEEDIRLYSCLANGSADEFQRGDQLFRMRAVKDPLQIGFHLSATVVPPQMVPPKGAYNVAVMFDRCRVTSCSCTCGAGAKWCTHVVALCLFRIHNASAVCLRAPVSESLSRLQRDQLQKFAQYLISELPQQILPTAQRLLDELLSSQSTAINTVCGAPDPTAGPSASDQSTWYLDESTLTDNIKKTLHKFCGPSPVVFSDVNSMYLSSTEPPAAAEWACLLRPLRGREPEGVWNLLSIVREMFKRRDSNAAPLLEILTDQCLTYEQITGWWYSVRTSASHSSASGHTGRSNGQSEVAAHACASMCDEMVTLWRLAVLDPALSPQRRRELCTQLRQWQLKVIENVKRGQHKKTLERLFPGFRPAVEACYFNWEEAYPLPGVTYSGTDRKLALCWARALPSRPGASRSGGLEESRDRPRPLPTEPAVRPKEPGTKRKGLGEGVPSSQRGPRRLSAEGGDKALHKMGPGGGKAKALGGAGSGSKGSAGGGSKRRLSSEDSSLEPDLAEMSLDDSSLALGAEASTFGGFPESPPPCPLHGGSRGPSTFLPEPPDTYEEDGGVYFSEGPEPPTASVGPPGLLPGDVCTQDDLPSTDESGNGLPKTKEAAPAVGEEDDDYQAYYLNAQDGAGGEEEKAEGGAGEEHDLFAGLKPLEQESRMEVLFACAEALHAHGYSSEASRLTVELAQDLLANPPDLKVEPPPAKGKKNKVSTSRQTWVATNTLSKAAFLLTVLSERPEHHNLAFRVGMFALELQRPPASTKALEVKLAYQESEVAALLKKIPLGPSEMSTMRCRAEELREGTLCDYRPVLPLMLASFIFDVLCAPVVSPTGSRPPSRNWNSETPGDEELGFEAAVAALGMKTTVSEAEHPLLCEGTRREKGDLALALMITYKDDQAKLKKILDKLLDRESQTHKPQTLSSFYSSSRPTTASQRSPSKHGGPSAPGALQPLTSGSAGPAQPGSVAGAGPGPTEGFTEKNVPESSPHSPCEGLPSEAALTPRPEGKVPSRLALGSRGGYNGRGWGSPGRPKKKHTGMASIDSSAPETTSDSSPTLSRRPLRGGWAPTSWGRGQDSDSISSSSSDSLGSSSSSGSRRASASGGARAKTVEVGRYKGRRPESHAPHVPNQPSEAAAHFYFELAKTVLIKAGGNSSTSIFTHPSSSGGHQGPHRNLHLCAFEIGLYALGLHNFVSPNWLSRTYSSHVSWITGQAMEIGSAALTILVECWDGHLTPPEVASLADRASRARDSNMVRAAAELALSCLPHAHALNPNEIQRALVQCKEQDNLMLEKACMAVEEAAKGGGVYPEVLFEVAHQWFWLYEQTAGGSSTAREGATSCSASGIRAGGEAGRGMPEGRGGPGTEPVTVAAAAVTAAATVVPVISVGSSLYPGPGLGHGHSPGLHPYTALQPHLPCSPQYLTHPAHPAHPMPHMPRPAVFPVPSSAYPQGVHPAFLGAQYPYSVTPPSLAATAVSFPVPSMAPITVHPYHTEPGLPLPTSVACELWGQGTVSSVHPASTFPAIQGASLPALTTQPSPLVSGGFPPPEEETHSQPVNPHSLHHLHAAYRVGMLALEMLGRRAHNDHPNNFSRSPPYTDDVKWLLGLAAKLGVNYVHQFCVGAAKGVLSPFVLQEIVMETLQRLSPAHAHNHLRAPAFHQLVQRCQQAYMQYIHHRLIHLTPADYDDFVNAIRSARSAFCLTPMGMMQFNDILQNLKRSKQTKELWQRVSLEMATFSP

SEQ ID NO: 47278 - protein, 1767 aa, Homo sapiens
MRDGLVIPLVELSAKQVAFHIPFEVVEKVYPPVPEQLQLRIAFWSFPENEEDIRLYSCLANGSADEFQRGDQLFRMRAVKDPLQIGFHLSATVVPPQMVPPKGAYNVAVMFDRCRVTSCSCTCGAGAKWCTHVVALCLFRIHNASAVCLRAPVSESLSRLQRDQLQKFAQYLISELPQQILPTAQRLLDELLSSQSTAINTVCGAPDPTAGPSASDQSTWYLDESTLTDNIKKTLHKFCGPSPVVFSDVNSMYLSSTEPPAAAEWACLLRPLRGREPEGVWNLLSIVREMFKRRDSNAAPLLEILTDQCLTYEQITGWWYSVRTSASHSSASGHTGRSNGQSEVAAHACASMCDEMVTLWRLAVLDPALSPQRRRELCTQLRQWQLKVIENVKRGQHKKTLERLFPGFRPAVEACYFNWEEAYPLPGVTYSGTDRKLALCWARALPSRPGASRSGGLEESRDRPRPLPTEPAVRPKEPGTKRKGLGEGVPSSQRGPRRLSAEGGDKALHKMGPGGGKAKALGGAGSGSKGSAGGGSKRRLSSEDSSLEPDLAEMSLDDSSLALGAEASTFGGFPESPPPCPLHGGSRGPSTFLPEPPDTYEEDGGVYFSEGPEPPTASVGPPGLLPGDVCTQDDLPSTDESGNGLPKTKEAAPAVGEEDDDYQAYYLNAQDGAGGEEEKAEGGAGEEHDLFAGLKPLEQESRMEVLFACAEALHAHGYSSEASRLTVELAQDLLANPPDLKVEPPPAKGKKNKVSTSRQTWVATNTLSKAAFLLTVLSERPEHHNLAFRVGMFALELQRPPASTKALEVKLAYQESEVAALLKKIPLGPSEMSTMRCRAEELREGTLCDYRPVLPLMLASFIFDVLCAPVVSPTGSRPPSRNWNSETPGDEELGFEAAVAALGMKTTVSEAEHPLLCEGTRREKGDLALALMITYKDDQAKLKKILDKLLDRESQTHKPQTLSSFYSSSRPTTASQRSPSKHGGPSAPGALQPLTSGSAGPAQPGSVAGAGPGPTEGFTEKNVPESSPHSPCEGLPSEAALTPRPEGKVPSRLALGSRGGYNGRGWGSPGRPKKKHTGMASIDSSAPETTSDSSPTLSRRPLRGGWAPTSWGRGQDSDSISSSSSDSLGSSSSSGSRRASASGGARAKTVEVGRYKGRRPESHAPHVPNQPSEAAAHFYFELAKTVLIKAGGNSSTSIFTHPSSSGGHQGPHRNLHLCAFEIGLYALGLHNFVSPNWLSRTYSSHVSWITGQAMEIGSAALTILVECWDGHLTPPEVASLADRASRARDSNMVRAAAELALSCLPHAHALNPNEIQRALVQCKEQDNLMLEKACMAVEEAAKGGGVYPEVLFEVAHQWFWLYEQTAGGSSTAREGATSCSASGIRAGGEAGRGMPEGRGGPGTEPVTVAAAAVTAAATVVPVISVGSSLYPGPGLGHGHSPGLHPYTALQPHLPCSPQYLTHPAHPAHPMPHMPRPAVFPVPSSAYPQGVHPAFLGAQYPYSVTPPSLAATAVSFPVPSMAPITVHPYHTEPGLPLPTSVALSSVHPASTFPAIQGASLPALTTQPSPLVSGGFPPPEEETHSQPVNPHSLHHLHAAYRVGMLALEMLGRRAHNDHPNNFSRSPPYTDDVKWLLGLAAKLGVNYVHQFCVGAAKGVLSPFVLQEIVMETLQRLSPAHAHNHLRAPAFHQLVQRCQQAYMQYIHHRLIHLTPADYDDFVNAIRSARSAFCLTPMGMMQFNDILQNLKRSKQTKELWQRVSLEMATFSP

SEQ ID NO: 47279 - protein, 258 aa, Homo sapiens
MLSVRKLQKIHIDVLEEMGYNSDSPMGSMTPFISALQSTDWLCNGELSHDCDGPITDLNSDQYQYMNGKNKHSVRRLDPEYWKTILSCIYVFIVFGFTSFIMVIVHERVPDMQTYPPLPDIFLDSVPRIPWAFAMTEVCGMILCYIWLLVLLLHKHRSILLRRLCSLMGTVFLLRCFTMFVTSLSVPGQHLQCTGKIYGSVWEKLHRAFAIWSGFGMTLTGVHTCGDYMFSGHTVVLTMLNFFVTECKYLFSASMRIR

SEQ ID NO: 47280 - protein, 497 aa, Homo sapiens
MAEGVNEPCFPGDCGIFVTKVDKGSIADGRLRVNDWLLRINDVDLINKDKKQAIKALLNGEGAINMVVRRRKSLGGKVVTPLHINLSGQKDSGISLENGVYAAAVLPGSPAAKEGSLAVGDRIVAINGIALDNKSLNECESLLRSCQDSLTLSLLKVFPQSSSWSGQNIFENIKDSDKMLSFRAHGPEVQAHNKRNLIQHNNSTQTDIFYTDRLEDRKEPGPPGGSSSFLHKPFPGGPLQVCPQACPSASERSLSSFRSDASGDRGFGLVDVRGRRPLLPFETEVGPCGVGEASLDKADSEGSNSGGTWPKAMLSSTAVPEKLSVYKKPKQRKSIFDPNTFKRPQTPPKIDYLLPGPGPAHSPQPSKRAGPLTPPKPPRRSDSIKFQHRLETSSESEATLVGSSPSTSPPSALPPDVDPGEPMHASPPRKARVRIASSYYPEGDGDSSHLPAKKSCDEDLTSQKVDELGQKRRRPKSAPSFRPKLAPVVIPAQFLEV

SEQ ID NO: 47281 - protein, 121 aa, Homo sapiens
MTNRLLQRKQMVIDVLHPGKATVPKTEIREKLAKMYKTTPDVIFVFGFRTHFGGGKTTGFGMIYDSLDYAKKNEPKHRLARHGLYEKKKTSRKQRKERKNRMKKVRGTAKANVGAGKKPKE

SEQ ID NO: 47282 - protein, 105 aa, Homo sapiens [sequence omitted]

SEQ ID NO: 47283 - protein, 490 aa, Homo sapiens [sequence omitted]

SEQ ID NO: 47284 - protein, 334 aa, Homo sapiens [sequence omitted]

SEQ ID NO: 47285 - protein, 332 aa, Homo sapiens
MVGMGQKDSYVGDEAQSKRGILTLKYPIEHGIITNWDDMEKIWHHSFYNELRVAPEEHPTLLTEAPLNPKANREKMTQIMFETFNVPAMYVAIQAVLSLYASGRTTGIVLDSGDGVTHNVPIYEGYALPHAIMRLDLAGRDLTDYLMKILTERGYSFVTTAEREIVRDIKEKLCYVALDFENEMATAASSSSLEKSYELPDGQVITIGNERFRCPETLFQPSFIGMESAGIHETTYNSIMKCDIDIRKDLYANNVLSGGTTMYPGIADRMQKEITALAPSTMKIKIIAPPERKYSVWIGGSILASLSTFQQMWISKQEYDEAGPSIVHRKCF

SEQ ID NO: 47286 - protein, 397 aa, Homo sapiens [sequence omitted]

SEQ ID NO: 47287 - protein, 397 aa, Homo sapiens
MQEEHDNQANVRSLVTWGNFAWMYYHMGRLAEAQTYLDKVENICKKLSNPFRYRMECPEIDCEEGWALLKCGGKNYERAKACFEKVLEVDPENPESSAGYAISAYRLDGFKLATKNHKPFSLLPLRQAVRLNPDNGYIKVLLALKLQDEGQEAEGEKYIEEALANMSSQTYVFRYAAKFYRRKGSVDKALELLKKALQETPTSVLLHHQIGLCYKAQMIQIKEATKGQPRGQNREKLDKMIRSAIFHFESAVEKKPTFEVAHLDLARMYIEAGNHRKAEENFQKLLCMKPVVEETMQDIHFHYGRFQEFQKKSDVNAIIHYLKAIKIEQASLTRDKSINSLKKLVLRKLRRKALDLESLSLLGFVYKLEGNMNEALEYYERALRLAADFENSVRQGP

SEQ ID NO: 47288 - protein, 1647 aa, Homo sapiens
MQPVKDLLKGQSRLIFTYGLTNSGKTYTFQGTEENIGILPRTLNVLFDSLQERLYTKMNLKPHRSREYLRLSSEQEKEEIASKSALLRQIKEVTVHNDSDDTLYGSLTNSLNISEFEESIKDYEQANLNMANSIKFSVWVSFFEIYNEYIYDLFVPVSSKFQKRKMLRLSQDVKGYSFIKDLQWIQVSDSKEAYRLLKLGIKHQSVAFTKLNNASSRSHSIFTVKILQIEDSEMSRVIRVSELSLCDLAGSERTMKTQNEGERLRETGNINTSLLTLGKCINVLKNSEKSKFQQHVPFRESKLTHYFQSFFNGKGKICMIVNISQCYLAYDETLNVLKFSAIAQKVCVPDTLNSSQEKLFGPVKSSQDVSLDSNSNSKILNVKRATISWENSLEDLMEDEDLVEELENAEETQNVETKLLDEDLDKTLEENKAFISHEEKRKLLDLIEDLKKKLINEKKEKLTLEFKIREEVTQEFTQYWAQREADFKETLLQEREILEENAERRLAIFKDLVGKCDTREEAAKDICATKVETEEATACLELKFNQIKAELAKTKGELIKTKEELKKRENESDSLIQELETSNKKIITQNQRIKELINIIDQKEDTINEFQNLKSHMENTFKCNDKADTSSLIINNKLICNETVEVPKDSKSKICSERKRVNENELQQDEPPAKKGSIHVSSAITEDQKKSEEVRPNIAEIEDIRVLQENNEGLRAFLLTIENELKNEKEEKAELNKQIVHFQQELSLSEKKNLTLSKEVQQIQSNYDIAIAELHVQKSKNQEQEEKIMKLSNEIETATRSITNNVSQIKLMHTKIDELRTLDSVSQISNIDLLNLRDLSNGSEEDNLPNTQLDLLGNDYLVSKQVKEYRIQEPNRENSFHSSIEAIWEECKEIVKASSKKSHQIEELEQQIEKLQAEVKGYKDENNRLKEKEHKNQDDLLKEKETLIQQLKEELQEKNVTLDVQIQHVVEGKRALSELTQGVTCYKAKIKELETILETQKVECSHSAKLEQDILEKESIILKLERNLKEFQEHLQDSVKNTKDLNVKELKLKEEITQLTNNLQDMKHLLQLKEEEEETNRQETEKLKEELSASSARTQNLKADLQRKEEDYADLKEKLTDAKKQIKQVQKEVSVMRDEDKLLRIKINELEKKKNQCSQELDMKQRTIQQLKEQLNNQKVEEAIQQYERACKDLNVKEKIIEDMRMTLEEQEQTQVEQDQVLEAKLEEVERLATELEKWKEKCNDLETKNNQRSNKEHENNTDVLGKLTNLQDELQESEQKYNADRKKWLEEKMMLITQAKEAENIRNKEMKKYAEDRERFFKQQNEMEILTAQLTEKDSDLQKWREERDQLVAALEIQLKALISSNVQKDNEIEQLKRIISETSKIETQIMDIKPKRISSADPDKLQTEPLSTSFEISRNKIEDGSVVLDSCEVSTENDQSTRFPKPELEIQFTPLQPNKMAVKHPGCTTPVTVKIPKARKRKSNEMEEDLVKCENKKNATPRTNLKFPISDDRNSSVKKEQKVAIRPSSKKTYSLRSQASIIGVNLATKKKEGTLQKFGDFLQHSPSILQSKAKKIIETMSSSKLSNVEASKENVSQPKRAKRKLYTSEISSPIDISGQVILMDQKMKESDHQIIKRRLRTKTAK

SEQ ID NO: 47289 - protein, 312 aa, Homo sapiens
MIQVLDPRPLTSSVMPVDVAMRLCLAHSPPVKSFLGPYDEFQRRHFVNKLKPLKSCLNIKHKAKSQNDWKCSHNQAKKRVVFADSKGLSLTAIHVFSDLPEEPAWDLQFDLLDLNDISSALKHHEEKNLILDFPQPSTDYLSFRSHFQKNFVCLENCSLQERTVTGTVKVKNVSFEKKVQIRITFDSWKNYTDVDCVYMKNVYGGTDSDTFSFAIDLPPVIPTEQKIEFCISYHANGQVFWDNNDGQNYRIVHVQWKPDGVQTQMAPQDCAFHQTSPKTELESTIFGSPRLASGLFPEWQSWGRMENLASYR

SEQ ID NO: 47290 - protein, 1758 aa, Homo sapiens
MEDSPTTERLNFDRFDICRLLQHGASLLGSAGAEFEVQDEKSGEVDPKERIARQRKLLQKKLGLNMGEAIGMSTEELFNDEDLDYTPTSASFVNKQPTLQAAELIDSEFRAGMSNRQKNKAKRMAKLFAKQRSRDAVETNEKSNDSTDGEPEEKRRKIANVVINQSANDSKVLIDNIPDSSSLIEETNEWPLESFCEELCNDLFNPSWEVRHGAGTGLREILKAHGKSGGKMGDSTLEEMIQQHQEWLEDLVIRLLCVFALDRFGDFVSDEVVAPVRETCAQTLGVVLKHMNETGVHKTVDVLLKLLTQEQWEVRHGGLLGIKYALAVRQDVINTLLPKVLTRIIEGLQDLDDDVRAVAAASLVPVVESLVYLQTQKVPFIINTLWDALLELDDLTASTNSIMTLLSSLLTYPQVQQCSIQQSLTVLVPRVWPFLHHTISSVRRAALETLFTLLSTQDQNSSSWLIPILPDMLRHIFQFCVLESSQEILDLIHKVWMELLSKASVQYVVAAACPWMGAWLCLMMQPSHLPIDLNMLLEVKARAKEKTGGKVRQGQSQNKEVLQEYIAGADTIMEDPATRDFVVMRARMMAAKLLGALCCCICDPGVNVVTQEIKPAESLGQLLLFHLNSKSALQRISVALVICEWAALQKECKAVTLAVQPRLLDILSEHLYYDEIAVPFTRMQNECKQLISSLADVHIEVGNRVNNNVLTIDQASDLVTTVFNEATSSFDLNPQVLQQLDSKRQQVQMTVTETNQEWQVLQLRVHTFAACAVVSLQQLPEKLNPIIKPLMETIKKEENTLVQNYAAQCIAKLLQQCTTRTPCPNSKIIKNLCSSLCVDPYLTPCVTCPVPTQSGQENSKGSTSEKDGMHHTVTKHRGIITLYRHQKAAFAITSRRGPTPKAVKAQIADLPAGSSGNILVELDEAQKPYLVQRRGAEFALTTIVKHFGGEMAVKLPHLWDAMVGPLRNTIDINNFDGKSLLDKGDSPAQELVNSLQVFETAAASMDSELHPLLVQHLPHLYMCLQYPSTAVRHMAARCVGVMSKIATMETMNIFLEKVLPWLGAIDDSVKQEGAIEALACVMEQLDVGIVPYIVLLVVPVLGRMSDQTDSVRFMATQCFATLIRLMPLEAGIPDPPNMSAELIQLKAKERHFLEQLLDGKKLENYKIPVPINAELRKYQQDGVNWLAFLNKYKLHGILCDDMGLGKTLQSICILAGDHCHRAQEYARSKLAECMPLPSLVVCPPTLTGHWVDEVGKFCSREYLNPLHYTGPPTERIRLQHQVKRHNLIVASYDVVRNDIDFFRNIKFNYCILDEGHVIKNGKTKLSKAVKQLTANYRIILSGTPIQNNVLELWSLFDFLMPGFLGTERQFAARYGKPILASRDARSSSREQEAGVLAMDALHRQVLPFLLRRMKEDVLQDLPPKIIQDYYCTLSPLQVQLYEDFAKSRAKCDVDETVSSATLSEETEKPKLKATGHVFQALQYLRKLCNHPALVLTPQHPEFKTTAEKLAVQNSSLHDIQHAPKLSALKQLLLDCGLGNGSTSESGTESVVAQHRILIFCQLKSMLDIVEHDLLKPHLPSVTYLRLDGSIPPGQRHSIVSRFNNDPSIDVLLLTTHVGGLGLNLTGADTVVFVEHDWNPMRDLQAMDRAHRIGQKRVVNVYRLITRGTLEEKIMGLQKFKMNIANTVISQENSSLQSMGTDQLLDLFTLDKDGKAEKADTSTSGKASMKSILENLSDLWDQEQYDSEYSLENFMHSLK

SEQ ID NO: 47291 - protein, 825 aa, Homo sapiens
MNDAWRLFQLEKATGNPKHPFSKFGTGNKYTLETRPNQEGIDVRQELLKFHSAYYSSNLMAVCVLGRESLDDLTNLVVKLFSEVENKNVPLPEFPEHPFQEEHLKQLYKIVPIKDIRNLYVTFPIPDLQKYYKSNPGHYLGHLIGHEGPGSLLSELKSKGWVNTLVGGQKEGARGFMFFIINVDLTEEGLLHVEDIILHMFQYIQKLRAEGPQEWVFQECKDLNAVAFRFKDKERPRGYTSKIAGILHYYPLEEVLTAEYLLEEFRPDLIEMVLDKLRPENVRVAIVSKSFEGKTDRTEEWYGTQYKQEAIPDEVIKKWQNADLNGKFKLPTKNEFIPTNFEILPLEKEATPYPALIKDTAMSKLWFKQDDKFFLPKACLNFEFFSPFAYVDPLHCNMAYLYLELLKDSLNEYAYAAELAGLSYDLQNTIYGMYLSVKGYNDKQPILLKKIIEKMATFEIDEKRFEIIKEAYMRSLNNFRAEQPHQHAMYYLRLLMTEVAWTKDELKEALDDVTLPRLKAFIPQLLSRLHIEALLHGNITKQAALGIMQMVEDTLIEHAHTKPLLPSQLVRYREVQLPDRGWFVYQQRNEVHNNCGIEIYYQTDMQSTSENMFLELFCQIISEPCFNTLRTKEQLGYIVFSGPRRANGIQGLRFIIQSEKPPHYLESRVEAFLITMEKSIEDMTEEAFQKHIQALAIRRLDKPKKLSAECAKYWGEIISQQYNFDRDNTEVAYLKTLTKEDIIKFYKEMLAVDAPRRHKVSVHVLAREMDSCPVVGEFPCQNDINLSQAPALPQPEVIQNMTEFKRGLPLFPLVKPHINFMAAKL

SEQ ID NO: 47292 - protein, 825 aa, Homo sapiens
MNDAWRLFQLEKATGNPKHPFSKFGTGNKYTLETRPNQEGIDVRQELLKFHSAYYSSNLMAVCVLGRESLDDLTNLVVKLFSEVENKNVPLPEFPEHPFQEEHLKQLYKIVPIKDIRNLYVTFPIPDLQKYYKSNPGHYLGHLIGHEGPGSLLSELKSKGWVNTLVGGQKEGARGFMFFIINVDLTEEGLLHVEDIILHMFQYIQKLRAEGPQEWVFQECKDLNAVAFRFKDKERPRGYTSKIAGILHYYPLEEVLTAEYLLEEFRPDLIEMVLDKLRPENVRVAIVSKSFEGKTDRTEEWYGTQYKQEAIPDEVIKKWQNADLNGKFKLPTKNEFIPTNFEILPLEKEATPYPALIKDTAMSKLWFKQDDKFFLPKACLNFEFFSRYIYADPLHCNMTYLFIRLLKDDLKEYTYAARLSGLSYGIASGMNAILLSVKGYNDKQPILLKKIIEKMATFEIDEKRFEIIKEAYMRSLNNFRAEQPHQHAMYYLRLLMTEVAWTKDELKEALDDVTLPRLKAFIPQLLSRLHIEALLHGNITKQAALGIMQMVEDTLIEHAHTKPLLPSQLVRYREVQLPDRGWFVYQQRNEVHNNCGIEIYYQTDMQSTSENMFLELFCQIISEPCFNTLRTKEQLGYIVFSGPRRANGIQGLRFIIQSEKPPHYLESRVEAFLITMEKSIEDMTEEAFQKHIQALAIRRLDKPKKLSAECAKYWGEIISQQYNFDRDNTEVAYLKTLTKEDIIKFYKEMLAVDAPRRHKVSVHVLAREMDSCPVVGEFPCQNDINLSQAPALPQPEVIQNMTEFKRGLPLFPLVKPHINFMAAKL

SEQ ID NO: 47293 - protein, 873 aa, Homo sapiens
MFDDPRNKRGVIIKGLEEITVHNKDEVYQILEKGAAKRTTAATLMNAYSSRSHSVFSVTIHMKETTIDGEELVKIGKLNLVDLAGSENIGRSGAVDKRAREAGNINQSLLTLGRVITALVERTPHVPYRESKLTRILQDSLGGRTRTSIIATISPASLNLEETLSTLEYAHRAKNILNKPEVNQKLTKKALIKEYTEEIERLKRDLAAAREKNGVYISEENFRVMSGKLTVQEEQIVELIEKIGAVEEELNRVTELFMDNKNELDQCKSDLQNKTQELETTQKHLQETKLQLVKEEYITSALESTEEKLHDAASKLLNTVEETTKDVSGLHSKLDRKKAVDQHNAEAQDIFGKNLNSLFNNMEELIKDGSSKQKAMLEVHKTLFGNLLSSSVSALDTITTVALGSLTSIPENVSTHVSQIFNMILKEQSLAAESKTVLQELINVLKTDLLSSLEMILSPTVVSILKINSQLKHIFKTSLTVADKIEDQKKELDGFLSILCNNLHELQENTICSLVESQKQCGNLTEDLKTIKQTHSQELCKLMNLWTERFCALEEKCENIQKPLSSVQENIQQKSKDIVNKMTFHSQKFCADSDGFSQELRNFNQEGTKLVEESVKHSDKLNGNLEKISQETEQRCESLNTRTVYFSEQWVSSLNEREQELHNLLEVVSQCCEASSSDITEKSDGRKAAHEKQHNIFLDQMTIDEDKLIAQNLELNETIKIGLTKLNCFLEQDLKLDIPTGTTPQRKSYLYPSTLVRTEPREHLLDQLKRKQPELLMMLNCSENNKEETIPDVDVEEAVLGQYTEEPLSQEPSVDAGVDCSSIGGVPFFQHKKSHGKDKENRGINTLERSKVEETTEHLVTKSRLPLRAQINL

SEQ ID NO: 47294 - protein, 740 aa, Homo sapiens
MCNFHHQGFVDAITELLKVRTDAEKLKVQVTDTNRRFQDAGKEVIVHTEDIIRCRIQQRNITTVVEKLQLCLPVLEMYSKLKEQMSAKRYYSALKTMEQLENVYFPWVSQYRFCQLMIENLPKLREDIKEISMSDLKDFLESIRKHSDKIGETAMKQAQHQKTFSVSLQKQNKMKFGKNMYINRDRIPEERNETVLKHSLEEEDENEEEILTVQDLVDFSPVYRCLHIYSVLGDEETFENYYRKQRKKQARLVLQPQSNMHETVDGYRRYFTQIVGFFVVEDHILHVTQGLVTRAYTDELWNMALSKIIAVLRAHSSYCTDPDLVLELKNLTVIFADTLQGYGFPVNRLFDLLFEIRDQYNETLLKKWAGVFRDIFEEDNYSPIPVVNEEEYKIVISKFPFQDPDLEKQSFPKKFPMSQSVPHIYIQVKEFIYASLKFSESLHRSSTEIDDMLRKSTNLLLTRTLSSCLLNLIRKPHIGLTELVQIIINTTHLEQACKYLEDFITNITNISQETVHTTRLYGLSTFKDARHAAEGEIYTKLNQKIDEFVQLADYDWTMSEPDGRASGYLMDLINFLRSIFQVFTHLPGKVAQTACMSACQHLSTSLMQMLLDSELKQISMGAVQQFNLDVIQCELFASSEPVPGFQGDTLQLAFIDLRQLLDLFMVWDWSTYLADYGQPASKYLRVNPNTALTLLEKMKDTSKKNNIFAQFRKNDRDKQKLIETVVKQLRSLVNGMSQHM

SEQ ID NO: 47295 - protein, 295 aa, Homo sapiens
MEIQLKDALEKNQQWLVYDQQREVYVKGLLAKIFELEKKTETAAHSLPQQTKKPESEGYLQEEKQKCYNDLLASAKKDLEVERQTITQLSFELSEFRRKYEETQKEVHNLNQLLYSQRRADVQHLEDDRHKTEKIQKLREENDIARGKLEEEKKRSEELLSQVQFLYTSLLKQQEEQTRVALLEQQMQACTLDFENEKLDRQHVQHQLHVILKELRKARNQITQLESLKQLHEFAITEPLVTFQGETENREKVAASPKSPTAALNESLVECPKCNIQYPATEHRDLLVHVEYCSK

SEQ ID NO: 47296 - protein, 56 aa, Homo sapiens
MMNAVENPAKGKKGQLKMTYCSKNHFRKKNMERWPINKLQQNCWIGKKQEIEGFIS

SEQ ID NO: 47297 - protein, 2297 aa, Homo sapiens
MTASVLIPVTQRKVVSAQSAADESSEKVSDINISKAHTVRRSGETSHTISQLNKLKEEPSGSNLPKILSIAREKIVSDENSNEKCWEKIMPDSAKNLNINCNNILRNHQHGLPQRQFYEMYNSVAEEDLCLETGIPSPLERKVFPGIQLELDRPSMGISPLGNQSVIIETGRAHPDSRRAVFHFHYEVDRRMSDTFCTLSENLILDDCGNCVPLPGGEEKQKKNYVAYTCKLMELAKNCDNKNEQLQCDHCDTLNDKYFCFEGSCEKVDMVYSGDSFCRKDFTDSQAAKTFLSHFEDFPDNCDDVEEDAFKSKKERSTLLVRRFCKNDREVKKSVYTGTRAIVRTLPSGHIGLTAWSYIDQKRNGPLLPCGRVMEPPSTVEIRQDGSQRLSEAQWYPIYNAVRREETENTVGSLLHFLTKLPASETAHGRISVGPCLKQCVRDTVCEYRATLQRTSISQYITGSLLEATTSLGARSGLLSTFGGSTGRMMLKERQPGPSVANSNALPSSSAGISKELIDLQPLIQFPEEVASILMEQEQTIYRRVLPVDYLCFLTRDLGTPECQSSLPCLKASISASILTTQNGEHNALEDLVMRFNEVSSWVTWLILTAGSMEEKREVFSYLVHVAKCCWNMGNYNAVMEFLAGLRSRKVLKMWQFMDQSDIETMRSLKDAMAQHESSCEYRKVVTRALHIPGCKVVPFCGVFLKELCEVLDGASGLMKLCPRYNSQEETLEFVADYSGQDNFLQRVGQNGLKNSEKESTVNSIFQVIRSCNRSLETDEEDSPSEGNSSRKSSLKDKSRWQFIIGDLLDSDNDIFEQSKEYDSHGSEDSQKAFDHGTELIPWYVLSIQADVHQFLLQGATVIHYDQDTHLSARCFLQLQPDNSTLTWVKPTTASPASSKAKLGVLNNTAEPGKFPLLGNAGLSSLTEGVLDLFAVKAVYMGHPGIDIHTVCVQNKLGSMFLSETGVTLLYGLQTTDNRLLHFVAPKHTAKMLFSGLLELTRAVRKMRKFPDQRQQWLRKQYVSLYQEDGRYEGPTLAHAVELFGGRRWSARNPSPGTSAKNAEKPNMQRNNTLGISTTKKKKKILMRGESGEVTDDEMATRKAKMHKECRSRSGSDPQDINEQEESEVNAIANPPNPLPSRRAHSLTTAGSPNLAAGTSSPIRPVSSPVLSSSNKSPSSAWSSSSWHGRIKGGMKGFQSFMVSDSNMSFVEFVELFKSFSVRSRKDLKDLFDVYAVPCNRSGSESAPLYTNLTIDENTSDLQPDLDLLTRNVSDLGLFIKSKQQLSDNQRQISDAIAAASIVTNGTGIESTSLGIFGVGILQLNDFLVNCQGEHCTYDEILSIIQKFEPSISMCHQGLMSFEGFARFLMDKENFASKNDESQENIKELQLPLSYYYIESSHNTYLTGHQLKGESSVELYSQVLLQGCRSVELDCWDGDDGMPIIYHGHTLTTKIPFKEVVEAIDRSAFINSDLPIIISIENHCSLPQQRKMAEIFKTVFGEKLVTKFLFETDFSDDPMLPSPDQLRKKVLLKNKKLKAHQTPVDILKQKAHQLASMQVQAYNGGNANPRPANNEEEEDEEDEYDYDYESLSDDNILEDRPENKSCNDKLQFEYNEEIPKRIKKADNSACNKGKVYDMELGEEFYLDQNKKESRQIAPELSDLVIYCQAVKFPGLSTLNASGSSRGKERKSRKSIFGNNPGRMSPGETASFNKTSGKSSCEGIRQTWEESSSPLNPTTSLSAIIRTPKCYHISSLNENAAKRLCRRYSQKLTQHTACQLLRTYPAATRIDSSNPNPLMFWLHGIQLVALNYQTDDLPLHLNAAMFEANGGCGYVLKPPVLWDKNCPMYQKFSPLERDLDSMDPAVYSLTIVSGQNVCPSNSMGSPCIEVDVLGMPLDSCHFRTKPIHRNTLNPMWNEQFLFHVHFEDLVFLRFAVVENNSSAVTAQRIIPLKALKRGYRHLQLRNLHNEVLEISSLFINSRRMEENSSGNTMSASSMFNTEERKCLQTHRVTVHGVPGPEPFTVFTINGGTKAKQLLQQILTNEQDIKPVTTDYFLMEEKYFISKEKNECRKQPFQRAIGPEEEIMQILSSWFPEEGYMGRIVLKTQQENLEEKNIVQDDKEVILSSEEESFFVQVHDVSPEQPRTVIKAPRVSTAQDVIQQTLCKAKYSYSILSNPNPSDYVLLEEVVKDTTNKKTTTPKSSQRVLLDQECVFQAQSKWKGAGKFILKLKEQVQASREDKKKGISFASELKKLTKSTKQPRGLTSPSQLLTSESIQTKEEKPVGGLSSSDTMDYRQ

SEQ ID NO: 47298 - protein, 785 aa, Homo sapiens [sequence omitted]

SEQ ID NO: 47299 - protein, 1424 aa, Homo sapiens [sequence omitted]

SEQ ID NO: 47300 - protein, 393 aa, Homo sapiens
MSLKRKEKGVIFGSPLTEEGIAQIYQLIEYLHKNLRVEGLFRVPGNSVRQQILRDALNNGTDIDLESGEFHSNDVATLLKMFLGELPEPLLTHKHFNAHLKIADLMQFDDKGNKTNIPDKDRQIEALQLLFLILPPPNRNLLKLLLDLLYQTAKKQDKNKMSAYNLALMFAPHVLWPKNVTANDLQENITKLNSGMAFMIKHSQKLFKAPAYIRECARLHYLGSRTQASKDDLDLIASCHTKSFQLAKSQKRNRVDSCPHQEETQHHTEEALRELFQHVHDMPESAKKKQLIRQFNKQSLTQTPGREPSTSQVQKRARSRSFSGLIKRKVLGNQMMSEKKKKNPTPESVAIGELKGTSKENRNLLFSGSPAVTMTPTRLKWSEGKKEGKKGFL

SEQ ID NO: 47301 - protein, 129 aa, Homo sapiens
MKSSENGAVSSINSRFAKVHILYVGSMPLKNSFRGTIRKEDVRATEKDKVEIYKSFRPGDIVLAKVISLGDAQSNYLLTTAENELGVVVAHSESGIQMVPISWCEMQCPKTHTKEFRKVARVQPEFLQT

SEQ ID NO: 47302 - protein, 154 aa, Homo sapiens [sequence omitted]

SEQ ID NO: 47303 - protein, 187 aa, Homo sapiens
MRGQRSLLLGPARLCLRLLLLLGYRRRCPPLLRGLVQRWRYGKVCLRSLLYNSFGGSDTAVDAAFEPVYWLVDNVIRWFGVVFVVLVIVLTGSIVAIAYLCVLPLILRTYSVPRLCWHFFYSHWNLILIVFHYYQAITTPPGYPPQGRNDIATVSICKKCIYPKPARTHHCSICNSRMLVLVGKDWH

SEQ ID NO: 47304 - protein, 194 aa, Homo sapiens
MKCVLVATEGAEVLFYWTDQEFEESLRLKFGQSENEEEELPALEDQLSTLLAPVIISSMTMLEKLSDTYTCFSTENGNFLYVLHLFGECLFIAINGDHTESEGDLRRKLYVLKYLFEVHFGLVTVDGHLIRKELRPPDLAQRVQLWEHFQSLLWTYSRLREQEQCFAVEVTTGRGSPQDLKLSGPGATDSPPAL

SEQ ID NO: 47305 - protein, 401 aa, Homo sapiens
MMLCTTSQFKGVDILLTSPWPKCVGNFGNSSGEVDTKKCGSALVSSLATGLKPRYHFAALEKTYYERLPYRNHIILQENAQHATRFIALANVGNPEKKKYLYAFSIVPMKLMDAAELVKQPPDVTENPYRKSGQEASIGKQILAPVEESACQFFFDLNEKQGRKRSSTGRDSKSSPHPKQPRKPPQPPGPCWFCLASPEVEKHLVVNIGTHCYLALAKGGLSDDHVLILPIGHYQSVVELSAEVVEEVEKYKATLRRFFKSRGKWCVVFERNYKSHHLQLQVIPVPISCSTTDDIKDAFITQAQEQQIELLEIPEHSDIKQIAQPGAAYFYVELDTGEKLFHRIKKNFPLQFGREVLASEAILNVPDKSDWRQCQISKEDEETLARRFRKDFEPYDFTLDD

SEQ ID NO: 47306 - protein, 1109 aa, Homo sapiens
MLDSPQKSNIKYGGSRLSITGTEQFERKLSSPKESKPKRVPPEKSPIIEAFMKGVKEHHEDHGIHESRRPCLSLASKYLAKGTNIYVPSSYHLPKEMKSLKKKHRSPERRKSLFIHENNEKNDRDRGKTNADSKKQTTVAEADIFNNSSRSLSSRSSLSRHHPEESPLGAKFQLSLASYCRERELKRLRKEQMEQRINSENSFSEASSLSLKSSIERKYKPRQEQRKQNDIIPGKNNLSNVENGHLSRKRSSSDSWEPTSAGSKQNKFPEKRKRNSVDSDLKSTRESMIPKARESFLEKRPDGPHQKEKFIKHIALKTPGDVLRLEDISKEPSDETDGSSAGLAPSNSGNSGHHSTRNSDQIQVAGTKETKMQKPHLPLSQEKSAIKKASNLQKNKTASSTTKEKETKLPLLSRVPSAGSSLVPLNAKNCALPVSKKDKERSSSKECSGHSTESTKHKEHKAKTNKADSNVSSGKISGGPLRSEYGTPTKSPPAALEVVPCIPSPAAPSDKAPSEGESSGNSNAGSSALKRKLRGDFDSDEESLGYNLDSDEEEETLKSLEEIMALNFNQTPAATGKPPALSKGLRSQSSDYTGHVHPGTYTNTLERLVKEMEDTQRLDELQKQLQEDIRQGRGIKSPIRIGEEDSTDDEDGLLEEHKEFLKKFSVTIDAIPDHHPGEEIFNFLNSGKIFNQYTLDLRDSGFIGQSAVEKLILKSGKTDQIFLTTQGFLTSAYHYVQCPVPVLKWLFRMMSVHTDCIVSVQILSTLMEITIRNDTFSDSPVWPWIPSLSDVAAVFFNMGIDFRSLFPLENLQPDFNEDYLVSETQTTSRGKESEDSSYKPIFSTLPETNILNVVKFLGLCTSIHPEGYQDREIMLLILMLFKMSLEKQLKQIPLVDFQSLLINLMKNIRDWNTKVPELCLGINELSSHPHNLLWLVQLVPNWTSRGRQLRQCLSLVIISKLLDEKHEDVPNASNLQVSVLHRYLVQMKPSDLLKKMVLKKKAEQPDGIIDDSLHLELEKQAYYLTYILLHLVGEVSCSHSFSSGQRKHFVLLCGALEKHVKCDIREDARLFYRTKVKDLVARIHGKWQEIIQNCRPTQGQLHDFWVPDS

SEQ ID NO: 47307 - protein, 532 aa, Homo sapiens [sequence omitted]

SEQ ID NO: 47308 - protein, 561 aa, Homo sapiens
MPRSLWLGCSSLADSMPSLRCLYNPGTGALTAFQTYNSCARLCLNQETVCLASTAMKTENCVAKTKLANGTSSMIVPKQRKLSASYEKEKELCVKYFEQWSESDQVEFVEHLISQMCHYQHGHINSYLKPMLQRDFITALPARGLDHIAENILSYLDAKSLCAAELVCKEWYRVTSDGMLWKKLIERMVRTDSLWRGLAERRGWGQYLFKNKPPDGNAPPNSFYRALYPKIIQDIETIESNWRCGRHSLQRIHCRSETSKGVYCLQYDDQKIVSGLRDNTIKIWDKNTLECKRILTGHTGSVLCLQYDERVIITGSSDSTVRVWDVNTGEMLNTLIHHCEAVLHLRFNNGMMVTCSKDRSIAVWDMASPTDITLRRVLVGHRAAVNVVDFDDKYIVSASGDRTIKVWNTSTCEFVRTLNGHKRGIACLQYRDRLVVSGSSDNTIRLWDIECGACLRVLEGHEELVRCIRFDNKRIVSGAYDGKIKVWDLVAALDPRAPAGTLCLRTLVEHSGRVFRLQFDEFQIVSSSHDDTILIWDFLNDPAAQAEPPRSPSRTYTYISR

SEQ ID NO: 47309 - protein, 168 aa, Homo sapiens [sequence omitted]

SEQ ID NO: 47310 - protein, 289 aa, Homo sapiens
MQLEDDSLYISQANFILAYQFRPDGASLNRRPLGVFAGHDEDVCHFVLANSHIVSAGGDGKIGIHKIHSTFTVKYSAHEQEVNCVDCKGGIIVSGSRDRTAKVWPLASGRLGQCLHTIQTEDRVWSIAISPLLSSFVTGTACCGHFSPLRIWDLNSGQLMTHLGSDFPPGAGVLDVMYESPFTLLSCGYDTYVRYWDLRTSVRKCVMEWEEPHDSTLYCLQTDGNHLLATGSSYYGVVRLWDRRQRACLHAFPLTSTPLSSPVYCLRLTTKHLYAALSYNLHVLDFQNP

SEQ ID NO: 47311 - protein, 842 aa, Homo sapiens
MEQRKELFRRLQKWELNTYLYAPKDDYKHRMFWREMYSVEEAEQLMTLISAAREYEIEFIYAISPGLDITFSNPKEVSTLKRKLDQVSQFGCRSFALLFDDIDHNMCAADKEVFSSFAHAQVSITNEIYQYLGEPETFLFCPTEYCGTFCYPNVSQSPYLRTVGEKLLPGIEVLWTGPKVVSKEIPVESIEEVSKIIKRAPVIWDNIHANDYDQKRLFLGPYKGRSTELIPRLKGVLTNPNCEFEANYVAIHTLATWYKSNMNGVRKDVVMTDSEDSTVSIQIKLENEGSDEDIETDVLYSPQMALKLALTEWLQEFGVPHQYSSRQVAHSGAKASVVDGTPLVAAPSLNATTVVTTVYQEPIMSQGAALSGEPTTLTKEEEKKQPDEEPMDMVVEKQEETDHKNDNQILSEIVEAKMAEELKPMDTDKESIAESKSPEMSMQEDCISDIAPMQTDEQTNKEQFVPGPNEKPLYTAEPVTLEDLQLLADLFYLPYEHGPKGAQMLREFQWLRANSSVVSVNCKGKDSEKIEEWRSRAAKFEEMCGLVMGMFTRLSNCANRTILYDMYSYVWDIKSIMSMVKSFVQWLGCRSHSSAQFLIGDQEPWAFRGGLAGEFQRLLPIDGANDLFFQPPPLTPTSKVYTIRPYFPKDEASVYKICREMYDDGVGLPFQSQPDLIGDKLVGGLLSLSLDYCFVLEDEDGICGYALGTVDVTPFIKKCKISWIPFMQEKYTKPNGDKELSEAEKIMLSFHEEQEVLPETFLANFPSLIKMDIHKKVTDPSVAKSMMACLLSSLKANGSRGAFCEVRPDDKRILEFYSKLGCFEIAKMEGFPKDVVILGRSL

SEQ ID NO: 47312 - protein, 603 aa, Homo sapiens [sequence omitted]

SEQ ID NO: 47313 - protein, 662 aa, Homo sapiens
MYDEIFMTEDPSKCSPRFWEELFLMKVNLEYLEGKLESLDGEELMKIKDNINCLFQHCIQALGEEHPIRVVNALQTLCALIRGVHQKNKSTSGFDIINMLMGFDKAELCMKNLMESLDSLLCAEGSESLKSLCLKLLLCLVTVTDNISQNTILEYVMINSIFEAILQILSHPPSRREHGYDAVVLLALLVNYRKYESVNPYIVKLSIVDDEATLNGMGLVIAQALSEYNRQYKDKEEEHQSGFFSALTNMVGSMFIADAHEKISVQTNEAILLALYEAVHLNRNFITVLAQSHPEMGLVTTPVSPAPTTPVTPLGTTPPSSDVISSVELPLDADVQTSNLLITFLKYSSIVMQDTKDEHRLHSGKLCLIILTCIAEDQYANAFLHDDNMNFRVNLHRMPMRHRKKAADKNLPCRPLVCAVLDLMVEFIVTHMMKEFPMDLYIRCIQVVHKLLCYQKKCRVRLHYTWRELWSALINLLKFLMSNETVLLAKHNIFTLALMIVNLFNMFITYGDTFLPTPSSYDELYYEIIRMHQSFDNLYSMVLRLSTNAGQWKEAASKVTHALVNIRAIINHFNPKIESYAAVNHISQLSEEQVLEVVRANYDTLTLKLQDGLDQYERYSEQHKEAAFFKELVRSISTNVRRNLAFHTLSQEVLLKEFSTIS

SEQ ID NO: 47314 - protein, 1751 aa, Homo sapiens
MENMADAVTHARFVGTDPASDEVVLMKILQVLRTLLLTPVGAHLTNESVCEIMQSCFRICFEMRLSELLRKSAEHTLVDMVQLLFTRLPQFKEEPKNYVGTNMKKLKMRAGGMSDSSKWKKQKRSPRPPRHMTKVTPGSELPTPNGTTLSSNLTGGMPFIDVPTPISSASSEAASAVVSPSTDSGLEFSSQTTSKEDLTDLEQPGSPGYSTATEPGSSELGVPEQPDLQEGTHVEKSQSASVESIPEVLEECTSPADHSDSASVHDMDYVNPRGVRFTQSSQKEGTALVPYGLPCIRELFRFLISLTNPHDRHNSEVMIHMGLHLLTVALESAPVAQCQTLLGLIKDEMCRHLFQLLSIERLNLYAASLRVCFLLFESMREHLKFQMEMYIKKLMEIITVENPKMPYEMKEMALEAIVQLWRIPSFVTELYINYDCDYYCSNLFEELTKLLSKNAFPVSGQLYTTHLLSLDALLTVIDSTEAHCQAKVLNSLTQQEKKETARPSCEIVDGTREASNTERTASDGKAVGMASDIPGLHLPGGGRLPPEHGKSGCSDLEEAVDSGADKKFARKPPRFSCLLPDPRELIEIKNKKKLLITGTEQFNQKPKKGIQFLQEKGLLTIPMDNTEVAQWLRENPRLDKKMIGEFVSDRKNIDLLESFVSTFSFQGLRLDEALRLYLEAFRLPGEAPVIQRLLEAFTERWMNCNGSPFANSDACFSLAYAVIMLNTDQHNHNVRKQNAPMTLEEFRKNLKGVNGGKDFEQDILEDMYHAIKNEEIVMPEEQTGLVRENYVWNVLLHRGATPEGIFLRVPTASYDLDLFTMTWGPTIAALSYVFDKSLEETIIQKAISGFRKCAMISAHYGLSDVFDNLIISLCKFTALSSESIENLPSVFGSNPKAHIAAKTVFHLAHRHGDILREGWKNIMEAMLQLFRAQLLPKAMIEVEDFVDPNGKISLQREETPSNRGESTVLSFVSWLTLSGPEQSSVRGPSTENQEAKRVALECIKQCDPEKMITESKFLQLESLQELMKALVSVTPDEETYDEEDAAFCLEMLLRIVLENRDRVGCVWQTVRDHLYHLCVQAQDFCFLVERAVVGLLRLAIRLLRREEISAQVLLSLRILLLMKPSVLSRVSHQVAYGLHELLKTNAANIHSGDDWATLFTLLECIGSGVKPPAALQATARADAPDAGAQSDSELPSYHQNDVSLDRGYTSDSEVYTDHGRPGKIHRSATDADVVNSGWLVVGKDDVDNSKPGPSRPGPSPLINQYSLTVGLDLGPHDTKSLLKCVESLSFIVRDAAHITPDNFELCVKTLRIFVEASLNGGCKSQEKRGKSHKYDSKGNRFKKKSKEGSMLRRPRTSSQHASRGGQSDDDEDEGVPASYHTVSLQVSQDLLDLMHTLHTRAASIYSSWAEEQRHLETGGQKIEADSRTLWAHCWCPLLQGIACLCCDARRQVRMQALTYLQRALLVHDLQKLDALEWESCFNKVLFPLLTKLLENISPADVGGMEETRMRASTLLSKVFLQHLSPLLSLSTFAALWLTILDFMDKYMHAGSSDLLSEAIPESLKNMLLVMDTAEIFHSADARGGGPSALWEITWERIDCFLPHLRDELFKQTVIQDPMPMEPQGQKPLASAHLTSAAGDTRTPGHPPPPEIPSELGACDFEKPESPRAASSSSPGSPVASSPSRLSPTPDGPPPLAQPPLILQPLASPLQVGVPPMTLPIILNPALIEATSPVPLLATPRPTDPIPTSEVN

SEQ ID NO: 47315 - protein, 750 aa, Homo sapiens
MIQKLQRQRLRSRPQGLTEAEQRELEQEAKELKKVMDLSIVRLRFSAFLRASDGSFSLPLKPVISQPIHDSKSPGASNLKISRMDKTAGSVRGGDEVYLLCDKVQKDDIEVRFYEDDENGWQAFGDFSPTDVHKQYAIVFRTPPYHKMKIERPVTVFLQLKRKRGGDVSDSKQFTYYPLVEDKEEVQRKRRKALPTFSQPFGGGSHMGGGSGGAAGGYGGAGGGGSLGFFPSSLAYSPYQSGAGPMGCYPGGGGGAQMAATVPSRDSGEEAAEPSAPSRTPQCEPQAPEMLQRAREYNARLFGLAQRSARALLDYGVTADARALLAGQRHLLTAQDENGDTPLHLAIIHGQTSVIEQIVYVIHHAQDLGVVNLTNHLHQTPLHLAVITGQTSVVSFLLRVGADPALLDRHGDSAMHLALRAGAGAPELLRALLQSGAPAVPQLLHMPDFEGLYPVHLAVRARSPECLDLLVDSGAEVEATERQGGRTALHLATEMEELGLVTHLVTKLRANVNARTFAGNTPLHLAAGLGYPTLTRLLLKAGADIHAENEEPLCPLPSPPTSDSDSDSEGPEKDTRSSFRGHTPLDLTCSTKVKTLLLNAAQNTMEPPLTPPSPAGPGLSLGDTALQNLEQLLDGPEAQGSWAELAERLGLRSLVDTYRQTTSPSGSLLRSYELAGGDLAGLLEALSDMGLEEGVRLLRGPETRDKLPSTEVKEDSAYGSQSVEQEAEKLGPPPEPPGGLCHGHPQPQVH

SEQ ID NO: 47316 - protein, 412 aa, Homo sapiens [sequence omitted]

SEQ ID NO: 47317 - protein, 138 aa, Homo sapiens
MKQQDRLEEREQDIEDQLYKLESDKRLVEEKVNQLKEEVRLQYEKLHQLLDEDLRQTVEVLDKAQAKFCSENAAQALHLGERMQEAKKLLGSLQLLFDKTEDVSFMKNTKSVKILMDSRCPVHCPQDPDLHEQQPFPH

SEQ ID NO: 47318 - protein, 354 aa, Homo sapiens [sequence omitted]

SEQ ID NO: 47319 - protein, 20 aa, Homo sapiens
MEKIKCFGFDMDYTLAGEPV

SEQ ID NO: 47320 - protein, 1788 aa, Homo sapiens
MRILGCVKEVNELELVISLPNGLQGFVQVTEICDAYTKKLNEQVTQEQPLKDLLHLPELFSPGMLVRCVVSSLGITDRGKKSVKLSLNPKNVNRVLSAEALKPGMLLTGTVSSLEDHGYLVDIGVDGTRAFLPLLKAQEYIRQKNKGAKLKVGQYLNCIVEKVKGNGGVVSLSVGHSEVSTAIATEQQSWNLNNLLPGLVVKAQVQKVTPFGLTLNFLTFFTGVVDFMHLDPKKAGTYFSNQAVRACILCVHPRTRVVHLSLRPIFLQPGRPLTRLSCQNLGAVLDDVPVQGFFKKAGATFRLKDGVLAYARLSHLSDSKNVFNPEAFKPGNTHKCRIIDYSQMDELALLSLRTSIIEAQYLRYHDIEPGAVVKGTVLTIKSYGMLVKVGEQMRGLVPPMHLADILMKNPEKKYHIGDEVKCRVLLCDPEAKKLMMTLKKTLIESKLPVITCYADAKPGLQTHGFIIRVKDYGCIVKFYNNVQGLVPKHELSTEYIPDPERVFYTGQVVKVVVLNCEPSKERMLLSFKLSSDPEPKKEPAGHSQKKGKAINIGQLVDVKVLEKTKDGLEVAVLPHNIRAFLPTSHLSDHVANGPLLHHWLQAGDILHRVLCLSQSEGRVLLCRKPALVSTVEGGQDPKNFSEIHPGMLLIGFVKSIKDYGVFIQFPSGLSGLAPKAIMSDKFVTSTSDHFVEGQTVAAKVTNVDEEKQRMLLSLRLSDCGLGDLAITSLLLLNQCLEELQGVRSLMSNRDSVLIQTLAEMTPGMFLDLVVQEVLEDGSVVFSGGPVPDLVLKASRYHRAGQEVESGQKKKVVILNVDLLKLEVHVSLHQDLVNRKARKLRKGSEHQAIVQHLEKSFAIASLVETGHLAAFSLTSHLNDTFRFDSEKLQVGQGVSLTLKTTEPGVTGLLLAVEGPAAKRTMRPTQKDSETVDEDEEVDPALTVGTIKKHTLSIGDMVTGTVKSIKPTHVVVTLEDGIIGCIHASHILDDVPEGTSPTTKLKVGKTVTARVIGGRDMKTFKYLPISHPRFVRTIPELSVRPSELEDGHTALNTHSVSPMEKIKQYQAGQTVTCFLKKYNVVKKWLEVEIAPDIRGRIPLLLTSLSFKVLKHPDKKFRVGQALRATVVGPDSSKTLLCLSLTGPHKLEEGEVAMGRVVKVTPNEGLTVSFPFGKIGTVSIFHMSDSYSETPLEDFVPQKVVRCYILSTADNVLTLSLRSSRTNPETKSKVEDPEINSIQDIKEGQLLRGYVGSIQPHGVFFRLGPSVVGLARYSHVSQHSPSKKALYNKHLPEGKLLTARVLRLNHQKNLVELSFLPGDTGKPDVLSASLEGQLTKQEERKTEAEERDQKGEKKNQKRNEKKNQKGQEEVEMPSKEKQQPQKPQAQKRGGRECRESGSEQERVSKKPKKAGLSEEDDSLVDVYYREGKEEAEETNVLPKEKQTKPAEAPRLQLSSGFAWNVGLDSLTPALPPLAESSDSEEDEKPHQATIKKSKKERELEKQKAEKELSRIEEALMDPGRQPESADDFDRLVLSSPNSSILWLQYMAFHLQATEIEKARAVAERALKTISFREEQEKLNVWVALLNLENMYGSQESLTKVFERAVQYNEPLKVFLHLADIYAKSEKFQEAGELYNRMLKRFRQEKAVWIKYGAFLLRRSQAAASHRVLQRALECLPSKEHVDVIAKFAQLEFQLGDAERAKAIFENTLSTYPKRTDVWSVYIDMTIKHGSQKDVRDIFERVIHLSLAPKRMKFFFKRYLDYEKQHGTEKDVQAVKAKALEYVEAKSSVLED

SEQ ID NO: 47321 - protein, 302 aa, Homo sapiens [sequence omitted]

SEQ ID NO: 47322 - protein, 45 aa, Homo sapiens
MATSAHSWPQERARLRMIYPLFTDEESEAQRTVMKCDQTLRSPKR

SEQ ID NO: 47323 - protein, 181 aa, Homo sapiens
MRFCPYSHRTRLVLKAKDIRHEVVNINLRNKPEWYYTKHPFGHIPVLETSQCQLIYESVIACEYLDDAYPGRKLFPYDPYERARQKMLLELFCKILEYQNTTFFGGTCISMIDYLLWPWFERLDVYGILDCVSHTPALRLWISAMKWDPTVCALLMDKSIFQGFLNLYFQNNPNAFDFGLC

SEQ ID NO: 47324 - protein, 623 aa, Homo sapiens
MPPKVTSELLRQLRQAMRNSEYVTEPIQAYIIPSGDAHQSEYIAPCDCRRAFVSGFDGSAGTAIITEEHAAMWTDGRYFLQAAKQMDSNWTLMKMGLKDTPTQEDWLVSVLPEGSRVGVDPLIIPTDYWKKMAKVLRSAGHHLIPVKENLVDKIWTDRPERPCKPLLTLGLDYTGISWKDKVADLRLKMAERNVMWFVVTALDEIAWLFNLRGSDVEHNPVFFSYAIIGLETIMLFIDGDRIDAPSVKEHLLLDLGLEAEYRIQVHPYKSILSELKALCADLSPREKVWVSDKASYAVSETIPKDHRCCMPYTPICIAKAVKNSAESEGMRRAHIKDAVALCELFNWLEKEVPKGGVTEISAADKAEEFRRQQADFVDLSFPTISSTGPNGAIIHYAPVPETNRTLSLDEVYLIDSGAQYKDGTTDVTRTMHFGTPTAYEKECFTYVLKGHIAVSAAVFPTGTKGHLLDSFARSALWDSGLDYLHGTGHGVGSFLNVHEGPCGISYKTFSDEPLEAGMIVTDEPGYYEDGAFGIRIENVVLVVPVKTKYNFNNRGSLTFEPLTLVPIQTKMIDVDSLTDKECDWLNNYHLTCRDVIGKELQKQGRQEALEWLIRETQPISKQH

SEQ ID NO: 47325 - protein, 480 aa, Homo sapiens
MRLDLSKRSIHILPSSIKELTQLTELYLYSNKLQSLPAEVGCLVNLMTLALSENSLTSLPDSLDNLKKLRMLDLRHNKLREIPSVVYRLDSLTTLYLRFNRITTVEKDIKNLSKLSMLSIRENKIKQLPAEIGELCNLITLDVAHNQLEHLPKEIGNCTQITNLDLQHNELLDLPDTIGNLSSLSRLGLRYNRLSAIPRSLAKCSALEELNLENNNISTLPESLLSSLVKLNSLTLARNCFQLYPVGGPSQFSTIYSLNMEHNRINKIPFGIFSRAKVLSKLNMKDNQLTSLPLDFGTWTSMVELNLATNQLTKIPEDVSGLVSLEVLILSNNLLKKLPHGLGNLRKLRELDLEENKLESLPNEIAYLKDLQKLVLTNNQLTTLPRGIGHLTNLTHLGLGENLLTHLPEEIGTLENLEELYLNDNPNLHSLPFELALCSKLSIMSIENCPLSHLPPQIVAGGPSFIIQFLKMQGPYRAMV

SEQ ID NO: 47326 - protein, 371 aa, Homo sapiens
MIDSVLWYWPLHTTGGSVNFIMLINWTVMILYNYFNAMFVGPGFVPLGWKPDTMYLQYCKVCQAYKAPRSHHCRKCNRCVMKMDHHCPWINNCCGYQNHASFTLFLLLAPLGCIHAAFIFVMTMYTQLYHRLSFGWNTVKIDMSAARRDPLPIVPFGLAAFATTLFALGLALGTTIAVGMLFFIQMKIILRNKTSIESWIEEKAKDRIQYYQLDEVFVFPYDMGSRWRNFKQVFTWSGVPEGDGLEWPVREGCHQYSLTIEQLKQKADKRVRSVRYKVIEDYSGACCPLNKGIKTFFTSPCTEEPRIQLQKGEFILATRGLRYWLYGDKILDDSFIEGVSRIRGWFPRKCVEKCPCDAETDQAPEGEKKNR

SEQ ID NO: 47327 - protein, 375 aa, Homo sapiens
MIDSVLWYWPLHTTGGSVNFIMLINWTVMILYNYFNAMFVGPGFVPLGWKPEISQDTMYLQYCKVCQAYKAPRSHHCRKCNRCVMKMDHHCPWINNCCGYQNHASFTLFLLLAPLGCIHAAFIFVMTMYTQLYHRLSFGWNTVKIDMSAARRDPLPIVPFGLAAFATTLFALGLALGTTIAVGMLFFIQMKIILRNKTSIESWIEEKAKDRIQYYQLDEVFVFPYDMGSRWRNFKQVFTWSGVPEGDGLEWPVREGCHQYSLTIEQLKQKADKRVRSVRYKVIEDYSGACCPLNKGIKTFFTSPCTEEPRIQLQKGEFILATRGLRYWLYGDKILDDSFIEGVSRIRGWFPRKCVEKCPCDAETDQAPEGEKKNR

SEQ ID NO: 47328 - protein, 582 aa, Homo sapiens [sequence omitted]

SEQ ID NO: 47329 - protein, 651 aa, Homo sapiens
MNTIKQLESRIEELNKEVKASRDQLIAQDVTAKNAVQQLHKEMAQRMEQANKKCEEARQEKEAMVMKYVRGEKESLDLRKEKETLEKKLRDANKELEKNTNKIKQLSQEKGRLHQLYETKEGETTRLIREIDKLKEDINSHVIKVKWAQNKLKAEMDSHKETKDKLKETTTKLTQAKEEADQIRKNCQDMIKTYQESEEIKSNELDAKLRVTKGELEKQMQEKSDQLEMHHAKIKELEDLKRTFKEGMDELRTLRTKVKCLEDERLRTEDELSKYKEIINRQKAEIQNLLDKVKTADQLQEQLQRGKQEIENLKEEVESLNSLINDLQKDIEGSRKRESELLLFTERLTSKNAQLQSESNSLQSQFDKVSCSESQLQSQCEQMKQTNINLESRLLKEEELRKEEVQTLQAELACRQTEVKALSTQVEELKDELVTQRRKHASSIKDLTKQLQQARRKLDQVESGSYDKEVSSMGSRSSSSGSLNARSSAEDRSPENTGSSVAVDNFPQVDKAMLIERIVRLQKAHARKNEKIEFMEDHIKQLVEEIRKKTKIIQSYILREESGTLSSEASDFNKVHLSRRGGIMASLYTSHPADNGLTLELSLEINRKLQAVLEDTLLKNITLKENLQTLGTEIERLIKHQHELEQRTKKT

SEQ ID NO: 47330 - protein, 1168 aa, Homo sapiens
MTEPFNFEKNENKLPPHESLRSPGTLPNHPNFRLKSSENGNKKNNFLLCEQTKQYLASQEDNSVSSNPNGINGEVVGSKGDRKKLPAGNSVSPPSAESNSPPKEVNIKPGNNVRPAKSKKLNKLVENSLSISNPGLFTSLGPPLRSTTCHRCGLFGSLRCSQCKQTYYCSTACQRRDWSAHSIVCRPVQPNFHKLENKSSIETKDVEVNNKSDCPLGVTKEIAIWAERIMFSDLRSLQLKKTMEIKGTVTEFKHPGDFYVQLYSSEVLEYMNQLSASLKETYANVHEKDYIPVKGEVCIAKYTVDQTWNRAIIQNVDVQQKKAHVLYIDYGNEEIIPLNRIYHLNRNIDLFPPCAIKCFVANVIPAEGNWSSDCIKATKPLLMEQYCSIKIVDILEEEVVTFAVEVELPNSGKLLDHVLIEMGYGLKPSGQDSKKENADQSDPEDVGKMTTENNIVVDKSDLIPKVLTLNVGDEFCGVVAHIQTPEDFFCQQLQSGRKLAELQASLSKYCDQLPPRSDFYPAIGDICCAQFSEDDQWYRASVLAYASEESVLVGYVDYGNFEILSLMRLCPIIPKLLELPMQAIKCVLAGVKPSLGIWTPEAICLMKKLVQNKIITVKVVDKLENSSLVELIDKSETPHVSVSKVLLDAGFAVGEQSMVTDKPSDVKETSVPLGVEGKVNPLEWTWVELGVDQTVDVVVCVIYSPGEFYCHVLKEDALKKLNDLNKSLAEHCQQKLPNGFKAEIGQPCCAFFAGDGSWYRALVKEILPNGHVKVHFVDYGNIEEVTADELRMISSTFLNLPFQGIRCQLADIQSRNKHWSEEAITRFQMCVAGIKLQARVVEVTENGIGVELTDLSTCYPRIISDVLIDEHLVLKSASPHKDLPNDRLVNKHELQVHVQGLQATSSAEQWKTIELPVDKTIQANVLEIISPNLFYALPKGMPENQEKLCMLTAELLEYCNAPKSRPPYRPRIGDACCAKYTSDDFWYRAVVLGTSDTDVEVLYADYGNIETLPLCRVQPITSSHLALPFQIIRCSLEGLMELNGSSSQLIIMLLKNFMLNQNVMLSVKGITKNVHTVSVEKCSENGTVDVADKLVTFGLAKNITPQRQSALNTEKMYRMNCCCTELQKQVEKHEHILLFLLNNSTNQNKFIEMKKLLKKTASLGGKPL

SEQ ID NO: 47331 - protein, 707 aa, Homo sapiens [sequence omitted]

SEQ ID NO: 47332 - protein, 319 aa, Homo sapiens [sequence omitted]

SEQ ID NO: 47333 - protein, 686 aa, Homo sapiens
MQPSFLPPGSVHATSKEAALFFLSETAPTSAYSSPARSLGDTGITPLSPSHIVNDTDSNVSEQQSFLVVVAVDFGTTSSGYAYSFTKEPECIHVMRRWEGGDPGVSNQKTPTTILLTPERKFHSFGYAARDFYHDLDPNEAKQWLYLEKFKMKLHTTGDLTMDTDLTAANGKKVKALEIFAYALQYFKEQALKELSDQAGSEFENSDVRWVITVPAIWKQPAKQFMRQAAYQAGLASPENSEQLIIALEPEAASIYCRKLRLHQMIELSSKAAVNGYSGSDTVGAGFTQAKEHIRRNRQSRTFLVENVIGEIWSELEEGDKYVVVDSGGGTVDLTVHQIRLPEGHLKELYKATGGPYGSLGVDYEFEKLLYKIFGEDFIEQFKIKRPAAWVDLMIAFESRKRAAAPDRTNPLNITLPFSFIDYYKKFRGHSVEHALRKSNVDFVKWSSQGMLRMSPDAMNALFKPTIDSIIEHLRDLFQKPEVSTVKFLFLVGGFAEAPLLQQAVQAAFGDQCRIIIPQDVGLTILKGAVLFGLDPAVIKVRRSPLTYGVGVLNRYVEGKHPPEKLLVKDGTRWCTDVFDKFISADQSVALGELVKRSYTPAKPSQLVIVINIYSSEHDNVSFITDPGVKKCGTLRLDLTGTSGTAVPARREIQTLMQFGDTEIKATAIDIATSKSVKVGIDFLNY

SEQ ID NO: 47334 - protein, 1149 aa, Homo sapiens
MILASAVLGSFLTLLAQFFLLYRRQPEPPADEAARAGEGFRYIKPVPGLLLREYLYGGGRDEEPSGAAPEGGATPTAAPETPAPPTRETCYFLNATILFLFRELRDTALTRRWVTKKIKVEFEELLQTKTAGRLLEGLSLRDVFLGETVPFIKTIRLVRPVVPSATGEPDGPEGEALPAACPEELAFEAEVEYNGGFHLAIDVDLVFGKSAYLFVKLSRVVGRLRLVFTRVPFTHWFFSFVEDPLIDFEVRSQFEGRPMPQLTSIIVNQLKKIIKRKHTLPNYKIRFKPFFPYQTLQGFEEDEEHIHIQQWALTEGRLKVTLLECSRLLIFGSYDREANVHCTLELSSSVWEEKQRSSIKTVELIKGNLQSVGLTLRLVQSTDGYAGHVIIETVAPNSPAAIADLQRGDRLIAIGGVKITSTLQVLKLIKQAGDRVLVYYERPVGQSNQGAVLQDNFGQLEENFLSSSCQSGYEEEAAGLTVDTESRELDSEFEDLASDVRAQNEFKDEAQSLSHSPKRVPTTLSIKPLGAISPVLNRKLAVGSHPLPPKIQSKDGNKPPPLKTSEITDPAQVSKPTQGSAFKPPVPPRPQAKVPLPSADAPNQAEPDVLVEKPEKVVPPPLVDKSAEKQAKNVDAIDDAAAPKQFLAKQEVAKDVTSETSCPTKDSSDDRQTWESSEILYRNKLGKWTRTRASCLFDIEACHRYLNIALWCRDPFKLGGLICLGHVSLKLEDVALGCLATSNTEYLSKLRLEAPSPKAIVTRTALRNLSMQKGFNDKFCYGDITIHFKYLKEGESDHHVVTNVEKEKEPHLVEEVSVLPKEEQFVGQMGLTENKHSFQDTQFQNPTWCDYCKKKVWTKAASQCMFCAYVCHKKCQEKCLAETSVCGATDRRIDRTLKNLRLEGQETLLGLPPRVDAEASKSVNKTTGLTRHIINTSSRLLNLRQVSKTRLSEPGTDLVEPSPKHTPNTSDNEGSDTEVCGPNSPSKRGNSTGIKLVRKEGGLDDSVFIAVKEIGRDLYRGLPTEERIQKLEFMLDKLQNEIDQELEHNNSLVREEKETTDTRKKSLLSAALAKSGERLQALTLLMIHYRAGIEDIETLESLSLDQHSKKISKYTDDTEEDLDNEISQLIDSQPFSSISDDLFGPSESV

SEQ ID NO: 47335 - protein, 31 aa, Homo sapiens [sequence omitted]

SEQ ID NO: 47336 - protein, 426 aa, Homo sapiens [sequence omitted]

SEQ ID NO: 47337 - protein, 446 aa, Homo sapiens
MHRSLVGLDKFLGQVAINLNDIFEDKQRRKTEWFRLESKQGKRIKNRGEIKVNIQFMRNNMTASMFDLSMKDKTRSPFAKLKDKMKGRKNDGTFSDTSSAIIPSTHMPDANSEFSSGEIQMKSKPKKPFLLGPQRLSSAHSMSDLSGSHMSSEKLKAGTIGQTHLLGHQLDSFGTVPESGSLKSPHRRTLSFDTSKMNQPDSIVDEGELCFGRQNDPFTNVTASLPQKFATLPRKKNPFEESSETWDSSMNLFSKPIEIRKENKREKREKVSLFERVTGKKDSRRSDKLNNGGSDSPCDLKSPNAFSENRQDYFDYESTNPFTAKFRASNIMPSSRNTLLTPAVAEWRGSLRWAELFHMSPTSNEDLRKIPDSNPFDATAGYRSLTYEEVLQELVKHKELLRRKDTHIRELEDYIDNLLVRVMEETPSILRVPYEPSRKAGKFSNS

SEQ ID NO: 47338 - protein, 294 aa, Homo sapiens [sequence omitted]

SEQ ID NO: 47339 - protein, 566 aa, Homo sapiens
MQVASGNGDRDPLPPGWEIKIDPQTGWPFFVDHNSRTTTWNDPRVPSEGPKETPSSANGPSREGSRLPPAREGHPVYPQLRPGYIPIPVLHEGAENRQVHPFHVYPQPGMQRFRTEAAAAAPQRSQSPLRGMPETTQPDKQCGQVAAAAAAQPPASHGPERSQSPAASDCSSSSSSASLPSSGRSSLGSHQLPRGYISIPVIHEQNVTRPAAQPSFHQAQKTHYPAQQGEYQTHQPVYHKIQGDDWEPRPLRAASPFRSSVQGASSREGSPARSSTPLHSPSPIRVHTVVDRPQQPMTHRETAPVSQPENKPESKPGPVGPELPPGHIPIQVIRKEVDSKPVSQKPPPPSEKVEVKVPPAPVPCPPPSPGPSAVPSSPKSVATEERAAPSTAPAEATPPKPGEAEAPPKHPGVLKVEAILEKVQGLEQAVDNFEGKKTDKKYLMIEEYLTKELLALDSVDPEGRADVRQARRDGVRKVQTILEKLEQKAIDVPGQVQVYELQPSNLEADQPLQAIMEMGAVAADKGKKNAGNAEDPHTETQQPEATAAATSNPSSMTDTPGNPAAP

SEQ ID NO: 47340 - protein, 572 aa, Homo sapiens
MIQDMFDPEFYMGVYETVNQNTKAHVLHFGKYRDVAECGPQQELDLNSPRNTTLERQTFYCVPVPGESTWVKEAYVNANQARVSPSTSYTPSRHKRSYEDDDDMDLQPNKQKDQHAGARQAGSVGGLQWCGEPKRLETEASTGQQLNSLNLSSPFDLNFPLPGEKGPACLVKVYEDWDCFKVNDILELYGILSVDPVLSILNNDERDASALLDPMECTDTAEEQRVHSPPASLVPRIHVILAQKLQHINPLLPACLNKEESKTCKFVSSFMSELSPVRAELLGFLTHALLGDSLAAEYLILHLISTVYTRRDVLPLGKFTVNLSGCPRNSTFTEHLYRIIQHLVPASFRLQMTIENMNHLKFIPHKDYTANRLVSGLLQLPSNTSLVIDETLLEQGQLDTPGVHNVTALSNLITWQKVDYDFSYHQMEFPCNINVFITSEGRSLLPADCQIHLQPQLIPPNMEEYMNSLLSAVLPSVLNKFRIYLTLLRFLEYSISDEITKAVEDDFVEMRKNDPQSITADDLHQLLVVARCLSLSAGQTTLSRERWLRAKQLESLRRTRLQQQKCVNGNEL

SEQ ID NO: 47341 - protein, 570 aa, Homo sapiens
MIQDMFDPEFYMGVYETVNQNTKAHVLHFGKYRDVAECGPQQELDLNSPRNTTLERQTFYCVPVPGESTWVKEAYVNANQARVSPSTSYTPSRHKRSYEDDDDMDLQPNKQKDQHAGARQAGSVGGLQWCGEPKRLETEASTGQQLNSLNLSSPFDLNFPLPGEKGPACLVKVYEDWDCFKVNDILELYGILSVDPVLSILNNDERDASALLDPMECTDTAEEQRVHSPPASLVPRIHVILAQKLQHINPLLPACLNKEESKTFVSSFMSELSPVRAELLGFLTHALLGDSLAAEYLILHLISTVYTRRDVLPLGKFTVNLSGCPRNSTFTEHLYRIIQHLVPASFRLQMTIENMNHLKFIPHKDYTANRLVSGLLQLPSNTSLVIDETLLEQGQLDTPGVHNVTALSNLITWQKVDYDFSYHQMEFPCNINVFITSEGRSLLPADCQIHLQPQLIPPNMEEYMNSLLSAVLPSVLNKFRIYLTLLRFLEYSISDEITKAVEDDFVEMRKNDPQSITADDLHQLLVVARCLSLSAGQTTLSRERWLRAKQLESLRRTRLQQQKCVNGNEL

SEQ ID NO: 47342 - protein, 751 aa, Homo sapiens
MGLTSTWRYGRGPGIGTVTMVSWGRFICLVVVTMATLSLARPSFSLVEDTTLEPEDAISSGDDEDDTDGAEDFVSENSNNKRAPYWTNTEKMEKRLHAVPAANTVKFRCPAGGNPMPTMRWLKNGKEFKQEHRIGGYKVRNQHWSLIMESVVPSDKGNYTCVVENEYGSINHTYHLDVVERSPHRPILQAGLPANASTVVGGDVEFVCKVYSDAQPHIQWIKHVEKNGSKYGPDGLPYLKVLKAAGVNTTDKEIEVLYIRNVTFEDAGEYTCLAGNSIGISFHSAWLTVLPAPGREKEITASPDYLEIAIYCIGVFLIACMVVTVILCRMKNTTKKPDFSSQPAVHKLTKRIPLRRQVTVSAESSSSMNSNTPLVRITTRLSSTADTPMLAGVSEYELPEDPKWEFPRDKLTLGKPLGEGCFGQVVMAEAVGIDKDKPKEAVTVAVKMLKDDATEKDLSDLVSEMEMMKMIGKHKNIINLLGACTQDGPLYVIVEYASKGNLREYLRARRPPGMEYSYDINRVPEEQMTFKDLVSCTYQLARGMEYLASQKCIHRDLAARNVLVTENNVMKIADFGLARDINNIDYYKKTTNGRLPVKWMAPEALFDRVYTHQSDVWSFGVLMWEIFTLGGSPYPGIPVEELFKLLKEGHRMDKPANCTNELYMMMRDCWHAVPSQRPTFKQLVEDLDRILTLTTNEEYLDLSQPLEQYSPSYPDTRSSCSSGDDSVFSPDPMPYEPCLPQYPHINGSVKT

SEQ ID NO: 47343 - protein, 477 aa, Homo sapiens
MTVQDYQDLIDRGWRRSGKYVYKPVMNQTCCPQYTIRCRPLQFQPSKSHKKVLKKMLKFLAKGEVPKGSCEDEPMDSTMDDAVAGDFALINKLDIQCDLKTLSDDIKESLESEGKNSKKEEPQELLQSQDFVGEKLGSGEPSHSVKVHTVPKPGKGADLSKPPCRKAKEIRKERKRLKLMQQNPAGELEGFQAQGHPPSLFPPKAKSNQPKSLEDLIFESLPENASHKLEVRVVRSSPPSSQFKATLLESYQVYKRYQMVIHKNPPDTPTESQFTRFLCSSPLEAETPPNGPDCGYGSFHQQYWLDGKIIAVGVIDILPNCVSSVYLYYDPDYSFLSLGVYSALREIAFTRQLHEKTSQLSYYYMGFYIHSCPKMKYKGQYRPSDLLCPETYVWVPIEQCLPSLENSKYCRFNQDPEAVDEDRSTEPDRLQVFHKRAIMPYGVYKKQQKDPSEEAAVLQYASLVGQKCSERMLLFRN

SEQ ID NO: 47344 - protein, 477 aa, Homo sapiens
MTVQDYQDLIDRGWRRSGKYVYKPVMNQTCCPQYTIRCRPLQFQPSKSHKKVLKKMLKFLAKGEVPKGSCEDEPMDSTMDDAVAGDFALINKLDIQCDLKTLSDDIKESLESEGKNSKKEEPQELLQSQDFVGEKLGSGEPSHSVKVHTVPKPGKGADLSKPPCRKAKEIRKERKRLKLMQQNPAGELEGFQAQGHPPSLFPPKAKSNQPKSLEDLIFESLPENASHKLEVRLVPVSFEDPEFKSSFSQSFSLYVKYQVAIHQDPPDECGKTEFTRFLCSSPLEAETPPNGPDCGYGSFHQQYWLDGKIIAVGVIDILPNCVSSVYLYYDPDYSFLSLGVYSALREIAFTRQLHEKTSQLSYYYMGFYIHSCPKMKYKGQYRPSDLLCPETYVWVPIEQCLPSLENSKYCRFNQDPEAVDEDRSTEPDRLQVFHKRAIMPYGVYKKQQKDPSEEAAVLQYASLVGQKCSERMLLFRN

SEQ ID NO: 47345 - protein, 512 aa, Homo sapiens
MQESPKLPQQSYNFDPDTCDESVDPFKTSSKTPSSPSKSPASFEIPASAMEANGVDGDGLNKPAKKKKTPLKTVKKSPKRSPLSDPPSQDPTPAATPETPPVISAVVHATDEEKLAVTNQKWTCMTVDLEADKQDYPQPSDLSTFVNETKFSSPTEELDYRNSYEIEYMEKIGSSLPQDDDAPKKQALYLMFDTSQESPVKSSPVRMSESPTPCSGSSFEETEALVNTAAKNQHPVPRGLAPNQESHLQVPEKSSQKELEAMGLGTPSEAIEIREAAHPTDVSISKTALYSRIGTAEVEKPAGLLFQQPDLDSALQIARAEIITKEREVSEWKDKYEESRREVMEMRKIVAEYEKTIAQMIEDEQREKSVSHQTVQQLVLEKEQALADLNSVEKSLADLFRRYEKMKEVLEGFRKNEEVLKRCAQEYLSRVKKEEQRYQALKVHAEEKLDRANAEIAQVRGKAQQEQAAHQASLRKEQLRVDALERTLEQKNKEIEELTKICDELIAKMGKS

SEQ ID NO: 47346 - protein, 516 aa, Homo sapiens
MQESPKLPQQSYNFDPDTCDESVDPFKTSSKTPSSPSKSPASFEIPASAMEANGVDGDGLNKPAKKKKTPLKTDTFRVKKSPKRSPLSDPPSQDPTPAATPETPPVISAVVHATDEEKLAVTNQKWTCMTVDLEADKQDYPQPSDLSTFVNETKFSSPTEELDYRNSYEIEYMEKIGSSLPQDDDAPKKQALYLMFDTSQESPVKSSPVRMSESPTPCSGSSFEETEALVNTAAKNQHPVPRGLAPNQESHLQVPEKSSQKELEAMGLGTPSEAIEIREAAHPTDVSISKTALYSRIGTAEVEKPAGLLFQQPDLDSALQIARAEIITKEREVSEWKDKYEESRREVMEMRKIVAEYEKTIAQMIEDEQREKSVSHQTVQQLVLEKEQALADLNSVEKSLADLFRRYEKMKEVLEGFRKNEEVLKRCAQEYLSRVKKEEQRYQALKVHAEEKLDRANAEIAQVRGKAQQEQAAHQASLRKEQLRVDALERTLEQKNKEIEELTKICDELIAKMGKS

SEQ ID NO: 47347 - protein, 341 aa, Homo sapiens
MDNPQNLPSGSSRVGAIKLTYISKVSDATKLRPKAEFCFVMNAGMRKYFLQANDQQDLVEWVNVLNKAIKITVPKQSDSQPNSDNLSRHGECGKKQVSYRTDIVGGVPIITPTQKEEVNECGESIDRNNLKRSQSHLPYFTPKPPQDSAVIKAGYCVKQGAVMKNWKRRYFQLDENTIGYFKSELEKEPLRVIPLKEVHKVQECKQSDIMMRDNLFEIVTTSRTFYVQADSPEEMHSWIKAVSGAIVAQRGPGRSASSMRQARRLSNPCIQRSIPPVLQNPNTLSVLPTQPPPPHIPQPLAATLWSQPLPWRSEDFTSLLPRSSQGTSRSRLSLQENQLPK

SEQ ID NO: 47348 - protein, 510 aa, Homo sapiens [sequence omitted]

SEQ ID NO: 47349 - protein, 455 aa, Homo sapiens
MNLLAVLEVRTEGNENWGGFLRFKKGKRCSLVFGLIIMTLVMASYILSGAHQELLISSPFHYGGFPSNPSLMDSENPSDTKEHHHQSSVNNISYMKDYPSIKLIINSITTRIEFTTRQLPDLEDLKKQELHMFSVIPNKFLPNSKSPCWYEEFSGQNTTDPYLTNSYVLYSKRFRSTFDALRKAFWGHLAHAHGKHFRLRCLPHFYIIGQPKCGTTDLYDRLRLHPEVKFSAIKEPHWWTRKRFGIVRLRDGLRDRYPVEDYLDLFDLAAHQIHQGLQASSAKEQSKMNTIIIGEASASTMWDNNAWTFFYDNSTDGEPPFLTQDFIHAFQPNARLIVMLRDPVERLYSDYLYFASSNKSADDFHEKVTEALQLFENCMLDYSLRACVYNNTLNNAMPVCTPPPRTPRAGPWQKELVCCYYASGIVGLRFSIGTERSVLMCKCCSPLFMDVKAEN

SEQ ID NO: 47350 - protein, 814 aa, Homo sapiens
MIPQGRQTQSRAASPGRYGREQPDTRYGAEVPAYPLSQVFSDISERPIDPAPARQVAPTCLVVDPSSAAAPEGSTGVAPGALNRGYGPARESIPSKMAYETYEADLSTFQGPGGKRTVLPEFLAFLRAEGLAEATLGALLQQGFDSPAVLATLEDADIKSVAPNLGQARVLSRLANSCRTEMQLRRQDRGGPLPRARSSSFSHRSELLHGDLASLGAAAPLQTASPRAGDPARRPSSAPSQHLLETAATYSAPGVGTHAPHFPSNSGYSSPTPCALTARLSPTYPLQAGVALTNPGPSNPLHPGPRTAYSTAYTVPMELLKRERNVAASPLPSPHGSPQVLRKPGAPLGPSTLPPASQSLHTPHSPYQKVARRTGAPIIVSTMLAPEPSIRPQIMNGPLHPRPLVALLDGRDCTVEMPILKDLATVAFCDAQSTQEIHEKVLNEAVGAMMYHTITLTREDLEKFKALRVIVRIGSGYDNVDIKAAGELGIAVCNIPSAAVEETADSTICHILNLYRRNTWLYQALREGTRVQSVEQIREVASGAARIRGETLGLIGFGRTGQAVAVRAKAFGFSVIFYDPYLQDGIERSLGVQRVYTLQDLLYQSDCVSLHCNLNEHNHHLINDFTIKQMRQGAFLVNAARGGLVDEKALAQALKEGRIRGAALDVHESEPFSFAQGPLKDAPNLICTPHTAWYSEQASLEMREAAATEIRRAITGRIPESLRNCVNKEFFVTSAPWSVIDQQAIHPELNGATYRYPPGIVGVAPGGLPAAMEGIIPGGIPVTHNLPTVAHPSQAPSPNQPTKHGDNREHPNEQ

SEQ ID NO: 47351 - protein, 872 aa, Homo sapiens [sequence omitted]

SEQ ID NO: 47352 - protein, 672 aa, Homo sapiens [sequence omitted]

SEQ ID NO: 47353 - protein, 162 aa, Homo sapiens
MTAILRQMEDYHYAHLIKTFGKMRTDVVDFLMETFIMFKNLIGKNVYPFDWVIMNMVQNKVFLRAINQYADMLNKKFLDQANFELQLWNNYFHLAVAFLTQESLQLENFSSAKRAKILNKSFEWTEAAPSIIVNKPLQSSMKAEILAGPSSSVTPVCIMHRS

SEQ ID NO: 47354 - protein, 601 aa, Homo sapiens
MLLSRSPSGPKKYFPIPVEHLEEEIRIRSADDCKQFREEFNSLPSGHIQGTFELANKEENREKNRYPNILPNDHSRVILSQLDGIPCSDYINASYIDGYKEKNKFIAAQGPKQETVNDFWRMVWEQKSATIVMLTNLKERKEEKCHQYWPDQGCWTYGNIRVCVEDCVVLVDYTIRKFCIQPQLPDGCKAPRLVSQLHFTSWPDFGVPFTPIGMLKFLKKVKTLNPVHAGPIVVHCSAGVGRTGTFIVIDAMMAMMHAEQKVDVFEFVSRIRNQRPQMVQTDMQYTFIYQALLEYYLYGDTELDVSSLEKHLQTMHGTTTHFDKIGLEEEFRKLTNVRIMKENMRTGNLPANMKKARVIQIIPYDFNRVILSMKRGQEYTDYINASFIDGYRQKDYFIATQGPLAHTVEDFWRMIWEWKSHTIVMLTEVQEREQDKCYQYWPTEGSVTHGEITIEIKNDTLSEAISIRDFLVTLNQPQARQEEQVRVVRQFHFHGWPEIGIPAEGKGMIDLIAAVQKQQQQTGNHPITVHCSAGAGRTGTFIALSNILERVKAEGLLDVFQAVKSLRLQRPHMVQTLEQYEFCYKVVQDFIDIFSDYANFK

SEQ ID NO: 47355 - protein, 363 aa, Homo sapiens
MNKQQCIERDEVRNVFRELEILQEIEHVFLVNLWYSFQDEEDMFMVVDLLLGGDLRYHLQQNVQFSEDTVRLYICEMALALDYLRGQHIIHRDVKPDNILLDERGHAHLTDFNIATIIKDGERATALAGTKPYMAPEIFHSFVNGGTGYSFEVDWWSVGVMAYELLRGWRPYDIHSSNAVESLVQLFSTVSVQYVPTWSKEMVALLRKLLTVNPEHRLSSLQDVQAAPALAGVLWDHLSEKRVEPGFVPNKGRLHCDPTFELEEMILESRPLHKKKKRLAKNKSRDNSRDSSQSENDYLQDCLDAIQQDFVIFNREKLKRSQDLPREPLPAPESRDAAEPVEDEAERSALPMCGPICPSAGSG

SEQ ID NO: 47356 - protein, 327 aa, Homo sapiens
MESALDQLKQFTTVVADTGDFHAIDEYKPQDATTNPSLILAAAQMPAYQELVEEAIAYGRKLGGSQEDQIKNAIDKLFVLFGAEILKKIPGRVSTEVDARLSFDKDAMVARARRLIELYKEAGISKDRILIKLSSTWEGIQAGKELEEQHGIHCNMTLLFSFAQAVACAEAGVTLISPFVGRILDWHVANTDKKSYEPLEDPGVKSVTKIYNYYKKFSYKTIVMGASFRNTGEIKALAGCDFLTISPKLLGELLQDNAKLVPVLSAKAAQASDLEKIHLDEKSFRWLHNEDQMAVEKLSDGIRKFAADAVKLERMLTERMFNAENGK

SEQ ID NO: 47357 - protein, 219 aa, Homo sapiens [sequence omitted]

SEQ ID NO: 47358 - protein, 355 aa, Homo sapiens [sequence omitted]

SEQ ID NO: 47359 - protein, 344 aa, Homo sapiens [sequence omitted]

SEQ ID NO: 47360 - protein, 525 aa, Homo sapiens
MLENYRNLFSVGLTVCKPGLITCLEQRKEPWNVKRQEAADGHPAMSSHFTQDLLPEQGIQDAFPKRILRGYGNCGLDNLYLRKDWESLDECKLQKDYNGLNQCSSTTHSKIFQYNKYVKIFDNFSNLHRRNISNTGEKPFKCQECGKSFQMLSFLTEHQKIHTGKKFQKCGECGKTFIQCSHFTEPENIDTGEKPYKCQECNNVIKTCSVLTKNRIYAGGEHYRCEEFGKVFNQCSHLTEHEHGTEEKPCKYEECSSVFISCSSLSNQQMILAGEKLSKCETWYKGFNHSPNPSKHQRNEIGGKPFKCEECDSIFKWFSDLTKHKRIHTGEKPYKCDECGKAYTQSSHLSEHRRIHTGEKPYQCEECGKVFRTCSSLSNHKRTHSEEKPYTCEECGNIFKQLSDLTKHKKTHTGEKPYKCDECGKNFTQSSNLIVHKRIHTGEKPYKCEECGRVFMWFSDITKHKKTHTGEKPYKCDECGKNFTQSSNLIVHKRIHTGEKPYKCEKCGKAFTQFSHLTVHESIHT

SEQ ID NO: 47361 - protein, 779 aa, Homo sapiens
MFDKITSRIQKLCYGLNMDFVDPAQITMKVIQGLYSGVTTVELDTLAAETAATLTTKHPDYAILAARIAVSNLHKETKKVFSDVMEDLYNYINPHNGKHSPMVAKSTLDIVLANKDRLNSAIIYDRDFSYNYFGFKTLERSYLLKINGKVAERPQHMLMRVSVGIHKEDIDAAIETYNLLSERWFTHASPTLFNAGTNRPQLSSCFLLSMKDDSIEGIYDTLKQCALISKSAGGIGVAVSCIRATGSYIAGTNGNSNGLVPMLRVYNNTARYVDQGGNKRPGAFAIYLEPWHLDIFEFLDLKKNTGKEEQRARDLFFALWIPDLFMKRVETNQDWSLMCPNECPGLDEVWGEEFEKLYASYEKQGRVRKVVKAQQLWYAIIESQTETGTPYMLYKDSCNRKSNQQNLGTIKCSNLCTEIVEYTSKDEVAVCNLASLALNMYVTSEHTYDFKKLAEVTKVVVRNLNKIIDINYYPVPEACLSNKRHRPIGIGVQGLADAFILMRYPFESAEAQLLNKQIFETIYYGALEASCDLAKEQGPYETYEGSPVSKGILQYDMWNVTPTDLWDWKVLKEKIAKYGIRNSLLIAPMPTASTAQILGNNESIEPYTSNIYTRRVLSGEFQIVNPHLLKDLTERGLWHEEMKNQIIACNGSIQSIPEIPDDLKQLYKTVWEISQKTVLKMAAERGAFIDQSQSLNIHIAEPNYGKLTSMHFYGWKQGLKTGMYYLRTRPAANPIQFTLNKEKLKDKEKVSKEEEEKERNTAAMVCSLENRDECLMCGS

SEQ ID NO: 47362 - protein, 87 aa, Homo sapiens
MLYKDSCNRKSNQQNLGTIKCSNLCTEIVEYTSKDEVAVCNLASLALNMYVTSEHTYDFKKLAEVTKVVVRNLNKIIDINYYPVPEV

SEQ ID NO: 47363 - protein, 814 aa, Homo sapiens
MTSPVLVDIREEVTCPICLELLTEPLSIDCGHSFCQACITPNGRESVIGQEGERSCPVCQTSYQPGNLRPNRHLANIVRRLREVVLGPGKQLKAVLCADHGEKLQLFCQEDGKVICWLCERSQEHRGHHTFLVEEVAQEYQEKFQESLKKLKNEEQEAEKLTAFIREKKTSWKNQMEPERCRIQTEFNQLRNILDRVEQRELKKLEQEEKKGLRIIEEAENDLVHQTQSLRELISDLERRCQGSTMELLQDVSDVTERSEFWTLRKPEALPTKLRSMFRAPDLKRMLRVCRELTDVQSYWAIQGSLTRRERRASGVRTRRSQGSSAMASKILLNVQEEVTCPICLELLTEPLSLDCGHSLCRACITVSNKEAVTSMGGKSSCPVCGISYSFEHLQANQHLANIVERLKEVKLSPDNGKKRDLCDHHGEKLLLFCKEDRKVICWLCERSQEHRGHHTVLTEEVFKECQEKLQAVLKRLKKEEEEAEKLEADIREEKTSWKYQVQTERQRIQTEFDQLRSILNNEEQRELQRLEEEEKKTLDKFAEAEDELVQQKQLVRELISDVECRSQWSTMELLQDMSGIMKWSEIWRLKKPKMVSKKLKTVFHAPDLSRMLQMFRELTAVRCYWVDVTLNSVNLNLNLVLSEDQRQVISVPIWPFQCYNYGVLGSQYFSSGKHYWEVDVSKKTAWILGVYCRTYSRHMKYVVRRCANRQNLYTKYRPLFGYWVIGLQNKCKYGVFEESLSSDPEVLTLSMAVPPCRVGVFLDYEAGIVSFFNVTSHGSLIYKFSKCCFSQPVYPYFNPWNCPAPMTLCPPSS

SEQ ID NO: 47364 - protein, 837 aa, Homo sapiens
MLVSEARQPLLRHGPVREALLTLLDACGRPVPSSPALDEGLVLLLSQLCVCVAQEPSLLEFFLQPPPEPGAAPRLLLFSRLVPFVHREGTLGQQARDALLLLMALSAGSPTVGRYIADHSYFCPVLATGLSALYSSLPRKIEVPGDDWHCLRREDWLGVPALALFMSSLEFCNAVIQVAHPLVQKQLVDYIHNGFLVPVMGPALHKTSVEEMIASTAYLELFLRSISEPALLRTFLRFLLLHRHDTHTILDTLVARIGSNSRLCMVSLSLFRTLLNLSCEDVLLQLVLRYLVPCNHVMLSQKPAVRDVDLYGRAADKFLSLIPRCCRHHAPSPPRPEHASWARGPGSPSVDSSSVTTVPRPSTPSRLALFLRQQSLGGSESPGPAPCSPGLSASPASSPGRRPTPAEEPGELEDNYLEYLREARRGVDRCVRACRTWSAPYDGERPSPEPSPFGSRTKKRSLLPEEDRNNVGEGEEEELGRRGRAGGAGEGPGHLPPPQLNGVPGSWPEGAKKVRLVPKEGAGELLEGISEGMAGLEGFGQELRELEVALSNGGTGSESPLEPPLPLEEEEAYESFTCPPEPPGPFLSSPLRTLNQLPSQPFTGPFMAVLFAKLENMLQNSVYVNFLLTGLVAQLACHPQPLLRSFLLNTNMVFQPSVKSLLQVLGSVKNKIENFAASQEDFPALLSKAKKYLIARGKLDWAEGPAAGPAPRRSDPLVKSRRPSLGELLLRHAHSPTRARQAAQLVLQPGRDGAGLGLSGGSPGASTPVLLTRGGAPERQGEALRVKNAVYCAVIFPEFLKELAAISQAHAVTSPFLLETSEEGSGPLISGCGPLNP

SEQ ID NO: 47365 - protein, 330 aa, Homo sapiens
MTADPRKGRMGLQACLLGLFALILSGKCSYSPEPDQRRTLPPGWVSLGRADPEEELSLTFALRQQNVERLSELVQAVSDPSSPQYGKYLTLENVADLVRPSPLTLHTVQKWLLAAGAQKCHSVITQDFLTCWLSIRQAELLLPGAEFHHYVGGPTETHVVRSPHPYQLPQALAPHVDFVGGLHRFPPTSSLRQRPEPQVTGTVGLHLGVTPSVIRKRYNLTSQDVGSGTSNNSQACAQFLEQYFHDSDLAQFMRLFGGNFAHQASVARVVGQQGRGRAGIEASLDVQYLMSAGANISTWVYSSPGTTKRTGQWGRGWEMGVDPCSLKGML

SEQ ID NO: 47366 - protein, 208 aa, Homo sapiens
MEFAKNMYELHKKVSPNELILGWYATGHDITEHSVLIHEYYSREAPNPIHLTVDTSLQNGRMSIKAYVSTLMGVPGRTMGVMFTPLTVKYAYYDTERIGVDLIMKTCFSPNRVIGLSSDLQQVGGASARIQDALSTVLQYAEDVLSGKVSADNTVGRFLMSLVNQVPKIVPDDFETMLNSNINDLLMVTYLANLTQSQIALNEKLVNL

SEQ ID NO: 47367 - protein, 122 aa, Homo sapiens
MAEFMDYTSSQCGKYYSSVPEEGGATHVYRYHRGESKLHMCLDIGNGQRKDRKKTSLGPGGSYQISEHAPEASQPAENISKDLYIEVYPGTYSVTVGSNDLTKKTHVVAVDSGQSVDLVFPV

SEQ ID NO: 47368 - protein, 356 aa, Homo sapiens
MKSRYTTEFHELEKIGSGEFGSVFKCVKRLDGCIYAIKRSKKPLAGSVDEQNALREVYAHAVLGQHSHVVRYFSAWAEDDHMLIQNEYCNGGSLADAISENYRIMSYFKEAELKDLLLQVGRGLRYIHSMSLVHMDIKPSNIFISRTSIPNAASEEGDEDDWASNKVMFKIGDLGHVTRISSPQVEEGDSRFLANEVLQENYTHLPKADIFALALTVVCAAGAEPLPRNGDQWHEIRQGRLPRIPQVLSQEFTELLKVMIHPDPERRPSAMALVKHSVLLSASRKSAEQLRIELNAEKFKNSLLQKELKKAQMAKAAAEERALFTDRMATRSTTQSNRTSRLIGKKMNRSVSLTIY

SEQ ID NO: 47369 - protein, 688 aa, Homo sapiens
MIRSQSLSLQMPPQQDWKGPPAASPAMSPTTPVVTGATSLPTPAPYAMPEFQRVTISGDYCAGITLEDYEQAAKSLAKALMIREKYARLAYHRFPRITSQYLGHPRADTAPPEEGLPDFHPPPLPQEDPYCLDDAPPNLDYLVHMQGGILFVYDNKKMLEHQEPHSLPYPDLETYTVDMSHILALITDGPTKTYCHRRLNFLESKFSLHEMLNEMSEFKELKSNPHRDFYNVRKVDTHIHAAACMNQKHLLRFIKHTYQTEPDRTVAEKRGRKITLRQVFDGLHMDPYDLTVDSLDVHAGRQTFHRFDKFNSKYNPVGASELRDLYLKTENYLGGEYFARMVKEVARELEESKYQYSEPRLSIYGRSPEEWPNLAYWFIQHKVYSPNMRWIIQVPRIYDIFRSKKLLPNFGKMLENIFLPLFKATINPQDHRELHLFLKYVTGFDSVDDESKHSDHMFSDKSPNPDVWTSEQNPPYSYYLYYMYANIMVLNNLRRERGLSTFLFRPHCGEAGSITHLVSAFLTADNISHGLLLKKSPVLQYLYYLAQIPIAMSPLSNNSLFLEYSKNPLREFLHKGLHVSLSTDDPMQFHYTKEALMEEYAIAAQVWKLSTCDLCEIARNSVLQSGLSHQEKQKFLGQNYYKEGPEGNDIRKTNVAQIRMAFRYETLCNELSFLSDAMKSEEITALTN

SEQ ID NO: 47370 - protein, 860 aa, Homo sapiens [sequence omitted]

SEQ ID NO: 47371 - protein, 661 aa, Homo sapiens
MGEDLECLCQIMRTVGPRLDHERAKSLMDQYFARMCSLMLSKELPARIRFLLQDTVELREHHWVPRKAFLDNGPKTINQIRQDAVKDLGVFIPAPMAQGMRSDFFLEGPFMPPRMKMDRDPLGGLADMFGQMPGSGIGTGPGVIQDRFSPTMGRHRSNQLFNGHGGHIMPPTQSQFGEMGGKFMKSQGLSQLYHNQSQGLLSQLQGQSKDMPPRFSKKGQLNADEISLRPAQSFLMNKNQVPKLQPQITMIPPSAQPPRTQTPPLGQTPQLGLKTNPPLIQEKPAKTSKKPPPSKEELLKLTETVVTEYLNSGNANEAVNGVREMRAPKHFLPEMLSKVIILSLDRSDEDKEKASSLISLLKQEGIATSDNFMQAFLNVLDQCPKLEVDIPLVKSYLAQFAARAIISELVSISELAQPLESGTHFPLFLLCLQQLAKLQDREWLTELFQQSKVNMQKMLPEIDQNKDRMLEILEGKGLSFLFPLLKLEKELLKQIKLDPSPQTIYKWIKDNISPKLHVDKGFVNILMTSFLQYISSEVNPPSDETDSSSAPSKEQLEQEKQLLLSFKPVMQKFLHDHVDLQVSALYALQVHCYNSNFPKGMLLRFFVHFYDMEIIEEEAFLAWKEDITQEFPGKGKALFQVNQWLTWLETAEEEESEEEAD

SEQ ID NO: 47372 - protein, 623 aa, Homo sapiens
MGEDLECLCQIMRTVGPRLDHERAKSLMDQYFARMCSLMLSKELPARIRFLLQDTVELREHHWVPRKAFLDNGPKTINQIRQDAVKDLGVFIPAPMAQGMRSDFFLEGPFMPPRMKMDRDPLGGLADMFGQMPGSGIGTGPGVIQDRFSPTMGRHRSNQLFNGHGGHIMPPTQSQFGEMGGKFMKSQISLRPAQSFLMNKNQVPKLQPQITMIPPSAQPPRTQTPPLGQTPQLGLKTNPPLIQEKPAKTSKKPPPSKEELLKLTETVVTEYLNSGNANEAVNGVREMRAPKHFLPEMLSKVIILSLDRSDEDKEKASSLISLLKQEGIATSDNFMQAFLNVLDQCPKLEVDIPLVKSYLAQFAARAIISELVSISELAQPLESGTHFPLFLLCLQQLAKLQDREWLTELFQQSKVNMQKMLPEIDQNKDRMLEILEGKGLSFLFPLLKLEKELLKQIKLDPSPQTIYKWIKDNISPKLHVDKGFVNILMTSFLQYISSEVNPPSDETDSSSAPSKEQLEQEKQLLLSFKPVMQKFLHDHVDLQVSALYALQVHCYNSNFPKGMLLRFFVHFYDMEIIEEEAFLAWKEDITQEFPGKGKALFQVNQWLTWLETAEEEESEEEAD

SEQ ID NO: 47373 - protein, 522 aa, Homo sapiens [sequence omitted]

SEQ ID NO: 47374 - protein, 159 aa, Homo sapiens [sequence omitted]

SEQ ID NO: 47375 - protein, 341 aa, Homo sapiens
MIAKFQEELPMYSLSSSDEARQVDLLAYIAKITEGVSDTNSKSWANHENKTVNKITVVGGGELGIACTLAISAKGIADRLVLLDLSEGTKGATMDLEIFNLPNVEISKDLSASAHSKVVIFTVNSLGSSQSYLDVVQSNVDMFRALVPALGHYSQHSVLLVASQPVEIMTYVTWKLSTFPANRVIGIGCNLDSQRLQYIITNVLKAQTSGKEVWVIGEQGEDKVLTWSGQEEVVSHTSQVQLSNRAMELLRVKGQRSWSVGLSVADMVDSIVNNKKKVHSVSALAKGYYDINSEVFLSLPCILGTNGVSEVIKTTLKEDTVTEKLQSSASSIHSLQQQLKL

SEQ ID NO: 47376 - protein, 249 aa, Homo sapiens
MIAKFQEELPMYSLSSSDEARQVDLLAYIAKITEGVSDTNSKSWANHENKTVNKITVVGGGELGIACTLAISAKGIADRLVLLDLSEGTKGATMDLEIFNLPNVEISKDLSASAHSKVVIFTVNSLGSSQSYLDVVQSNVDMFRALVPALGHYSQHSVLLVASQPVEIMTYVTWKLSTFPANRVIGIGCNLDSQRLQYIITNVLKAQTSGKEVWVIGEQGEDKVLTWSGQEEVVSHTSQVQLSNRDIMI

SEQ ID NO: 47377 - protein, 230 aa, Homo sapiens
MLRFNGYRENPNLQEDSLMKTQAELLLERLQEVGKAEAERPARFLSSLWERLPQNNFLKVIAVALLQPPLSRRPQEELEPGIHKSPGEGSQVLVHWLLGNSEVFAAFCRALPAGLLTLVTSRHPALSPVYLGLLTDWGQRLHYDLQKGIWVGTESQDVPWEELHNRFQSLCQAPPPLKDKVLTALETCKAQDGDFEVPGLSIWTDLLLALRSGAFRKRQVLGLSAGLSSV

SEQ ID NO: 47378 - protein, 887 aa, Homo sapiens
MKVVVRVRPENTKEKAAGFHKVVHVVDKHILVFDPKQEEVSFFHGKKTTNQNVIKKQNKDLKFVFDAVFDETSTQSEVFEHTTKPILRSFLNGYNCTVLAYGATGAGKTHTMLGSADEPGVMYLTMLHLYKCMDEIKEEKICSTAVSYLEVYNEQIRDLLVNSGPLAVREDTQKGVVVHGLTLHQPKSSEEILHLLDNGNKNRTQHPTDMNATSSRSHAVFQIYLRQQDKTASINQNVRIAKMSLIDLAGSERASTSGAKGTRFVEGTNINRSLLALGNVINALADSKRKNQHIPYRNSKLTRLLKDSLGGNCQTIMIAAVSPSSVFYDDTYNTLKYANRAKDIKSSLKSNVLNVNNHITQYVKICNEQKAEILLLKEKLKAYEEQKAFTNENDQAKLMISNPQEKEIERFQEILNCLFQNREEIRQEYLKLEMLLKENELKSFYQQQCHKQIEMMCSEDKVEKATGKRDHRLAMLKTRRSYLEKRREEELKQFDENTNWLHRVEKEMGLLSQNGHIPKELKKDLHCHHLHLQNKDLKAQIRHMMDLACLQEQQHRQTEAVLNALLPTLRKQYCTLKEAGLSNAAFESDFKEIEHLVERKKVVVWADQTAEQPKQNDLPGISVLMTFPQLGPVQPIPCCSSSGGTNLVKIPTEKRTRRKLMPSPLKGQHTLKSPPSQSVQLNDSLSKELQPIVYTPEDCRKAFQNPSTVTLMKPSSFTTSFQAISSNINSDNCLKMLCEVAIPHNRRKECGQEDLDSTFTICEDIKSSKCKLPEQESLPNDNKDILQRLDPSSFSTKHSMPVPSMVPSYMAMTTAAKRKRKLTSSTSNSSLTADVNSGFAKRVRQDNSSEKHLQENKPTMEHKRNICKINPSMVRKFGRNISKGNLR

SEQ ID NO: 47379 - protein, 1054 aa, Homo sapiens
MQIVDELSILPAMLQTNMGNPVTVVTATTGSKQNCTTGEGDYQLVQHEVLCSMKNTYEVLDFLGRGTFGQVVKCWKRGTNEIVAIKILKNHPSYARQGQIEVSILARLSTENADEYNFVRAYECFQHRNHTCLVFEMLEQNLYDFLKQNKFSPLPLKVIRPILQQVATALKKLKSLGLIHADLKPENIMLVDPVRQPYRVKVIDFGSASHVSKTVCSTYLQSRYYRAPEIILGLPFCEAIDMWSLGCVIAELFLGWPLYPGALEYDQIRYISQTQGLPGEQLLNVGTKSTRFFCKETDMSHSGWRLKTLEEHEAETGMKSKEARKYIFNSLDDVAHVNTVMDLEGSDLLAEKADRREFVSLLKKMLLIDADLRITPAETLNHPFVNMKHLLDFPHSNHVKSCFHIMDICKSHLNSCDTNNHNKTSLLRPVASSSTATLTANFTKIGTLRSQALTTSAHSVVHHGIPLQAGTAQFGCGDAFQQTLIICPPAIQGIPATHGKPTSYSIRVDNTVPLVTQAPAVQPLQIRPGVLSQTWSGRTQQMLVPAWQQVTPLAPATTTLTSESVAGSHRLGDWGKMISCSNHYNSVMPQPLLTNQITLSAPQPVSVGIAHVVWPQPATTKKNKQCQNRSNSLQNTNIPHSAFISPKIINGKDVEEVSCIETQDNQNSEGEARNCCETSIRQDSDSSVSDKQRQTIIIADSPSPAVSVITISSDTDEEETSQRHSLRECKGSLDCEACQSTLNIDRMCSLSSPDSTLSTSSSGQSSPSPCKRPNSMSDEEQESSCDTVDGSPTSDSSGHDSPFAESTFVEDTHENTELVSSADTETKPAVCSVVVPPVELENGLNADEHMANTDSICQPLIKGRSAPGRLNQPSAVGTRQQKLTSAFQQQHLNFSQVQHFGSGHQEWNGNFGHRRQQAYIPTSVTSNPFTLSHGSPNHTAVHAHLAGNTHLGGQPTLLPYPSSATLSSAAPVAHLLASPCTSRPMLQHPTYNISHPSGIVHQVPVGLNPRLLPSPTIHQTQYKPIFPPHSYIAASPAYTGFPLSPTKLSQYPYM

SEQ ID NO: 47380 - protein, 186 aa, Homo sapiens
MEKALSIGFETCRYGFIEGHVVIPRIHPNSICAANNTGVYILTSNTSQYDTYCFNASAPPEEDCTSVTDLPNAFDGPITITIVNRDGTRYVQKGEYRTNPEDIYPSNPTDDDVSSGSSSERSSTSGGYIFYTFSTVHPIPDEDSPWITDSTDRIPATSKENKSLCFPIAIPWQNVSDLPEHCTLTC

SEQ ID NO: 47381 - protein, 111 aa, Homo sapiens [sequence omitted]

SEQ ID NO: 47382 - protein, 238 aa, Homo sapiens
MKVVLISRSKDKLDQVSSEIKEKFKVETRTIAVDFASEDIYDKIKTGLAGLEIGILVNNVGMSYEYPEYFLDVPDLDNVIKKMININILSVCKMTQLVLPGMVERSKGAILNISSGSGMLPVPLLTIYSATKTFVDFFSQCLHEEYRSKGVFVQSVLPYFVATKLAKIRKPTLDKPSPETFVKSAIKTVGLQSRTNGYLIHALMGSIISNLPSWIYLKIVMNMNKSTRAHYLKKTKKN

SEQ ID NO: 47383 - protein, 24 aa, Homo sapiens
MKVVLISRSKDKLDQVSSEISNYT

SEQ ID NO: 47384 - protein, 481 aa, Homo sapiens
MQDLGSSHGEDLEGECSRKLDQKLPELRGVGDPAMISSDTSYLSSRGRMIKWFWDSAEEGYRTYHMDEYDEDKNPSGIINLGTSENKLCFDLLSWRLSQRDMQRVEPSLLQYADWRGHLFLREEVAKFLSFYCKSPVPLRPENVVVLNGGASLFSALATVLCEAGEAFLIPTPYYGAITQHVCLYGNIRLAYVYLDSEVTGLDTRPFQLTVEKLEMALREAHSEGVKVKGLILISPQNPLGDVYSPEELQEYLVFAKRHRLHVIVDEVYMLSVFEKSVGYRSVLSLERLPDPQRTHVMWATSKDFGMSGLRFGTLYTENQDVATAVASLCRYHGLSGLVQYQMAQLLRDRDWINQVYLPENHARLKAAHTYVSEELRALGIPFLSRGAGFFIWVDLRKYLPKGTFEEEMLLWRRFLDNKVLLSFGKAFECKEPGWFRFVFSDQVHRLCLGMQRVQQVLAGKSQVAEDPRPSQSQEPSDQRR

SEQ ID NO: 47385 - protein, 400 aa, Homo sapiens
MESCRAEIQENHDETYGVPSLEELGFPTEGLGPAVWQGGETEALARLDKHLERKAWVANYERPRMNANSLLASPTGLSPYLRFGCLSCRLFYYRLWDLYKKVKRNSTPPLSLFGQLLWREFFYTAATNNPRFDRMEGNPICIQIPWDRNPEALAKWAEGKTGFPWIDAIMTQLRQEGWIHHLARHAVACFLTRGDLWVSWESGVRVFDELLLDADFSVNAGSWMWLSCSAFFQQFFHCYCPVGFGRRTDPSGDYIRRYLPKLKAFPSRYIYEPWNAPESIQKAAKCIIGVDYPRPIVNHAETSRLNIERMKQIYQQLSRYRGLCLLASVPSCVEDLSHPVAEPSSSQAGSMSSAGPRPLPSGPASPKRKLEAAEEPPGEELSKRARVAELPTPELPSKDA

SEQ ID NO: 47386 - protein, 1119 aa, Homo sapiens
MERVRLVRFDPLGHYLLTAIVNPSNQQGDDEPEIPIDGTELSHYRQRALLQSQPVRRTPLLHNFLHMLSSRSSGIQVGEQSTVQDSATPSPPPPPPQPSTERPRTSAYIRLRQRVSYPTAECCQHLGILCLCSRCSGTRVPSLLPHQDSVPPASARATTPSFSFVQTEPFHPPEQASSTQQDQGLLNRPSAFSTVQSSTAGNTLRNLSLGPTRRSLGGPLSSHPSRYHREIAPGLTGSEWTRTVLSLNSRSEAESMPPPRTSASSVSLLSVLRQQEGGSQASVYTSATEGRGFPASGLATESDGGNGSSQNNSGSIRHELQCDLRRFFLEYDRLQELDQSLSGEAPQTQQAQEMLNNNIESERPGPSHQPTPHSSENNSNLSRGHLNRCRACHNLLTFNNDTLRWERTTPNYSSGEASSSWQVPSSFESVPSSGSQLPPLERTEGQTPSSSRLELSSSASPQEERTVGVAFNQETGHWERIYTQSSRSGTVSQEALHQDMPEESSEEDSLRRRLLESSLISLSRYDGAGSREHPIYPDPARLSPAAYYAQRMIQYLSRRDSIRQRSMRYQQNRLRSSTSSSSSDNQGPSVEGTDLEFEDFEDNGDRSRHRAPRNARMSAPSLGRFVPRRFLLPEYLPYAGIFHERGQPGLATHSSVNRVLAGAVIGDGQSAVASNIANTTYRLQWWDFTKFDLPEISNASVNVLVQNCKIYNDASCDISADGQLLAAFIPSSQRGFPDEGILAVYSLAPHNLGEMLYTKRFGPNAISVSLSPMGRYVMVGLASRRILLHPSTEHMVAQVFRLQQAHGGETSMRRVFNVLYPMPADQRRHVSINSARWLPEPGLGLAYGTNKGDLVICRPEALNSGVEYYWDQLNETVFTVHSNSRSSERPGTSRATWRTDRDMGLMNAIGLQPRNPATSVTSQGTQTLALQLQNAETQTEREVPEPGTAASGPGEGEGSEYGASGEDALSRIQRLMAEGGMTAVVQREQSTTMASMGGFGNNIIVSHRIHRSSQTGTEPGAAHTSSPQPSTSRGLLPEAGQLAERGLSPRTASWDQPGTPGREPTQPTLPSSSPVPIPVSLPSAEGPTLHCELTNNNHLLDGGSSRGDAAGPRGEPRNR

SEQ ID NO: 47387 - protein, 1090 aa, Homo sapiens
MERVRLVRFDPLGHYLLTAIVNPSNQQGDDEPEIPIDGTELSHYRQRALLQSQPVRRTPLLHNFLHMLSSRSSGIQVGEQSTVQDSATPSPPPPPPQPSTERPRTSAYIRLRQRVSYPTAECCQHLGILCLCSRCSGTRVPSLLPHQDSVPPASARATTPSFSFVQTEPFHPPEQASSTQQDQGLLNRPSAFSTVQSSTAGNTLRNLSLGPTRRSLGGPLSSHPSRYHREIAPGLTGSEWTRTVLSLNSRSEAESMPPPRTSASSVSLLSVLRQQEGGSQASVYTSATEGRGFPASGLATESDGGNGSSQNNSGSIRHELQCDLRRFFLEYDRLQELDQSLSGEAPQTQQAQEMLNNNIESERPGPSHQPTPHSSENNSNLSRGHLNRCRACHNLLTFNNDTLRWERTTPNYSSGEASSSWQVPSSFESVPSSGSQLPPLERTEGQTPSSSRLELSSSASPQEERTVGVAFNQETGHWERIYTQSSRSGTVSQEALHQDMPEESSEEDSLRRLSPAAYYAQRMIQYLSRRDSIRQRSMRYQQNRLRSSTSSSSSDNQGPSVEGTDLEFEDFEDNGDRSRHRAPRNARMSAPSLGRFVPRRFLLPEYLPYAGIFHERGQPGLATHSSVNRVLAGAVIGDGQSAVASNIANTTYRLQWWDFTKFDLPEISNASVNVLVQNCKIYNDASCDISADGQLLAAFIPSSQRGFPDEGILAVYSLAPHNLGEMLYTKRFGPNAISVSLSPMGRYVMVGLASRRILLHPSTEHMVAQVFRLQQAHGGETSMRRVFNVLYPMPADQRRHVSINSARWLPEPGLGLAYGTNKGDLVICRPEALNSGVEYYWDQLNETVFTVHSNSRSSERPGTSRATWRTDRDMGLMNAIGLQPRNPATSVTSQGTQTLALQLQNAETQTEREVPEPGTAASGPGEGEGSEYGASGEDALSRIQRLMAEGGMTAVVQREQSTTMASMGGFGNNIIVSHRIHRSSQTGTEPGAAHTSSPQPSTSRGLLPEAGQLAERGLSPRTASWDQPGTPGREPTQPTLPSSSPVPIPVSLPSAEGPTLHCELTNNNHLLDGGSSRGDAAGPRGEPRNR

SEQ ID NO: 47388 - protein, 450 aa, Homo sapiens
MPPELQSNSATQQDPDGSGASFSSSARGTQPHGYLAKKLHSPSDQCPPRAKTPEPGAQQSGFPTLSRSPPGPAGSSPKQGRRYRCGECGKAFLQLCHLKKHAFVHTGHKPFLCTECGKSYSSEESFKAHMLGHRGVRPFPCPQCDKAYGTQRDLKEHQVVHSGARPFACDQCGKAFARRPSLRLHRKTHQVPAAPAPCPCPVCGRPLANQGSLRNHMRLHTGEKPFLCPHCGRAFRQRGNLRGHLRLHTGERPYRCPHCADAFPQLPELRRHLISHTGEAHLCPVCGKALRDPHTLRAHERLHSGERPFPCPQCGRAYTLATKLRRHLKSHLEDKPYRCPTCGMGYTLPQSLRRHQLSHRPEAPCSPPSVPSAASEPTVVLLQAEPQLLDTHREEEVSPARDVVEVTISESQEKCFVVPEEPDAAPSLVLIHKDMGLGAWAEVVEVEMGT

SEQ ID NO: 47389 - protein, 1918 aa, Homo sapiens
MYIEIEKGEAVQEELLKGLDNKNPKIIVACIETLRKALSEFGSKIILLKPIIKVLPKLFESREKAVRDEAKLIAVEIYRWIRDALRPPLQNINSVQLKELEEEWVKLPTSAPRPTRFLRSQQELEAKLEQQQSAGGDAEGGGDDGDEVPQIDAYELLEAVEILSKLPKDFYDKIEAKKWQERKEALESVEVLIKNPKLEAGDYADLVKALKKVVGKDTNVMLVALAAKCLTGLAVGLRKKFGQYAGHVVPTILEKFKEKKPQVVQALQEAIDAIFLTTTLQNISEDVLAVMDNKNPTIKQQTSLFIARSFRHCTASTLPKSLLKPFCAALLKHINDSAPEVRDAAFEALGTALKVVGEKAVNPFLADVDKLKLDKIKECSEKVELIHGKKAGLAADKKEFKPLPGRTAASGAAGDKDTKDISAPKPGPLKKAPAAKAGGPPKKGKPAAPGGAGNTGTKNKKGLETKEIVEPELSIEVCEEKASAVLPPTCIQLLDSSNWKERLACMEEFQKAVELMDRTEMPCQALVRMLAKKPGWKETNFQVMQMKLHIVALIAQKGNFSKTSAQVVLDGLVDKIGDVKCGNNAKEAMTAIAEACMLPWTAEQVVSMAFSQKNPKNQSETLNWLSNAIKEFGFSGLNVKAFISNVKTALAATNPAVRTAAITLLGVMYLYVGPSLRMFFEDEKPALLSQIDAEFEKMQGQSPPAPTRGISKHSTSGTDEGEDGDEPDDGSNDVVDLLPRTEISDKITSELVSKIGDKNWKIRKEGLDEVAGIINDAKFIQPNIGELPTALKGRLNDSNKILVQQTLNILQQLAVAMGPNIKQHVKNLGIPIITVLGDSKNNVRAAALATVNAWAEQTGMKEWLEGEDLSEELKKENPFLRQELLGWLAEKLPTLRSTPTDLILCVPHLYSCLEDRNGDVRKKAQDALPFFMMHLGYEKMAKATGKLKPTSKDQVLAMLEKAKVNMPAKPAPPTKATSKPMGGSAPAKFQPASAPAEDCISSSTEPKPDPKKAKAPGLSSKAKSAQGKKMPSKTSLKEDEDKSGPIFIVVPNGKEQRMKDEKGLKVLKWNFTTPRDEYIEQLKTQMSSCVAKWLQDEMFHSDFQHHNKALAVMVDHLESEKEGVIGCLDLILKWLTLRFFDTNTSVLMKALEYLKLLFTLLSEEEYHLTENEASSFIPYLVVKVGEPKDVIRKDVRAILNRMCLVYPASKMFPFIMEGTKSKNSKQRAECLEELGCLVESYGMNVCQPTPGKALKEIAVHIGDRDNAVRNAALNTIVTVYNVHGDQVFKLIGNLSEKDMSMLEERIKRSAKRPSAAPIKQVEEKPQRAQNISSNANMLRKGPAEDMSSKLNQARSMSGHPEAAQMVRREFQLDLDEIENDNGTVRCEMPELVQHKLDDIFEPVLIPEPKIRAVSPHFDDMHSNTASTINFIISQVASGDINTSIQALTQIDEVLRQEDKAEAMSGHIDQFLIATFMQLRLIYNTHMADEKLEKDEIIKLYSCIIGNMISLFQIESLAREASTGVLKDLMHGLITLMLDSRIEDLEEGQQVIRSVNLLVVKVLEKSDQTNILSALLVLLQDSLLATASSPKFSELVMKCLWRMVRLLPDTINSINLDRILLDIHIFMKVFPKEKLKQCKSEFPIRTLKTLLHTLCKLKGPKILDHLTMIDNKNESELEAHLCRMMKHSMDQTGSKSDKETEKGASRIDEKSSKAKVNDFLAEIFKKIGSKENTKEGLAELYEYKKKYSDADIEPFLKNSSQFFQSYVERGLRVIEMEREGKGRISTSTGISPQMEVTCVPTPTSTVSSIGNTNGEEVGPSVYLERLKILRQRCGLDNTKQDDRPPLTSLLSKPAVPTVASSTDMLHSKLSQLRESREQHQHSDLDSNQTHSSGTVTSSSSTANIDDLKKRLERIKSSRK

SEQ ID NO: 47390 - protein, 51 aa, Homo sapiens
MKEYHCLLQLLCPDFPLELTQKAARYVSWTLETNSALCGPLLPRETWSVYK

SEQ ID NO: 47391 - protein, 245 aa, Homo sapiens
MVGLSGVFPLLVIPLEMGTMLRSEAGAWRLKQLLSFALGGLLGNVFLHLLPEAWAYTCSASPGGEGQSLQQQQQLGLWVIAGILTFLALEKMFLDSKEEGTSQAPNKDPTAAAAALNGGHCLAQPAAEPGLGAVVRSIKVSGYLNLLANTIDNFTHGLAVAASFLVSKKVRGLGPVGLWRFQWQPCGFHLCLESLLLAPPLPAPSSKALIPHPPCCCPGRHCSLILSPWSVPVPSTPCWVPLSSC

SEQ ID NO: 47392 - protein, 385 aa, Homo sapiens
MKSEVLRVTHELQAMKDKIKENSEKIKVNKTLPYLVSNVIELLDVDPNDQEEDGANIDLDSQRKGKCAVIKTSTRQTYFLPVIGLVDAEKLKPGDLVGVNKDSYLILETLPTEYDSRVKAMEVDERPTEQYSDIGGLDKQIQELVEAIVLPMNHKEKFENLGIQPPKGVLMYGPPGTGKTLLARACAAQTKATFLKLAGPQLVQMFIGDGAKLVRDAFALAKEKAPSIIFIDELDAIGTKRFDSEKAGDREVQRTMLELLNQLDGFQPNTQVKVIAATNRVDILDPALLRSGRLDRKIEFPMPNEEARARIMQIHSRKMNVSPDVNYEELARCTDDFNGAQCKAVCVEAGMIALRRGATELTHEDYMEGILEVQAKKKANLQYYA

SEQ ID NO: 47393 - protein, 100 aa, Homo sapiens [sequence omitted]

SEQ ID NO: 47394 - protein, 508 aa, Homo sapiens [sequence omitted]

SEQ ID NO: 47395 - protein, 1254 aa, Homo sapiens
MQSIFTDIGKVDFTDPCNYQLIPAVPGISPNSTASTAWLSSDGEALFALPCASGGIFVLKLPPYDIPGMVSVVELKQSSVMQRLLTGWMPTAIRGDQSPSDRPLSLAVHCVEHDAFIFALCQDHKLRMWSYKEQMCLMVADMLEYVPVKKDLRLTAGTGHKLRLAYSPTMGLYLGIYMHAPKRGQFCIFQLVSTESNRYSLDHISSLFTSQETLIDFALTSTDIWALWHDAENQTVVKYINFEHNVAGQWNPVFMQPLPEEEIVIRDDQDPREMYLQSLFTPGQFTNEALCKALQIFCRGTERNLDLSWSELKKEVTLAVENELQGSVTEYEFSQEEFRNLQQEFWCKFYACCLQYQEALSHPLALHLNPHTNMVCLLKKGYLSFLIPSSLVDHLYLLPYENLLTEDETTISDDVDIARDVICLIKCLRLIEESVTVDMSVIMEMSCYNLQSPEKAAEQILEDMITIDVENVMEDICSKLQEIRNPIHAIGLLIREMDYETEVEMEKGFNPAQPLNIRMNLTQLYGSNTAGYIVCRGVHKIASTRFLICRDLLILQQLLMRLGDAVIWGTGQLFQAQQDLLHRTAPLLLSYYLIKWGSECLATDVPLDTLESNLQHLSVLELTDSGALMANRFVSSPQTIVELFFQEVARKHIISHLFSQPKAPLSQTGLNWPEMITAITSYLLQLLWPSNPGCLFLECLMGNCQYVQLQDYIQLLHPWCQVNVGSCRFMLGRCYLVTGEGQKALECFCQAASEVGKEEFLDRLIRSEDGEIVSTPRLQYYDKVLRLLDVIGLPELVIQLATSAITEAGDDWKSQATLRTCIFKHHLDLGHNSQAYEALTQIPDSSRQLDCLRQLVVVLCERSQLQDLVEFPYVNLHNEVVGIIESRARAVDLMTHNYYELLYAFHIYRHNYRKAGTVMFEYGMRLGREVRTLRGLEKQGNCYLAALNCLRLIRPEYAWIVQPVSGAVYDRPGASPKRNHDGECTAAPTNRQIEILELEDLEKECSLARIRLTLAQHDPSAVAVAGSSSAEEMVTLLVQAGLFDTAISLCQTFKLPLTPVFEGLAFKCIKLQFGGEAAQAEAWAWLAANQLSSVITTKESSATDEAWRLLSTYLERYKVQNNLYHHCVINKLLSHGVPLPNWLINSYKKVDAAELLRLYLNYDLLEEAVDLVSEYVDAVLGKGHQYFGIEFPLSATAPMVWLPYSSIDQLLQALGENSANSHNIALSQKILDKLEDYQQKVDKATRDLLYRRTL

SEQ ID NO: 47396 - protein, 261 aa, Homo sapiens
MKITNGRHGDSAGAEGTMENFTALFGAQADPPPPPTALGFGPGKPPPPPPPPAGGGPGTAPPPTAATAPPGADKSGAGCGPFYLMRELPGSTELTGSTNLITHYNLEQAYNKFCGKKVKEKLSNFLPDLPGMIDLPGSHDNSSLRSLIEKPPILSSSFNPITGTMLAGFRLHTGPLPEQCRLMHIQPPKKKNKHKHKQSRTQDPVPPETPSDSDHKKKKKKKEEDPERKRKKKEKKKKKNRHSPDHPGMGSSQASSSSSLR

SEQ ID NO: 47397 - protein, 909 aa, Homo sapiens
MDDSEVESTASILASVKEQEAQFEKLTRALEEERRHVSAQLERVRVSPQDANPLMANGTLTRRHQDHSHLLYSTIPRMQEPGQIVETYTEEDPEGAMSVVSVETSDDGTTRRTETTVKKVVKTVTTRTVQPVAMGPDGLPVDASSVSNNYIQTLGRDFRKNGNGGPGPYVGQAGTATLPRNFHYPPDGYSRHYEDGYPGGSDNYGSLSRVTRIEERYRPSMEGYRAPSRQDVYGPQPQVRVGGSSVDLHRFHPEPYGLEDDQRSMGYDDLDYGMMSDYGTARRTGTPSDPRRRLRSYEDMIGEEVPSDQYYWAPLAQHERGSLASLDSLRKGGPPPPNWRQPELPEVIAMLGFRLDAVKSNAAAYLQHLCYRNDKVKTDVRKLKGIPVLVGLLDHPKKEVHLGACGALKNISFGRDQDNKIAIKNCDGVPALVRLLRKARDMDLTEVITGTLWNLSSHDSIKMEIVDHALHALTDEVIIPHSGWEREPNEDCKPRHIEWESVLTNTAGCLRNVSSERSEARRKLRECDGLVDALIFIVQAEIGQKDSDSKLVENCVCLLRNLSYQVHREIPQAERYQEAAPNVANNTGPHAASCFGAKKGKGKKPIEDPANDTVDFPKRTSPARGYELLFQPEVVRIYISLLKESKTPAILEASAGAIQNLCAGRWTYGRYIRSALRQEKALSAIADLLTNEHERVVKAASGALRNLAVDARNKELIGKHAIPNLVKNLPGGQQNSSWNFSEDTVISILNTINEVIAENLEAAKKLRETQGIEKLVLINKSGNRSEKEVRAAALVLQTIWGYKELRKPLEKEGWKKSDFQVNLNNASRSQSSHSYDDSTLPLIDRNQKSDKKPDREEIQMSNMGSNTKSLDNNYSTPNERGDHNRTLDRSGDLGDMEPLKGTTPLMQKI

SEQ ID NO: 47398 - protein, 867 aa, Homo sapiens
MELVKAALAEALRLLRLQVPPSSLQGSGTPAPPGDSLAAPPGLPPTCTPSLVSRGTQTETEVELKSSPGPPGLSNGPPAPQGASEEPSGTQSEGGGSSSSGAGSPGPPGILRPLQPPQRADTPRRNSSSSSSPSERPRQKLSRKAISSANLLVRSGSTESRGGKDPLSSPGGPGSRRSNYNLEGISVKMFLRGRPITMYIPSGIRSLEELPSGPPPETLSLDWVYGYRGRDSRSNLFVLRSGEVVYFIACVVVLYRPGGGPGGPGGGGQRHYRGHTDCVRCLAVHPDGVRVASGQTAGVDKDGKPLQPVVHIWDSETLLKLQEIGLGAFERGVGALAFSAADQGAFLCVVDDSNEHMLSVWDCSRGMKLAEIKSTNDSVLAVGFNPRDSSCIVTSGKSHVHFWNWSGGVGVPGNGTLTRKQGVFGKYKKPKFIPCFVFLPDGDILTGDSEGNILTWGRSPSDSKTPGRGGAKETYGIVAQAHAHEGSIFALCLRRDGTVLSGGGRDRRLVQWGPGLVALQEAEIPEHFGAVRAIAEGLGSELLVGTTKNALLRGDLAQGFSPVIQGHTDELWGLCTHPSQNRFLTCGHDRQLCLWDGESHALAWSIDLKETGLCADFHPSGAVVAVGLNTGRWLVLDTETREIVSDVIDGNEQLSVVRYSPDGLYLAIGSHDNVIYIYSVSSDGAKSSRFGRCMGHSSFITHLDWSKDGNFIMSNSGDYEILYWDVAGGCKQLKNRYESRDREWATYTCVLGFHVYGVWPDGSDGTDINSLCRSHNERVVAVADDFCKVHLFQYPCARAKAPSRMYGGHGSHVTSVRFTHDDSHLVSLGGKDASIFQWRVLGAGGAGPAPATPSRTPSLSPASSLDV

SEQ ID NO: 47399 - protein, 251 aa, Homo sapiens [sequence omitted]

SEQ ID NO: 47400 - protein, 42 aa, Homo sapiens
MAPSTIPICRQSATSALCISTTGPTVIPPPPHSAPSLLPMSR

SEQ ID NO: 47401 - protein, 628 aa, Homo sapiens
MEAAAEPDASEKPAEATAGSGGVNGGEEQGLGKREEDEPEERSGDETPGSEVPGDKAAEEQGDDQDSEKSKPAGSDGERRGVKRQRDEKDEHGRAYYEFREEAYHSRSKSPLPPEEEAKDEEEDQTLVNLDTYTSDLHFQVSKDRYGGQPLFSEKFPTLWSGARSTYGVTKGKVCFEAKVTQNLPMKEGCTEVSLLRVGWSVDFSRPQLGEDEFSYGFDGRGLKAENGQFEEFGQTFGENDVIGCFANFETEEVELSFSKNGEDLGVAFWISKDSLADRALLPHVLCKNCVVELNFGQKEEPFFPPPEEFVFIHAVPVEERVRTAVPPKTIEECEVILMVGLPGSGKTQWALKYAKENPEKRYNVLGAETVLNQMRMKGLEEPEMDPKSRDLLVQQASQCLSKLVQIASRTKRNFILDQCNVYNSGQRRKLLLFKTFSRKVVVVVPNEEDWKKRLELRKEVEGDDVPESIMLEMKANFSLPEKCDYMDEVTYGELEKEEAQPIVTKYKEEARKLLPPSEKRTNRRNNRNKRNRQNRSRGQGYVGGQRRGYDNRAYGQQYWGQPGNRGGYRNFYDRYRGDYDRFYGRDYEYNRYRDYYRQYNRDGPSIFHIQENVMRHRYQRLDRHFTF

SEQ ID NO: 47402 - protein, 629 aa, Homo sapiens
MEAAAEPDASEKPAEATAGSGGVNGGEEQGLGKREEDEPEERSGDETPGSEVPGDKAAEEQGDDQDSEKSKPAGSDGERRGVKRQRDEKDEHGRAYYEFREEAYHSRSKSPLPPEEEAKDEEEDQTLVNLDTYTSDLHFQVSKDRYGGQPLFSEKFPTLWSGARSTYGVTKGKVCFEAKVTQNLPMKEGCTEVSLLRVGWSVDFSRPQLGEDEFSYGFDGRGLKAENGQFEEFGQTFGENDVIGCFANFETEEVELSFSKNGEDLGVAFWISKDSLADRALLPHVLCKNCVVELNFGQKEEPFFPPPEEFVFIHAVPVEERVRTAVPPKTIEECEVILMVGLPGSGKTQWALKYAKENPEKRYNVLGAETVLNQMRMKGLEEPEMDPKSRDLLVQQASQCLSKLVQIASRTKRNFILDQCNVYNSGQRRKLLLFKTFSRKVVVVVPNEEDWKKRLELRKEVEGDDVPESIMLEMKANFSLPEKCDYMDEVTYGELEKEEAQPIVTKYKEEARKLLPPSEKRTNRRNNRNKRNRQNRSRGQGYVGGQRRGYDNRAYGQQYWGQPGNRGGYRNFYDRYRGDYDRFYGRDYEYNRYRDYYRQYNRDWQSYYYHHPQDRDRYYRNYYGYQGYR

SEQ ID NO: 47403 - protein, 76 aa, Homo sapiens
MAVAAVSRPPVPVQPLDAEVPNRGPFDLRSALWRYGLAVGCGAIGYSTIRNRQKQQLMTHSNNAQHQKARKSNLRG

SEQ ID NO: 47404 - protein, 117 aa, Homo sapiens
MTRTQGSFSGRCPLYGVATLNGSSLALSRPSAPSLCYFVAGASGLLALYCLLLLLFWIYSSCIEDSHRGAIGLRIALAISAIAVFLVLVSACILRFGTRSLCNSIISLNTTIRPLLG

SEQ ID NO: 47405 - protein, 129 aa, Homo sapiens
MDLIEQVEKQTSVADLLASFNDQSTSDYLVVYLRLLTSGYLQRESKFFEHFIEGGRTVKEFCQQEVEPMCKESDHIHIIALAQALSVSIQVEYMDRGEGGTTNPHIFPEGSEPKVYLLYRPGHYDILYK

SEQ ID NO: 47406 - protein, 429 aa, Homo sapiens
MEARLAERKFMNPFNMPNLYQKLESDPRTRTLLSDPTYRELIEQLRNKPSDLGTKLQDPRIMTTLSVLLGVDLGSMDEEEEIATPPPPPPPKKETKPEPMEEDLPENKKQALKEKELGNDAYKKKDFDTALKHYDKAKELDPTNMTYITNQAAVYFEKGDYNKCRELCEKAIEVGRENREDYRQIAKAYARIGNSYFKEEKYKDAIHFYNKSLAEHRTPDVLKKCQQAEKILKEQERLAYINPDLALEEKNKGNECFQKGDYPQAMKHYTEAIKRNPKDAKLYSNRAACYTKLLEFQLALKDCEECIQLEPTFIKGYTRKAAALEAMKDYTKAMDVYQKALDLDSSCKEAADGYQRCMMAQYNRHDSPEDVKRRAMADPEVQQIMSDPAMRLILEQMQKDPQALSEHLKNPVIAQKIQKLMDVGLIAIR

SEQ ID NO: 47407 - protein, 73 aa, Homo sapiens
MAPIKVRLLADPTGAFGKETDLLLDDSLVSIFGNRRLKRFSMVVQDGIVKALNVEPDGTGLTCSLAPNIISQL

SEQ ID NO: 47408 - protein, 118 aa, Homo sapiens
MAPIKVGDAIPAVEVFEGEPGNKVNLAELFKGKKGVLFGVPGAFTPGCSKVRLLADPTGAFGKETDLLLDDSLVSIFGNRRLKRFSMVVQDGIVKALNVEPDGTGLTCSLAPNIISQL

SEQ ID NO: 47409 - protein, 709 aa, Homo sapiens
MKVLRKAALVQRAKTQEHTRTERSVLELVRQAPFLVTLHYAFQTDAKLHLILDYVSGGEMFTHLYQRQYFKEAEVRVYGGEIVLALEHLHKLGIIYRDLKLENVLLDSEGHIVLTDFGLSKEFLTEEKERTFSFCGTIEYMAPEIIRSKTGHGKAVDWWSLGILLFELLTGASPFTLEGERNTQAEVSRRILKCSPPFPPRIGPVAQDLLQRLLCKDPKKRLGAGPQGAQEVRNHPFFQGLDWVALAARKIPAPFRPQIRSELDVGNFAEEFTRLEPVYSPPGSPPPGDPRIFQGYSFVAPSILFDHNNAVMTDGLEAPGAGDRPGRAAVARSAMMQDSPFFQQYELDLREPALGQGSFSVCRRCRQRQSGQEFAVKILSRRLEANTQREVAALRLCQSHPNVVNLHEVHHDQLHTYLVLELLRGGELLEHIRKKRHFSESEASQILRSLVSAVSFMHEEAGVVHRDLKPENILYADDTPGAPVKIIDFGFARLRPQSPGVPMQTPCFTLQYAAPELLAQQGYDESCDLWSLGVILYMMLSGQVPFQGASGQGGQSQAAEIMCKIREGRFSLDGEAWQGVSEEAKELVRGLLTVDPAKRLKLEGLRGSSWLQDGSARSSPPLRTPDVLESSGPAVRSGLNATFMAFNRGKREGFFLKSVENAPLAKRRKQKLRSATASRRGSPAPANPGRAPVASKGAPRRANGPLPPS

SEQ ID NO: 47410 - protein, 1814 aa, Homo sapiens
MTTSLQLAQECLRDGLPEPSEPPQPLEGLEMFAQTIETVLRRIKVTFLDTVVRVEHSPGDGERGVAVEVRVQRLEYCDEAVRDPSQAPPVDVHQPPAFLHKLLQLAGVRLHYEELPAQEEPPEPPLQIGSCSGYMELMVKLKQNEAFPGPKLEVAGQLGSLHLLLTPRQLQQLQELLSAVSLTDHEGLADKLNKSRPLGAEDLWLIEQDLNQQLQAGAVAEPLSPDPLTNPLLNLDNTDLFFSMAGLTSSVASALSELSLSDVDLASSVRSDMASRRLSAQAHPAGKMAPNPLLDTMRPDSLLKMTLGGVTLTLLQTSAPSSGPPDLATHFFTEFDATKDGPFGSRDFHHLRPRFQRACPCSHVRLTGTAVQLSWELRTGSRGRRTTSMEVHFGQLEVLECLWPRGTSEPEYTEILTFPGTLGSQASARPCAHLRHTQILRRVPKSRPRRSVACHCHSELALDLANFQADVELGALDRLAALLRLATVPAEPPAGLLTEPLPAMEQQTVFRLSAPRATLRLRFPIADLRPEPDPWAGQAVRAEQLRLELSEPQFRSELSSGPGPPVPTHLELTCSDLHGIYEDGGKPPVPCLRVSKALDPKSTGRKYFLPQVVVTVNPQSSSTQWEVAPEKGEELELSVESPCELREPEPSPFSSKRTMYETEEMVIPGDPEEMRTFQSRTLALSRCSLEVILPSVHIFLPSKEVYESIYNRINNDLLMWEPADLLPTPDPAAQPSGFPGPSGFWHDSFKMCKSAFKLANCFDLTPDSDSDDEDAHFFSVGASGGPQAAAPEAPSLHLQSTFSTLVTVLKGRITALCETKDEGGKRLEAVHGELVLDMEHGTLFSVSQYCGQPGLGYFCLEAEKATLYHRAAVDDYPLPSHLDLPSFAPPAQLAPTIYPSEEGVTERGASGRKGQGRGPHMLSTAVRIHLDPHKNVKEFLVTLRLHKATLRHYMALPEQSWHSQLLEFLDVLDDPVLGYLPPTVITILHTHLFSCSVDYRPLYLPVRVLITAETFTLSSNIIMDTSTFLLRFILDDSALYLSDKCEVETLDLRRDYVCVLDVDLLELVIKTWKGSTEGKLSQPLFELRCSNNVVHVHSCADSCALLVNLLQYVMSTGDLHPPPRPPSPTEIAGQKLSESPASLPSCPPVETALINQRDLADALLDTERSLRELAQPSGGHLPQASPISVYLFPGERSGAPPPSPPVGGPAGSLGSCSEEKEDEREEEGDGDTLDSDEFCILDAPGLGIPPRDGEPVVTQLHPGPIVVRDGYFSRPIGSTDLLRAPAHFPVPSTRVVLREVSLVWHLYGGRDFGPHPGHRARTGLSGPRSSPSRCSGPNRPQNSWRTQGGSGRQHHVLMEIQLSKVSFQHEVYPAEPATGPAAPSQELEERPLSRQVFIVQELEVRDRLASSQINKFLYLHTSERMPRRAHSNMLTIKALHVAPTTNLGGPECCLRVSLMPLRLNVDQDALFFLKDFFTSLVAGINPVVPGETSAEARPETRAQPSSPLEGQAEGVETTGSQEAPGGGHSPSPPDQQPIYFREFRFTSEVPIWLDYHGKHVTMDQVGTFAGLLIGLAQLNCSELKLKRLCCRHGLLGVDKVLGYALNEWLQDIRKNQLPGLLGGVGPMHSVVQLFQGFRDLLWLPIEQYRKDGRLMRGLQRGAASFGSSTASAALELSNRLVQAIQATAETVYDILSPAAPVSRSLQDKRSARRLRRGQQPADLREGVAKAYDTVREGILDTAQTICDVASRGHEQKGLTGAVGGVIRQLPPTVVKPLILATEATSSLLGGMRNQIVPDAHKDHALKWRSDSAQD

SEQ ID NO: 47411 - protein, 159 aa, Homo sapiens
MEEILDVIEPSQFVKIQEPLFKQVARCVSSPHFQVAERALYFWNNEYILSLIEDNCHTVLPAVFGTLYQVSKEHWNQTIVSLIYNVLKTFMEMNGKLFDELTASYKLEKQQEQQKAQERQELWQGLEELRLRRLQGTQGAKEAPLQRLTPQVAASGGQS

SEQ ID NO: 47412 - protein, 24 aa, Homo sapiens
MQYNRRFVNVVPTFGKKKGPNANS

SEQ ID NO: 47413 - protein, 1214 aa, Homo sapiens
MTLIGENGHSTDTLTGSGFRVVVCPLPCMNGGQCSSRNQCLCPPDFTGRFCQVPAGGAGGGTGGSGPGLSRTGALSTGALPPLAPEGDSVASKHAIYAVQVIADPPGPGEGPPAQHAAFLVPLGPGQISAEVQAPPPVVNVRVHHPPEASVQVHRIESSNAESAAPSQHLLPHPKPSHPRPPTQKPLGRCFQDTLPKQPCGSNPLPGLTKQEDCCGSIGTAWGQSKCHKCPQLQYTGVQKPGPVRGEVGADCPQGYKRLNSTHCQDINECAMPGVCRHGDCLNNPGSYRCVCPPGHSLGPSRTQCIADKPEEKSLCFRLVSPEHQCQHPLTTRLTRQLCCCSVGKAWGARCQRCPTDGTAAFKEICPAGKGYHILTSHQTLTIQGESDFSLFLHPDGPPKPQQLPESPSQAPPPEDTEEERGVTTDSPVSEERSVQQSHPTATTTPARPYPELISRPSPPTMRWFLPDLPPSRSAVEIAPTQVTETDECRLNQNICGHGECVPGPPDYSCHCNPGYRSHPQHRYCVDVNECEAEPCGPGRGICMNTGGSYNCHCNRGYRLHVGAGGRSCVDLNECAKPHLCGDGGFCINFPGHYKCNCYPGYRLKASRPPVCEDIDECRDPSSCPDGKCENKPGSFKCIACQPGYRSQGGGACRDVNECAEGSPCSPGWCENLPGSFRCTCAQGYAPAPDGRSCLDVDECEAGDVCDNGICSNTPGSFQCQCLSGYHLSRDRSHCEDIDECDFPAACIGGDCINTNGSYRCLCPQGHRLVGGRKCQDIDECSQDPSLCLPHGACKNLQGSYVCVCDEGFTPTQDQHGCEEVEQPHHKKECYLNFDDTVFCDSVLATNVTQQECCCSLGAGWGDHCEIYPCPVYSSAEFHSLCPDGKGYTQDNNIVNYGIPAHRDIDECMLFGSEICKEGKCVNTQPGYECYCKQGFYYDGNLLECVDVDECLDESNCRNGVCENTRGGYRCACTPPAEYSPAQRQCLSPEEMDVDECQDPAACRPGRCVNLPGSYRCECRPPWVPGPSGRDCQLPESPAERAPERRDVCWSQRGEDGMCAGPLAGPALTFDDCCCRQGRGWGAQCRPCPPRGAGSHCPTSQSESNSFWDTSPLLLGKPPRDEDSSEEDSDECRCVSGRCVPRPGGAVCECPGGFQLDASRARCVDIDECRELNQRGLLCKSERCVNTSGSFRCVCKAGFARSRPHGACVPQRRR

SEQ ID NO: 47414 - protein, 1167 aa, Homo sapiens [sequence omitted]

SEQ ID NO: 47415 - protein, 520 aa, Homo sapiens
MRFRYKCEGRSAGSIPGERSTDTTKTHPTIKINGYTGPGTVRISLVTKDPPHRPHPHELVGKDCRDGFYEAELCPDRCIHSFQNLGIQCVKKRDLEQAISQRIQTNNNPFQVPIEEQRGDYDLNAVRLCFQVTVRDPSGRPLRLPPVLSHPIFDNRAPNTAELKICRVNRNSGSCLGGDEIFLLCDKVQKEDIEVYFTGPGWEARGSFSQADVHRQVAIVFRTPPYADPSLQAPVRVSMQLRRPSDRELSEPMEFQYLPDTDDRHRIEEKRKRTYETFKSIMKKSPFSGPTDPRPPPRRIAVPSRSSASVPKPAPQPYPFTSSLSTINYDEFPTMVFPSGQISQASALAPAPPQVLPQAPAPAPAPAMVSALAQAPAPVPVLAPGPPQAVAPPAPKPTQAGEGTLSEALLQLQFDDEDLGALLGNSTDPAVFTDLASVDNSEFQQLLNQGIPVAPHTTEPMLMEYPEAITRLVTGAQRPPDPAPAPLGAPGLPNGLLSGDEDFSSIADMDFSALLSQISS

SEQ ID NO: 47416 - protein, 72 aa, Homo sapiens
MGKPDPLRDSGTDDQEEEPLERDFDRFIGATANFSRFTLWGLETIPGPDAKVRGALTWPSLAAAIHAQVPED

SEQ ID NO: 47417 - protein, 375 aa, Homo sapiens
MKCINHYGGYLCLPRSAAVINDLHGEGPPPPVPPAQHPNPCPPGYEPDDQDSCVDVDECAQALHDCRPSQDCHNLPGSYQCTCPDGYRKIGPECVDIDECRYRYCQHRCVNLPGSFRCQCEPGFQLGPNNRSCVDVNECDMGAPCEQRCFNSYGTFLCRCHQGYELHRDGFSCSDIDECSYSSYLCQYRCINEPGRFSCHCPQGYQLLATRLCQDIDECESGAHQCSEAQTCVNFHGGYRCVDTNRCVEPYIQVSENRCLCPASNPLCREQPSSIVHRYMTITSERSVPADVFQIQATSVYPGAYNAFQIRAGNSQGDFYIRQINNVSAMLVLARPVTGPREYVLDLEMVTMNSLMSYRASSVLRLTVFVGAYTF

SEQ ID NO: 47418 - protein, 218 aa, Homo sapiens
MDPWLVFDARTTPATELDAWLAKYPPSQVTRYGDPGSPNSEPVGWIAVYGQGYSPNSGDVQGLQAAWEALQTSGRPITPGTLRQLAITHHVLSGKWLMHLAPGFKLDHAWAGIARAVVEGQLQVAKVSPRAKEGGRQVICVYTDDFTDRLGVLEADSAIRAAGIKCLLTYKPDVYTYLGIYRANRWHLCPTLYESRFQLGGSARGSRVLDRANNVELT

SEQ ID NO: 47419 - protein, 243 aa, Homo sapiens
MDDEDYERRRSECVSEMLDLEKQFSELKEKLFRERLSQLRLRLEEVGAERAPEYTEPLGGLQRSLKIRIQVAGIYKGFCLDVIRNKYECELQGAKQHLESEKLLLYDTLQGELQERIQRLEEDRQSLDLSSEWWDDKLHARGSSRSWDSLPPSKRKKAPLVSGPYIVYMLQEIDILEDWTAIKKARAAVSPQKRKSDDRRTHRPLRVCPARLLWCCWALPLHLALAWTPPLPSSRPAQLWPWS

SEQ ID NO: 47420 - protein, 199 aa, Homo sapiens
MDDEDYERRRSECVSEMLDLEKQFSELKEKLFRERLSQLRLRLEEVGAERAPEYTEPLGGLQRSLKIRIQVAGIYKGFCLDVIRNKYECELQGAKQHLESEKLLLYDTLQGELQERIQRLEEDRQSLDLSSEWWDDKLHARGSSRSWDSLPPSKRKKAPLVSGPYIVYMLQEIDILEDWTAIKKARAAVSPQKRKSDGP

SEQ ID NO: 47421 - protein, 436 aa, Homo sapiens
MFNRGRAAGTRAVLGLVRGRVRRAGQGSLYSLEATLEEPPCNDPMVCRLPVSKKTLLCSFQVLDELGRHVLLRKDCGPVDTKVPGAGEPKSAFTQGSAMISSLSQNHPDNRNETFSSVISLLNEDPLSQDLPVKMASIFKNFVITYNRTYESKEEARWRLSVFVNNMVRAQKIQALDRGTAQYGVTKFSDLTEEEFRTIYLNTLLRKEPGNKMKQAKSVGDLAPPEWDWRSKGAVTKVKDQGMCGSCWAFSVTGNVEGQWFLNQGTLLSLSEQELLDCDKMDKACMGGLPSNAYSAIKNLGGLETEDDYSYQGHMQSCNFSAEKAKVYINDSVELSQNEQKLAAWLAKRGPISVAINAFGMQFYRHGISRPLRPLCSPWLIDHAVLLVGYGNRSDVPFWAIKNSWGTDWGEKGYYYLHRGSGACGVNTMASSAVVD

SEQ ID NO: 47422 - protein, 225 aa, Homo sapiens
MGFRLEGIFPAALLPLLLTMILFLGPLMQLSMDCPCDLADGLKVVLAPRSWARCLTDMRWLRNQVIAPLTEELVFRACMLPMLAPCMGLGPAVFTCPLFFGVAHFHHIIEQLRFRQSSVGNIFLSAAFQFSYTAVFGAYTAFLFIRTGHLIGPVLCHSFCNYMGFPAVCAALEHPQRRPLLAGYALGVGLFLLLLQPLTDPKLYGSLPLCVLLERAGDSEAPLCS

SEQ ID NO: 47423 - protein, 1106 aa, Homo sapiens
MEGKDFNVEYIQRGGLRDPLIFKNSDGLGIKMPDPDFTVNDVKMCVGSRRMVDVMDVNTQKGIEMTMAQWTRYYETPEEEREKLYNVISLEFSHTRLENMVQRPSTVDFIDWVDNMWPRHLKESQTESTNAILEMQYPKVQKYCLMSVRGCYTDFHVDFGGTSVWYHIHQGGKVFWLIPPTAHNLELYENWLLSGKQGDIFLGDRVSDCQRIELKQGYTFVIPSGWIHAVYTPTDTLVFGGNFLHSFNIPMQLKIYNIEDRTRVPNKFRYPFYYEMCWYVLERYVYCITNRSHLTKEFQKESLSMDLELNGLESGNGDEEAVDREPRRLSSRRSVLTSPVANGVNLDYDGLGKTCRSLPSLKKTLAGDSSSDCSRGSHNGQVWDPQCAPRKDRQVHLTHFELEGLRCLVDKLESLPLHKKCVPTGIEDEDALIADVKILLEELANSDPKLALTGVPIVQWPKRDKLKFPTRPKVRVPTIPITKPHTMKPAPRLTPVRPAAASPIVSGARRRRVRCRKCKACVQGECGVCHYCRDMKKFGGPGRMKQSCVLRQCLAPRLPHSVTCSLCGEVDQNEETQDFEKKLMECCICNEIVHPGCLQMDGEGLLNEELPNCWECPKCYQEDSSEKAQKRKMEESDEEAVQAKVLRPLRSCDEPLTPPPHSPTSMLQLIHDPVSPRGMVTRSSPGAGPSDHHSASRDERFKRRQLLRLQATERTMVREKENNPSGKKELSEVEKAKIRGSYLTVTLQRPTKELHGTSIVPKLQAITASSANLRHSPRVLVQHCPARTPQRGDEEGLGGEEEEEEEEEEEDDSAEEGGAARLNGRGSWAQDGDESWMQREVWMSVFRYLSRRELCECMRVCKTWYKWCCDKRLWTKIDLSRCKAIVPQALSGIIKRQPVSLDLSWTNISKKQLTWLVNRLPGLKDLLLAGCSWSAVSALSTSSCPLLRTLDLRWAVGIKDPQIRDLLTPPADKPGQDNRSKLRNMTDFRLAGLDITDATLRLIIRHMPLLSRLDLSHCSHLTDQSSNLLTAVGSSTRYSLTELNMAGCNKLTDQTLIYLRRIANVTLIDLRGCKQITRKACEHFISDLSINSLYCLSDEKLIQKIS

SEQ ID NO: 47424 - protein, 71 aa, Homo sapiens
MGYVQAMKPPGAQGSQSTYTDLLSVIEEMGKEIRPTYAGSKSAMERLKRGIIHARALVRECLAETERNART

SEQ ID NO: 47425 - protein, 514 aa, Homo sapiens [sequence omitted]

SEQ ID NO: 47426 - protein, 393 aa, Homo sapiens
MVVNGRRNGGKLSNDHQQNQSKLQHTGKDTLKAGKNAVERRSNRCNGNSGFEGQSRYVPSSGMSAKELCENDDLATSLVLDPYLGFQTHKMNTSAFPSRSSRHFSKSDSFSHNNPVRFRPIKGRQEELKEVIERFKKDEHLEKAFKCLTSGEWARHYFLNKNKMQEKLFKEHVFIYLRMFATDSGFEILPCNRYSSEQNGAKIVATKEWKRNDKIELLVGCIAELSEIEENMLLRHGENDFSVMYSTRKNCAQLWLGPAAFINHDCRPNCKFVSTGRDTACVKALRDIEPGEEISCYYGDGFFGENNEFCECYTCERRGTGAFKSRVGLPAPAPVINSKYGLRETDKRLNRLKKLGDSSKNSDSQSVSSNTDADTTQEKNNAKNPEEKGRCFP

SEQ ID NO: 47427 - protein, 95 aa, Homo sapiens
MKLYSFLLNDSPLNPLLASFFSKVLSILISRKPEQIVDFLKKKHDFVDLIIKHIGTSAIMDLLLRLLTCIEPPQPRQDVLNCSKSRETCNILLKM

SEQ ID NO: 47428 - protein, 327 aa, Homo sapiens
MCPGLSEAPELYSRGFLTIEQIAMLPPPAVMNYIFLLLCLCGLVGNGLVLWFFGFSIKRNPFSIYFLHLASADVGYLFSKAVFSILNTGGFLGTFADYIRSVCRVLGLCMFLTGVSLLPAVSAERCASVIFPAWYWRRRPKRLSAVVCALLWVLSLLVTCLHNYFCVFLGRGAPGAACRHMDIFLGILLFLLCCPLMVLPCLALILHVECRARRRQRSAKLNHVILAMVSVFLVSSIYLGIDWFLFWVFQIPAPFPEYVTDLCICINSSAKPIVYFLAGRDKSQRLWEPLRVVFQRALRDGAELGEAGGSTPNTVTMEMQCPPGNAS

SEQ ID NO: 47429 - protein, 102 aa, Homo sapiens
MVTSKNGGIYLLANQKGCDGDRLYYDGCAMIAMNGSVFAQGSQFSLDDVEVLTATLDLEDVRSYRAEISSRNLAVSAPVDTCVGCSSKTWKVAPFVRAWWRP

SEQ ID NO: 47430 - protein, 2018 aa, Homo sapiens [sequence omitted]

SEQ ID NO: 47431 - protein, 531 aa, Homo sapiens
MQEVSRLLSEGADVNAKHRLGWTALMVAAINRNNSVVQVLLAAGADPNLGDDFSSVYKTAKEQGIHSLEVLITREDDFNNRLNNRASFKGCTALHYAVLADDYRTVKELLDGGANPLQRNEMGHTPLDYAREGEVMKLLRTSEAKYQEKQRKREAEERRRFPLEQRLKEHIIGQESAIATVGAAIRRKENGWYDEEHPLVFLFLGSSGIGKTELAKQTAKYMHKDAKKGFIRLDMSEFQERHEVAKFIGSPPGYVGHEEGGQLTKKLKQCPNAVVLFDEVDKAHPDVLTIMLQLFDEGRLTDGKGKTIDCKDAIFIMTSNVASDEIAQHALQLRQEALEMSRNRIAENLGDVQISDKITISKNFKENVIRPILKAHFRRDEFLGRINEIVYFLPFCHSELIQLVNKELNFWAKRAKQRHNITLLWDREVADVLVDGYNVHYGARSIKHEVERRVVNQLAAAYEQDLLPGGCTLRITVEDSDKQLLKSPELPSPQAEKRLPKLRLEIIDKDSKTRRLDIRAPLHPEKVCNTI

SEQ ID NO: 47432 - protein, 1125 aa, Homo sapiens
MDGPPGGSTPVTPVIKAGWLDKNPPQGSYIYQKRWVRLDTDHLRYFDSNKDAYSKRFISVACISHVAAIGDQKFEVITNNRTFAFRAESDVERKEWMQALQQAMAEQRARARLSSAYLLGVPGSEQPDRAGSLELRGFKNKLYVAVVGDKVQLYKNLEEYHLGIGITFIDMSVGNVKEVDRRSFDLTTPYRIFSFSADSELEKEQWLEAMQGAIAEALSTSEVAERIWAAAPNRFCADCGAPQPDWASINLCVVICKRCAGEHRGLGAGVSKVRSLKMDRKVWTETLIELFLQLGNGAGNRFWAANVPPSEALQPSSSPSTRRCHLEAKYREGKYRRYHPLFGNQEELDKALCAAVTTTDLAETQALLGCGAGINCFSGDPEAPTPLALAEQAGQTLQMEFLRNNRTTEVPRLDSMKPLEKHYSVVLPTVSHSGFLYKTASAGKLLQDRRAREEFSRRWCVLGDGVLSYFENERAVTPNGEIRASEIVCLAVPPPDTHGFEHTFEVYTEGERLYLFGLESAEQAHEWVKCIAKAFVPPLAEDLLARDFERLGRLPYKAGLSLQRAQEGWFSLSGSELRAVFPEGPCEEPLQLRKLQELSIQGDSENQVLVLVERRRTLYIQGERRLDFMGWLGAIQKAAASMGDTLSEQQLGDSDIPVIVYRCVDYITQCGLTSEGIYRKCGQTSKTQRLLESLRQDARSVHLKEGEQHVDDVSSALKRFLRDLPDGLFTRAQRLTWLEASEIEDEEEKVSRYRELLVRLPPVNRATVKALISHLYCVQCFSDTNQMNVHNLAIVFGPTLFQTDGQDYKAGRVVEDLINHYVVVFSVDEEELRKQREEITAIVKMRVAGTASGTQHAGDFICTVYLEEKKAETEQHIKVPASMTAEELTLEILDRRNVGIREKDYWTCFEVNEREEAERPLHFAEKVLPILHGLGTDSHLVVKKHQAMEAMLLYLASRVGDTKHGMMKFREDRSLLGLGLPSGGFHDRYFILNSSCLRLYKEVRSHRPEKEWPIKSLKVYLGVKKKLRPPTCWGFTVVHETEKHEKQQWYLCCDTQMELREWFATFLFVQHDGLVWPSEPSRVSRAVPEVRLGSVSLIPLRGSENEMRRSVAAFTADPLSLLRNV

SEQ ID NO: 47433 - protein, 531 aa, Homo sapiens
MIGAGSKDAGTLNHGSKPLPPNPEEKKKKDRFYRSILPGDKTNKKKEKERPEISLPSDFEHTIHVGFDAVTGEFTGMPEQWARLLQTSNITKSEQKKNPQAVLDVLEFYNSKKTSNSQKYMSFTDKSAEDYNSSNALNVKAVSETPAVPPVSEDEDDDDDDATPPPVIAPRPEHTKSVYTRSVIEPLPVTPTRDVATSPISPTENNTTPPDALTRNTEKQKKKPKMSDEEILEKLRSIVSVGDPKKKYTRFEKIGQGASGTVYTAMDVATGQEVAIKQMNLQQQPKKELIINEILVMRENKNPNIVNYLDSYLVGDELWVVMEYLAGGSLTDVVTETCMDEGQIAAVCRECLQALEFLHSNQVIHRDIKSDNILLGMDGSVKLTDFGFCAQITPEQSKRSTMVGTPYWMAPEVVTRKAYGPKVDIWSLGIMAIEMIEGEPPYLNENPLRALYLIATNGTPELQNPEKLSAIFRDFLNRCLEMDVEKRGSAKELLQVRKLRFQVFSNFSMIAASIPEDCQAPLQPHSTDCCS

SEQ ID NO: 47434 - protein, 55 aa, Homo sapiens
MFTAMCECQALHPDPEDEDSDDYDGEEYDVEAHDGMEVDTTPTVAGQFEDADVDH

SEQ ID NO: 47435 - protein, 113 aa, Homo sapiens
MFTAMCECQALHPDPEDEDSDDYDGEEYDVEAHEQGQGDIPTFYTYEEGLSHLTAEGQATLERLEGMLSQSVSSQYNMAGVRTEDSIRDYEDGMEVDTTPTVAGQFEDADVDH

SEQ ID NO: 47436 - protein, 52 aa, Homo sapiens
MSEALKVPSSTVEYLKKHGIDVRVLQTEQAVKEYNALVAQGVRVGGVFHSTC

SEQ ID NO: 47437 - protein, 1479 aa, Homo sapiens
MDSIVKNVGREYLTAFTKNLVATFICVFEKVDENTRKSLFKLRSTWDEIFPLKKLYALDVRVNSLDPAWPIKPLPPNVNTSSIHVNPKFLNKSPEEPSTPGTVVSSPSISTPPIVPDIQKNLTQEQLIRQQLLAKQKQLLELQQKKLELELEQAKAQLAVSLSVQQETSNLGPGSAPSKLHVSQIPPMAVKAPHQVPVQSEKSRPGPSLQIQDLKGTNRDPRLNRISQHSHGKDQSHRKEFLMNTLNQSDTKTSKTIPSEKLNSSKQEKSKSGEKITKKELDQLDSKSKSKSKSPSPLKNKLSHTKDLKNQESESMRLSDMNKRDPRLKKHLQDKTDGKDDDVKEKRKTAEKKDKDEHMKSSEHRLAGSRNKIINGIVQKQDTITEESEKQGTKPGRSSTRKRSRSRSPKSRSPIIHSPKRRDRRSPKRRQRSMSPTSTPKAGKIRQSGAKQSHMEEFTPPSREDRNAKRSTKQDIRDPRRMKKTEEERPQETTNQHSTKSGTEPKENVENWQSSKSAKRWKSGWEENKSLQQVDEHSKPPHLRHRESWSSTKGILSPRAPKQQQHRLSVDANLQIPKELTLASKRELLQKTSERLASGEITQDDFLVVVHQIRQLFQYQEGVREEQRSPFNDRFPLKRPRYEDSDKPFVDSPASRFAGLDTNQRLTALAEDRPLFDGPSRPSVARDGPTKMIFEGPNKLSPRIDGPPTPASLRFDGSPGQMGGGGPLRFEGPQGQLGGGCPLRFEGPPGPVGTPLRFEGPIGQAGGGGFRFEGSPGLRFEGSPGGLRFEGPGGQPVGGLRFEGHRGQPVGGLRFEGPHGQPVGGLRFDNPRGQPVGGLRFEGGHGPSGAAIRFDGPHGQPGGGIRFEGPLLQQGVGMRFEGPHGQSVAGLRFEGQHNQLGGNLRFEGPHGQPGVGIRFEGPLVQQGGGMRFEGPSVPGGGLRIEGPLGQGGPRFEGCHALRFDGQPGQPSLLPRFDGLHGQPGPRFERTPGQPGPQRFDGPPGQQVQPRFDGVPQRFDGPQHQQASRFDIPLGLQGTRFDNHPSQRLESVSFNQTGPYNDPPGNAFNAPSQGLQFQRHEQIFDSPQGPNFNGPHGPGNQSFSNPLNRASGHYFDEKNLQSSQFGNFGNIPAPMTVGNIQASQQVLSGVAQPVAFGQGQQFLPVHPQNPGFVQNPSGALPKAYPDNHLSQVDVNELFSKLLKTGILKLSQTDSATTQVSEVTAQPPPEEEEDQNEDQDVPDLTNFTVEELKQRYDSVINRLYTGIQCYSCGMRFTTSQTDVYADHLDWHYRQNRTEKDVSRKVTHRRWYYSLTDWIEFEEIADLEERAKSQFFEKVHEEVVLKTQEAAKEKEFQSVPAGPAGAVESCEICQEQFEQYWDEEEEEWHLKNAIRVDGKIYHPSCYEDYQNTSSFDCTPSPSKTPVENPLNIMLNIVKNELQEPCDSPKVKEERIDTPPACTEESIATPSEIKTENDTVESV

SEQ ID NO: 47438 - protein, 895 aa, Homo sapiens
MKVLQRDAALKRAEEERVRHLPEKIKDDQQLKNMSGQWFYEAKAKRHRDKIHGADIIRASMRKKRPQIAAEQSKDRENGAKESWVNNVNKDAFLPPELAGVVEEPEEDAAPASPSSSVVNPASSVIDMSQENTRKPNVSPEKRKNPFNSSKLPEGHSSQQTKNEQSKNGRTGLFQTSKEDELSESKEKSTVADTSIQKLEKSKQTLPGLSNGSQIKAPIPKARKMIYKSTDLNKDDNQSFPRQRTDSLKARGAPRGILKRNSSSSSTDSETLRYNHNFEPKSKIVSPGLTIHERISEKEHSLEDNSSPNSLEPLKHVRFSAVKDELPQSPGLIHGREVGEFSVLESDRLKNGMEDAGDTEEFQSDPKPSQYRKPSLFHQSTSSPYVSKSETHQPMTSGSFPINGLHSHSEVLTARPQSMENSPTINEPKDKSSELTRLESVLPRSPADELSHCVEPEPSQVPGGSSRDRQQGSEEEPSPVLKTLERSAARKMPSKSLEDISSDSSNQAKVDNQPEELVRSAEDDEKPDQKPVTNECVPRISTVPTQPDNPFSHPDKLKRMSKSVPAFLQDEVSGSVMSVYSGDFGNLEVKGNIQFAIEYVESLKELHVFVAQCKDLAAADVKKQRSDPYVKAYLLPDKGKMGKKKTLVVKKTLNPVYNEILRYKIEKQILKTQKLNLSIWHRDTFKRNSFLGEVELDLETWDWDNKQNKQLRWYPLKRKTAPVALEAENRGEMKLALQYVPEPVPGKKLPTTGEVHIWVKECLDLPLLRGSHLNSFVKCTILPDTSRKSRQKTRAVGKTTNPIFNHTMVYDGFRPEDLMEACVELTVWDHYKLTNQFLGGLRIGFGTGKSYGTEVDWMDSTSEEVALWEKMVNSPNTWIEATLPLRMLLIAKISK

SEQ ID NO: 47439 - protein, 262 aa, Homo sapiens
MQCIKHYVGHGNAINELKFHPRDPNLLLSVSKDHALRLWNIQTDTLVAIFGGVEGHRDEVLSADYDLLGEKIMSCGMDHSLKLWRINSKRMMNAIKESYDYNPNKTNRPFISQKIHFPDFSTRDIHRNYVDCVRWLGDLILSKSCENAIVCWKPGKMEDDIDKIKPSESNVTILGRFDYSQCDIWYMRFSMDFWQKMLALGNQVGKLYVWDLEVEDPHKAKCTTLTHHKCGAAIRQTSFSRDSSILIAVCDDASIWRWDRLR

SEQ ID NO: 47440 - protein, 200 aa, Homo sapiens
MNVLLFWKTFLLYNQGPEYHYLHQMLGLGLCLSRASASVLNLNCSLILLPMCRTLLAYLRGSQKVPSRRTRRLLDKSRTFHITCGVTICIFSGVHVAAHLVNALNFSVNYSEDFVELNAARYRDEDPRKLLFTTVPGLTGVCMVVVLFLMITASTYAIRVSNYDIFWYTHNLFFVFYMLLTLHVSGVQLKPKQHLGFILK

SEQ ID NO: 47441 - protein, 218 aa, Homo sapiens
MTNLELKISASLKQALDKLKLSSGNEENKKEEDNDEIKIGTSCKNGGCSKTYQGLESLEEVCVYHSGVPIFHEGMKYWSCCRRKTSDFNTFLAQEGCTKGKHMWTKKDAGKKVVPCRHDWHQTGGEVTISVYAKNSLPELSRVEANSTLLNVHIVFEGEKEFDQNVKLWGVIDVKRSYVTMTATKIEITMRKAEPMQWASLELPAAKKQEKQKDATTD

SEQ ID NO: 47442 - protein, 339 aa, Homo sapiens [sequence omitted]

SEQ ID NO: 47443 - protein, 4490 aa, Homo sapiens
MGITLIDLSWDIKYRIVSGDEEGFFKAEEVIIADFCFLRIRTKGGNSAILNREIQDNYLLIVKGSVRGEDLEAWTKVNIQVLDMNDLRPLFSPTTYSVTIAESTPLRTSVAQVTATDADIGSNGEFYYYFKNKVDLFSVHPTSGVISLSGRLNYDEKNRYDLEILAVDRGMKLYGNNGVSSTAKLYVHIERINEHAPTIHVVTHVPFSLEKEPTYAVVTVDDLDDGANGEIESVSIVAGDPLDQFFLAKEGKWLNEYKIKERKQIDWESFPYGYNLTLQAKDKGSPQKCSALKAVYIGNPTRDTVPIRFEKEVYDVSISEFSPPGVVVAIVKLSPEPIDVEYKLSPGEDAVYFKINPRSGLIVTARPLNTVKKEVYKLEVTNKEGDLKAQVTISIEDANDHTPEFQQPLYDAYVNESVPVGTSVLTVSASDKDKGENGYITYSIASLNLLPFVINQFTGVISTTEELDFESSPEIYRFIVRASDWGSPYRHESEVNVTIRIGNVNDNSPLFEKVACQGVISYDFPVGGHITAVSAIDIDELELVKYKIISGNELGFFYLNPDSGVLQLKKSLTNSGIKNGNFALRITATDGENLADPMSINISVLHGKVSSKSFSCRETRVAQKLAEKLLIKAKANGKLNLEDGFLDFYSINRQGPYFDKSFPSDVAVKEDLPVGANILKIKAYDADSGFNGKVLFTISDGNTDSCFNIDMETGQLKVLMPMDREHTDLYLLNITIYDLGNPQKSSWRLLTINVEDANDNSPVFIQDSYSVNILESSGIGTEIIQVEARDKDLGSNGEVTYSVLTDTQQFAINSSTGIVYVADQLDRESKANYSLKIEARDKAESGQQLFSVVTLKVFLDDVNDCSPAFIPSSYSVKVLEDLPVGTVIAWLETHDPDLGLGGQVRYSLVNDYNGRFEIDKASGAIRLSKELDYEKQQFYNLTVRAKDKGRPVSLSSVSFVEVEVVDVNENLHTPYFPDFAVVGSVKENSRIGTSVLQVTARDEDSGRDGEIQYSIRDGSGLGRFSIDDESGVITAADILDRETMGSYWLTVYATDRGVVPLYSTIEVYIEVEDVNDNAPLTSEPIYYPVVMENSPKDVSVIQIQAEDPDSSSNEKLTYRITSGNPQNFFAINIKTGLITTTSRKLDREQQAEHFLEVTVTDGGPSPKQSTIWVVVQVLDENDNKPQFPEKVYQIKLPERDRKKRGEPIYRAFAFDRDEGPNAEISYSIVDGNDDGKFFIDPKTGMVSSRKQFTAGSYDILTIKAVDNGRPQKSSTARLHIEWIKKPPPSPIPLTFDEPFYNFTVMESDRVTEIVGVVSVQPANTPLWFDIVGGNFDSAFDAEKGVGTIVIAKPLDAEQRSIYNMSVEVTDGTNVAVTQVFIKVLDNNDNGPEFSQPNYDVTISEDVLPDTEILQIEATDRDEKHKLSYTVHSSIDSISMRKFRIDPSTGVLYTAERLDHEAQDKHILNIMVRDQEFPYRRNLARVIVNVEDANDHSPYFTNPLYEASVFESAALGSAVLQVTALDKDKGENAELIYTIEAGNTGNMFKIEPVLGIITICKEPDMTTMGQFVLSIKVTDQGSPPMSATAIVRISVTMSDNSHPKFIHKDYQAEVNENVDIGTSVILISAISQSTLIYEVKDGDINGIFTINPYSGVITTQKALDYERTSSYQLIIQATNMAGMASNATVNIQIVDENDNAPVFLFSQYSGSLSEAAPINSIVRSLDNSPLVIRATDADSNRNALLVYQIVESTAKKFFTVDSSTGAIRTIANLDHETIAHFHFHVHVRDSGSPQLTAESPVEVNIEVTDVNDNPPVFTQAVFETILLLPTYVGVEVLKVSATDPDSEVPPELTYSLMEGSLDHFLIDSNSGVLTIKNNNLSKDHYMLIVKVSDGKFYSTSMVTIMVKEAMDSGLHFTQSFYSTSISENNTNITKVAIVNAVGNRLNEPLKYSILNPGNKFKIKSTSGVIQTTGVPFDREEQELYELVVEASRELDHLRVARVVVRVNIEDINDNSPVFVGLPYYAAVQVDAEPGTLIYQVTAIDKDKGPNGEVTYVLQDDYGHFEINPNSGNVILKEAFNSDLSNIEYGVTILAKDGGKPSLSTSVELPITIVNKAMPVFDKPFYTASVNEDIRMNTPILSINATSPEGQGIIYIIIDGDPFKQFNIDFDTGVLKVVSPLDYEVTSAYKLTIRASDALTGARAEVTVDLLVNDVNDNPPIFDQPTYNTTLSEASLIGTPVLQVVSIDADSENNKMVHYQIVQDTYNSTDYFHIDSSSGLILTARMLDHELVQHCTLKVRSIDSGFPSLSSEVLVHIYISDVNDNPPVFNQLIYESYVSELAPRGHFVTCVQASDADSSDFDRLEYSILSGNDRTSFLMDSKSGVITLSNHRKQRMEPLYSLNVSVSDGLFTSTAQVHIRVLGANLYSPAFSQSTYVAEVRENVAAGTKVIHVRATDGDPGTYGQISYAIINDFAKDRFLIDSNGQVITTERLDRENPLEGDVSIFVRALDGGGRTTFCTVRVIVVDENDNAPQFMTVEYRASVRADVGRGHLVTQVQAIDPDDGANSRITYSLYSEASVSVADLLEIDPDNGWMVTKGNFNQLKNTVLSFFVKAVDGGIPVKHSLIPVYIHVLPPETFLPSFTQSQYSFTIAEDTAIGSTVDTLRILPSQNVWFSTVNGERPENNKGGIFVIEQETGTIKLDKRLDRETSPAFHFKVAATIPLDKVDIVFTVDVDIKVLDLNDNKPVFETSSYDTIIMEGMPVGTKLTQVRAIDMDWGANGQVTYSLHSDSQPEKVMEAFNIDSNTGWISTLKDLDHETDPTFTFSVVASDLGEAFSLSSTALVSVRVTDINDNAPVFAQEVYRGNVKESDPPGEVVAVLSTWDRDTSDVNRQVSYHITGGNPRGRFALGLVQSEWKVYVKRPLDREEQDIYFLNITATDGLFVTQAMVEVSVSDVNDNSPVCDQVAYTALLPEDIPSNKIILKVSAKDADIGSNGYIRYSLYGSGNSEFFLDPESGELKTLALLDRERIPVYSLMAKATDGGGRFCQSNIHLILEDVNDNPPVFSSDHYNTCVYENTATKALLTRVQAVDPDIGINRKVVYSLADSAGGVFSIDSSSGIIILEQPLDREQQSSYNISVRATDQSPGQSLSSLTTVTITVLDINDNPPVFERRDYLVTVPEDTSPGTQVLAVFATSKDIGTNAEITYLIRSGNEQGKFKINPKTGGISVSEVLDYELCKRFYLVVEAKDGGTPALSAVATVNINLTDVNDNPPKFSQDVYSAVISEDALVGDSVILLIAEDVDSQPNGQIHFSIVNGDRDNEFTVDPVLGLVKVKKKLDRERVSGYSLLVQAVDSGIPAMSSTATVNIDISDVNDNSPVFTPANYTAVIQENKPVGTSILQLVVTDRDSFHNGPPFSFSILSGNEEEEFVLDPHGILRSAVVFQHTESLEYVLCVQAKDSGKPQQVSHTYIRVRVIEESTHKPTAIPLEIFIVTMEDDFPGGVIGKIHATDQDMYDVLTFALKSEQKSLFKVNSHDGKIIALGGLDSGKYVLNVSVSDGRFQVPIDVVVHVEQLVHEMLQNTVTIRFENVSPEDFVGLHMHGFRRTLRNAVLTQKQDSLRIISIQPVAGTNQLDMLFAVEMHSSEFYKPAYLIQKLSNARRHLENIMRISAILEKNCSGLDCQEQHCEQGLSLDSHALMTYSTARISFVCPRFYRNVRCTCNGGLCPGSNDPCVEKPCPGDMQCVSYEASRRPFLCQCPPGKLGECSGHTSLSFAGNSYIKYRLSENSKEEDFKLALRLRTLQSNGIIMYTRANPCIILKIVDGKLWFQLDCGSGPGILGISGRAVNDGSWHSVFLELNRNFTSLSLDDSYVERRRAPLYFQTLSTESSIYFGALVQADNIRSLTDTRVTQVLSGFQGCLDSVILNNNELPLQNKRSSFAEVVGLTELKLGCVLYPDACKRSPCQHGGSCTGLPSGGYQCTCLSQFTGRNCESEITACFPNPCRNGGSCDPIGNTFICNCKAGLTGVTCEEDINECEREECENGGSCVNVFGSFLCNCTPGYVGQYCGLRPVVVPNIQAGHSYVGKEELIGIAVVLFVIFILVVLFIVFRKKVFRKNYSRNNITLVQDPATAALLNKSNGIPFRNLRGSGDGRNVYQEVGPPQVPVRPMAYTPCFQSDSRSNLDKIVDGLGGEHQEMTTFHPESPRILTARRGVVVCSVAPNLPAVSPCRSDCDSIRKNGWDAGTENKGVDDPGEVTCFAGSNKGSNSEVQSLSSFQSDSGDDNAYHWDTSDWMPGARLSDIEEVPNYENQDGGSAHQGSTRELESDYYLGGYDIDSEYPPPHEEEFLSQDQLPPPLPEDFPDQYEALPPSQPVSLASTLSPDCRRRPQFHPSQYLPPHPFPNETDLVGPPASCEFSTFAVSMNQGTEPTGPADSVSLSLHNSRGTSSSDVSANCGFDDSEVAMSDYESVGELSLASLHIPFVETQHQTQV

SEQ ID NO: 47444 - protein, 683 aa, Homo sapiens
MEKDAVRGNDTFVTLDEILRLAQENEVDFILLGGDLFHENKPSRKTLHTCLELLRKYCMGDRPVQFEILSDQSVNFGFSKFPWVNYQDGNLNISIPVFSIHGNHDDPTGADALCALDILSCAGFVNHFGRSMSVEKIDISPVLLQKGSTKIALYGLGSIPDERLYRMFVNKKVTMLRPKEDENSWFNLFVIHQNRSKHGSTNFIPEQFLDDFIDLVIWGHEHECKIAPTKNEQQLFYISQPGSSVVTSLSPGEAVKKHVGLLRIKGRKMNMHKIPLHTVRQFFMEDIVLANHPDIFNPDNPKVTQAIQSFCLEKIEEMLENAERERLGNSHQPEKPLVRLRVDYSGGFEPFSVLRFSQKFVDRVANPKDIIHFFRHREQKEKTGEEINFGKLITKPSEGTTLRVEDLVKQYFQTAEKNVQLSLLTERGMGEAVQEFVDKEEKDAIEELVKYQLEKTQRFLKERHIDALEDKIDEEVRRFRETRQKNTNEEDDEVREAMTRARALRSQSEESASAFSADDLMSIDLAEQMANDSDDSISAATNKGRGRGRGRRGGRGQNSASRGGSQRGRADTGLETSTRSRNSKTAVSASRNMSIIDAFKSTRQQPSRNVTTKNYSEVIEVDESDVEEDIFPTTSKTDQRWSSTSSSKIMSQSQVSKGVDFESSEDDDDDPFMNTSSLRRNRR

SEQ ID NO: 47445 - protein, 208 aa, Homo sapiens
MDGAELDGRELRVQVARYGRRDLPRSRQGEPRGRSRGGGYGRRSRSYGRRSRSPRRRHRSRSRGPSCSRSRSRSRYRGSRYSRSPYSRSPYSRSRYSRSPYSRSRYRESRYGGSHYSSSGYSNSRYSRYHSSRSHSKSGSSTSSRSASTSKSSSARRSKSSSVSRSRSRSRSSSMTRSPPRVSKRKSKSRSRSKRPPKSPEEEGQMSS

SEQ ID NO: 47446 - protein, 356 aa, Homo sapiens
MCDSDESDDSDILVRKVGVKRPRRVVEDEGSSVEMEQKTPEKTLAAQKREKLQKLKELSKQRSRQRRSSGRDFEDSEKESCPSSDEVDEEEEEDNYESDEDGDDYIIDDFVVQDEEGDEENKNQQGEKLTTSQLKLVKQNSLYSFSDHYTHFERVVKALLINALDESFLGTLYDGTRQKSYAKDMLTSLHYLDNRFVQPRLESLVSRSRWKEQYKERVENYSNVSIHLKNPENCSCQACGLHRYCKYSVHLSGELYNTRTMQIDNFMSHDKQVFTVGRICASRTRIYHKLKHFKFKLYQECCTIAMTEEVEDEQVKETVERIFRRSKENGWIKEKYGQLEEYLNFADYFQEEKFEL

SEQ ID NO: 47447 - protein, 726 aa, Homo sapiens
MRTTDSTSGAFKRERPLVTESPTFKFSKSQSTSDSLTQEVATFPDQEKYSELNQENGTTSIPTSCVPVATPLVLPSNIQSARPSAKNSIHIKEIDAVQCSDKLDELKDGKEEEIKYFNCNKEELPLFSDSFQDAYIPHNPDSKDEKQKLAETSSLSNVTSNYDFVGQHKKMKYNIHERNGVRFLKSILKKESKYEHGYLKALIINQSFKFGNQKAAAIRDSIELTKEKGAEIPKTIKKLRWFDETSNIENNAENSHSLKNKTGTTQQHSQQFHIQSGAGSNIISVSTCAVNSADTKKSREDSISENVTTLGGSGADHMPLNCFIPSGYNFAKHAWPASKKEESKIPVHDDSKTKQGKPQRGRAKIIRKPGSAKVQSGFICTNRKGAVIQPQSASKVNIFTQAQGKLIIPCPPPQSTSNIRSGKNIQVSQCQPVTPENPQNIITHNSFNSKHVLPTEHSLNQWNQESSSPLSNACSDLVTVIPSLPSYCSSECQTFAKINHSNGTQAVARQDATLYCTQRSPVCEESYPSVTLRTAEEESVPLWKRGPNVLHQNKRATGSTVMRRKRIAETKRRNILEQKRQNPGSVGQKYSEQINNFGQSVLLSSSEPKQTTRGTSYIEEVSDSTSEFLMAENLVKASVPEDEILTVLNSKQIQKSNLPLNKTQQFNICTLSAEEQKILESLNDLSERLHYIQESICKNPSIKNTLQIIPLLEKREDRTSSCRDKR

SEQ ID NO: 47448 - protein, 177 aa, Homo sapiens
MAASANIENSGLPHNSSANSTETLQHVPSDHTNETSNSTVKPPTSVASDSSNTTVTTMKPTAASNTTTPGMVSTNMTSTTLKSTPKTTSVSQNTSQISTSTMTVTHNSSVTSAASSVTITTTMHSEAKKGSKFDTGSFVGGIVLTLGVLSILYIGCKMYYSRRGIRYRTIDEHDAII

SEQ ID NO: 47449 - protein, 101 aa, Homo sapiens
MADSMQEKQRMAGQMLLQTFFNIDQISPNKKAHPNMEAGPPESGESTDALKLCPHEEFLRLCKERAEEVLCYLYEIEKKEEISLLSFSAPFLTALNDWGWG

SEQ ID NO: 47450 - protein, 1359 aa, Homo sapiens
MKTKETSNNVPAIMSSLWKKLDHTLSQIRSMQSSPRFAGSQRARTRTGIAEIKRQRKLASQTAPASAELLTLPYLSGQFTTPPSTGTQVTRPSGQISDPSRSYFVVVNHSQSQDTVTTGEALNVIPGAQEKKAHASLMSPGRRKSESQRKSTTLSGPHSTIRNFQDPNAFAVEKQMVIENAREKILSNKSLQEKLAENINKFLTSDNNIAQVPKQTDNNPTEPETSIDEFLGLPSEIHMSEEAIQDILEQTESDPAFQALFDLFDYGKTKNNKNISQSISSQPMESNPSIVLADETNLAVKGSFETEESDGQSGQPAFCTSYQNDDPLNALKNSNNHDVLRQEDQENFSQISTSIQKKAFKTAVPTEQKCDIDITFESVPNLNDFNQRGNSNAECNPHCAELYTNQMSTETEMAIGIEKNSLSSNVPSESQLQPDQPDIPITSFVSLGCEANNENLILSGKSSQLLSQDTSLTGKPSKKSQFCENSNDTVKLKINFHGSKSSDSSEVHKSKIEINVLEPVMSQLSNCQDNSCLQSEILPVSVESSHLNVSGQVEIHLGDSLSSTKQPSNDSASVELNHTENEAQASKSENSQEPSSSVKEENTIFLSLGGNANCEKVALTPPEGTPVENSHSLPPESVCSSVGDSHPESQNTDDKPSSNNSAEIDASNIVSLKVIISDDPFVSSDTELTSAVSSINGENLPTIILSSPTKSPTKNAELVKCLSSEETVGAVVYAEVGDSASMEQSLLTFKSEDSAVNNTQNEDGIAFSANVTPCVSKDGGYIQLMPATSTAFGNSNNILIATCVTDPTALGTSVSQSNVVVLPGNSAPMTAQPLPPQLQTPPRSNSVFAVNQAVSPNFSQGSAIIIASPVQPVLQGMVGMIPVSVVGQNGNNFSTPPRQVLHMPLTAPVCNRSIPQFPVPPKSQKAQGLRNKPCIGKQVNNLVDSSGHSVGCHAQKTEVSDKSIATDLGKKSEETTVPFPEESIVPAAKPCHRRVLCFDSTTAPVANTQGPNHKMVSQNKERNAVSFPNLDSPNVSSTLKPPSNNAIKREKEKPPLPKILSKSESAISRHTTIRETQSEKKVSPTEIVLESFHKATANKENELCSDVERQKNPENSKLSIGQQNGGLRSEKSIASLQEMTKKQGTSSNNKNVLSVGTAVKDLKQEQTKSASSLITTEMLQDIQRHSSVSRLADSSDLPVPRTPGSGAGEKHKEEPIDIIKAPSSRRFSEDSSTSKVMVPPVTPDLPACSPASETGSENSVNMAAHTLMILSRAAISRTTSATPLKDNTQQFRASSRSTTKKRKIEELDERERNSRPSSKNLTNSSIPMKKKKIKKKKLPSSFPAGMDVDKFLLSLHYDE

SEQ ID NO: 47451 - protein, 572 aa, Homo sapiens
MDAELEFAIQPNTTGKQLFDQVVKTVGLREVWFFGLQYVDSKGYSTWLKLNKKVTQQDVKKENPLQFKFRAKFFPEDVSEELIQEITQRLFFLQVKEAILNDEIYCPPETAVLLASYAVQAKYGDYNKEIHKPGYLANDRLLPQRVLEQHKLTKEQWEERIQNWHEEHRGMLREDSMMEYLKIAQDLEMYGVNYFEIKNKKGTELWLGVDALGLNIYEHDDKLTPKIGFPWSEIRNISFNDKKFVIKPIDKKAPDFVFYAPRLRINKRILALCMGNHELYMRRRKPDTIEVQQMKAQAREEKHQKQLERAQLENEKKKREIAEKEKERIEREKEELMERLKQIEEQTIKAQKELEEQTRKALELDQERKRAKEEAERLEKERRAAEEAKSAIAKQAADQMKNQEQLAAELAEFTAKIALLEEAKKKKEEEATEWQHKAFAAQEDLEKTKEELKTVMSAPPPPPPPPVIPPTENEHDEHDENNAEASAELSNEGVMNHRSEEERVTETQKNERVKKQLQALSSELAQARDETKKTQNDVLHAENVKAGRDKYKTLRQIRQGNTKQRIDEFEAM

SEQ ID NO: 47452 - protein, 854 aa, Homo sapiens
MLDHPHIIKLYQVMETKSMLYLVTEYAKNGEIFDYLANHGRLNESEARRKFWQILSAVDYCHGRKIVHRDLKAENLLLDNNMNIKIADFGFGNFFKSGELLATWCGSPPYAAPEVFEGQQYEGPQLDIWSMGVVLYVLVCGALPFDGPTLPILRQRVLEGRFRIPYFMSEDCEHLIRRMLVLDPSKRLTIAQIKEHKWMLIEVPVQRPVLYPQEQENEPSIGEFNEQVLRLMHSLGIDQQKTIESLQNKSYNHFAAIYFLLVERLKSHRSSFPVEQRLDGRQRRPSTIAEQTVAKAQTVGLPVTMHSPNMRLLRSALLPQASNVEAFSFPASGCQAEAAFMEEECVDTPKVNGCLLDPVPPVLVRKGCQSLPSNMMETSIDEGLETEGEAEEDPAHAFEAFQSTRSGQRRHTLSEVTNQLVVMPGAGKIFSMNDSPSLDSVDSEYDMGSVQRDLNFLEDNPSLKDIMLANQPSPRMTSPFISLRPTNPAMQALSSQKREVHNRSPVSFREGRRASDTSLTQGIVAFRQHLQNLARTKGILELNKVQLLYEQIGPEADPNLAPAAPQLQDLASSCPQEEVSQQQESVSTLPASVHPQLSPRQSLETQYLQHRLQKPSLLSKAQNTCQLYCKEPPRSLEQQLQEHRLQQKRLFLQKQSQLQAYFNQMQIAESSYPQPSQQLPLPRQETPPPSQQAPPFSLTQPLSPVLEPSSEQMQYSPFLSQYQEMQLQPLPSTSGPRAAPPLPTQLQQQQPPPPPPPPPPRQPGAAPAPLQFSYQTCELPSAASPAPDYPTPCQYPVDGAQQSDLTGPDCPRSPGLQEAPSSYDPLALSELPGLFDCEMLDAVDPQHNGYVLVN

SEQ ID NO: 47453 - protein, 107 aa, Homo sapiens
MNDQNLEEPSRYIDISKCHYLVDLDTMRETPREPKYSSNKEEWISLAYRPFLDASRSSKLLRAFYVPFLSDQYTVYVNYTILKPRKAKQIRKKSGDRRRAEPTYRKN

SEQ ID NO: 47454 - protein, 81 aa, Homo sapiens
MGNWNQERYDLRNIVQPKPLPSQFGHYFETTYDTSYNNKMPLSTHRFKREPHWFPGHQPELDPPRYKCTEKSTYMNSYSKP

SEQ ID NO: 47455 - protein, 545 aa, Homo sapiens [sequence omitted]

SEQ ID NO: 47456 - protein, 246 aa, Homo sapiens
MASKPATTIRWFKGNTELKGKSEVEEWSDMYTVTSQLMLKVHKEDDGVPVICQVEHPAVTGNLQTQRYLEVQYKPQVHIQMTYPLQGLTREGDALELTCEAIGKPQPVMVTWVRVDDEMPQHAVLSGPNLFINNLNKTDNGTYRCEASNIVGKAHSDYMLYVYDSRAGEEGSIRAVDHAVIGGVVAVVVFAMLCLLIILGRYFARHKGTYFTHEAKGADDAADADTAIINAEGGQNNSEEKKEYFI

SEQ ID NO: 47457 - protein, 408 aa, Homo sapiens
MNCYCNGMTRLLLTKIPFFREIIVSSFSCEHCGWNNTEIQSAGRIQDQGVRYTLSVRALEDMNREVVKTDSAATRIPELDFEIPAFSQKGALTTVEGLITRAISGLEQDQPARRANKDATAERIDEFIVKLKELKQVASPFTLIIDDPSGNSFVENPHAPQKDDALVITHYNRTRQQEEMLGLQEEAPAEKPEEEDLRNEVLQFSTNCPECNAPAQTNMKLVQIPHFKEVIIMATNCENCGHRTNEVKSGGAVEPLGTRITLHITDASDMTRDLLKSETCSVEIPELEFELGMAVLGGKFTTLEGLLKDIRELVTKNPFTLGDSSNPGQTERLQEFSQKMDQIIEGNMKAHFIMDDPAGNSYLQNVYAPEDDPEMKVERYKRTFDQNEELGLNDMKTEGYEAGLAPQR

SEQ ID NO: 47458 - protein, 1253 aa, Homo sapiens
MKMLCHPHIIRLYQVMETERMIYLVTEYASGGEIFDHLVAHGRMAEKEARRKFKQIVTAVYFCHCRNIVHRDLKAENLLLDANLNIKIADFGFSNLFTPGQLLKTWCGSPPYAAPELFEGKEYDGPKVDIWSLGVVLYVLVCGALPFDGSTLQNLRARVLSGKFRIPFFMSTECEHLIRHMLVLDPNKRLSMEQICKHKWMKLGDADPNFDRLIAECQQLKEERQVDPLNEDVLLAMEDMGLDKEQTLQSLRSDAYDHYSAIYSLLCDRHKRHKTLRLGALPSMPRALAFQAPVNIQAEQAGTAMNISVPQVQLINPENQIVEPDGTLNLDSDEGEEPSPEALVRYLSMRRHTVGVADPRTEVMEDLQKLLPGFPGVNPQAPFLQVAPNVNFMHNLLPMQNLQPTGQLEYKEQSLLQPPTLQLLNGMGPLGRRASDGGANIQLHAQQLLKRPRGPSPLVTMTPAVPAVTPVDEESSDGEPDQEAVQRYLANRSKRHTLAMTNPTAEIPPDLQRQLGQQPFRSRVWPPHLVPDQHRSTYKDSNTLHLPTERFSPVRRFSDGAASIQAFKAHLEKMGNNSSIKQLQQECEQLQKMYGGQIDERTLEKTQQQHMLYQQEQHHQILQQQIQDSICPPQPSPPLQAACENQPALLTHQLQRLRIQPSSPPPNHPNNHLFRQPSNSPPPMSSAMIQPHGAASSSQFQGLPSRSAIFQQQPENCSSPPNVALTCLGMQQPAQSQQVTIQVQEPVDMLSNMPGTAAGSSGRGISISPSAGQMQMQHRTNLMATLSYGHRPLSKQLSADSAEAHSLNVNRFSPANYDQAHLHPHLFSDQSRGSPSSYSPSTGVGFSPTQALKVPPLDQFPTFPPSAHQQPPHYTTSALQQALLSPTPPDYTRHQQVPHILQGLLSPRHSLTGHSDIRLPPTEFAQLIKRQQQQRQQQQQQQQQQEYQELFRHMNQGDAGSLAPSLGGQSMTERQALSYQNADSYHHHTSPQHLLQIRAQECVSQASSPTPPHGYAHQPALMHSESMEEDCSCEGAKDGFQDSKSSSTLTKGCHDSPLLLSTGGPGDPESLLGTVSHAQELGIHPYGHQPTAAFSKNKVPSREPVIGNCMDRSSPGQAVELPDHNGLGYPARPSVHEHHRPRALQRHHTIQNSDDAYVQLDNLPGMSLVAGKALSSARMSDAVLSQSSLMGSQQFQDGENEECGASLGGHEHPDLSDGSQHLNSSCYPSTCITDILLSYKHPEVSFSMEQAGV

SEQ ID NO: 47459 - protein, 754 aa, Homo sapiens
MFQRKYLYQKVERTLCQPPTKNESEIQFFYVDVSTLSPVNTTYQLRVSRMDDFVLRTGEQFSFNTTAAQPQYFKYEFPEGVDSVIVKVTSNKAFPCSVISIQDVLCPVYDLDNNVAFIGMYQTMTKKAAITVQRKDFPSNSFYVVVVVKTEDQACGGSLPFYPFAEDEPVDQGHRQKTLSVLVSQAVTSEAYVSGMLFCLGIFLSFYLLTVLLACWENWRQKKKTLLVAIDRACPESGHPRVLADSFPGSSPYEGYNYGSFENVSGSTDGLVDSAGTGDLSYGYQGHDQFKRRLPSGQMRQLCIAMGRSFEPVGTRPRVDSMSSVEEDDYDTLTDIDSDKNVIRTKQYLYVADLARKDKRVLRKKYQIYFWNIATIAVFYALPVVQLVITYQTVVNVTGNQDICYYNFLCAHPLGNLSAFNNILSNLGYILLGLLFLLIILQREINHNRALLRNDLCALECGIPKHFGLFYAMGTALMMEGLLSACYHVCPNYTNFQFDTSFMYMIAGLCMLKLYQKRHPDINASAYSAYACLAIVIFFSVLGVVFGKGNTAFWIVFSIIHIIATLLLSTQLYYMGRWKLDSGIFRRILHVLYTDCIRQCSGPLYVDRMVLLVMGNVINWSLAAYGLIMRPNDFASYLLAIGICNLLLYFAFYIIMKLRSGERIKLIPLLCIVCTSVVWGFALFFFFQGLSTWQKTPAESREHNRDCILLDFFDDHDIWHFLSSIAMFGSFLVSGPPGRAGWVREGSSCLLLCG

SEQ ID NO: 47460 - protein, 474 aa, Homo sapiens [sequence omitted]

SEQ ID NO: 47461 - protein, 1378 aa, Homo sapiens
MWDHPCDEHYRSLVIQERAKLSTSGAIKKKKKKKEKKDKKDRDPPKSSLALGSSLAPVHVPLGGLAPLRGLVDTPPSALRGSQSVSLGSSVESGRQLGELMLPSQGLKTSAYTKGLLGSIYEDKTALSLLGLGEETNEEDEEESDNQSVHSSSEPLRNLHLDIGALGGDFEYEESLRTSQPEEKKDVSLDSDAAGPPTPCKPSSPGADSSLSSAVGKGRQGSGARPGLPEKEENEKSEPKICRNLVTPKADPTGSEPAKASEKEAPEDTVDAGEEGSRREEAAKEPKKKASALEEGSSDASQELEISEHMKEPQLSDSIASDPKSFHGLDFGFRSRISEHLLDVDVLSPVLGGACRQAQQPLGIEDKDDSQSSQDELQSKQSKGLEERLSPPLPHEERAQSPPRSLATEEEPPQGPEGQPEWKEAEELGEDSAASLSLQLSLQREQAPSPPAACEKGKEQHSQAEELGPGQEEAEDPEEKVAVSPTPPVSPEVRSTEPVAPPEQLSEAALKAMEEAVAQVLEQDQRHLLESKQEKMQQLREKLCQEEEEEILRLHQQKEQSLSSLRERLQKAIEEEEARMREEESQRLSWLRAQVQSSTQADEDQIRAEQEASLQKLREELESQQKAERASLEQKNRQMLEQLKEEIEASEKSEQAALNAAKEKALQQLREQLEGERKEAVATLEKEHSAELERLCSSLEAKHREVVSSLQKKIQEAQQKEEAQLQKCLGQVEHRVHQKSYHVAGYEHELSSLLREKRQEVEGEHERRLDKMKEEHQQVMAKAREQYEAEERKQRAELLGHLTGELERLQRAHERELETVRQEQHKRLEDLRRRHREQERKLQDLELDLETRAKDVKARLALLEVQEETARREKQQLLDVQRQVALKSEEATATHQQLEEAQKEHTHLLQSNQQLREILDELQARKLKLESQVDLLQAQSQQLQKHFSSLEAEAQKKQHLLREVTVEENNASPHFEPDLHIEDLRKSLGTNQTKEVSSSLSQSKEDLYLDSLSSHNVWHLLSAEGVALRSAKEFLVQQTRSMRRRQTALKAAQQHWRHELASAQEVAKDPPGIKALEDMRKNLEKETRHLDEMKSAMRKGHNLLKKKEEKLNQLESSLWEEASDEGTLGGSPTKKAVTFDLSDMDSLSSESSESFSPPHREWWRQQRIDSTPSLTSRKIHGLSHSLRQISSQLSSVLSILDSLNPQSPPPLLASMPAQLPPRDPKSTPTPTYYGSLARFSALSSATPTSTQWAWDSGQGPRLPSSVAQTVDDFLLEKWRKYFPSGIPLLSNSPTPLESRLGYMSASEQLRLLQHSHSQVPEAGSTTFQGIIEANRRWLERVKNDPRLPLFSSTPKPKATLSLLQLGLDEHNRVKVYRF

SEQ ID NO: 47462 - protein, 324 aa, Homo sapiens [sequence omitted]

SEQ ID NO: 47463 - protein, 488 aa, Homo sapiens
MTRTRIEGLLAAFPKLMNTGKQHTFVETESVRYVYQPMEKLYMVLITTKNSNILEDLETLRLFSRVIPEYCRALEENEISEHCFDLIFAFDEIVALGYRENVNLAQIRTFTEMDSHEEKVFRAVRETQEREAKAEMRRKAKELQQARRDAERQGKKAPGFGGFGSSAVSGGSTAAMITETIIETDKPKVAPAPARPSGPSKALKLGAKGKEVDNFVDKLKSEGETIMSSSMGKRTSEATKMHAPPINMESVHMKIEEKITLTCGRDGGLQNMELHGMIMLRISDDKYGRIRLHVENEDKKGVQLQTHPNVDKKLFTAESLIGLKNPEKSFPVNSDVGVLKWRLQTTEESFIPLTINCWPSESGNGCDVNIEYELQEDNLELNDVVITIPLPSGVGAPVIGEIDGEYRHDSRRNTLEWCLPVIDAKNKSGSLEFSIAGQPNDFFPVQVSFVSKKNYCNIQVTKVTQVDGNSPVRFSTETTFLVDKYEIL

SEQ ID NO: 47464 - protein, 1181 aa, Homo sapiens
MDSLVLEEPGAAGKKPAATSPLSPMANGGRYLLSPPTSPGAMSVGSSYENTSPAFSPLSSPASSGSCASHSPSGQEPGPSVPPLVPARSSSYHLALQPPQSRPSGARSESPRLSRKGGHERPPSPGLRGLLTDSPAATVLAEARRATESPRLGGQLPVVAISLSEYPASGALSQPTSIPGSPKFQPPVPAPRNKIGTLQDRPPSPFREPPGSERVLTTSPSRQLVGRTFSDGLATRTLQPPESPRLGRRGLDSMRELPPLSPSLSRRALSPLPTRTTPDPKLNREVAESPRPRRWAAHGASPEDFSLTLGARGRRTRSPSPTLGESLAPHKGSFSGRLSPAYSLGSLTGASPCQSPCVQRKLSSGDLRVPVTRERKNSITEISDNEDDLLEYHRRQRQERLREQEMERLERQRLETILNLCAEYSRADGGPEAGELPSIGEATAALALAGRRPSRGLAGASGRSSEEPGVATQRLWESMERSDEENLKEECSSTESTQQEHEDAPSTKLQGEVLALEEERAQVLGHVEQLKVRVKELEQQLQESAREAEMERALLQGEREAERALLQKEQKAVDQLQEKLVALETGIQKERDKEAEALETETKLFEDLEFQQLERESRVEEERELAGQGLLRSKAELLRSIAKRKERLAILDSQAGQIRAQAVQESERLARDKNASLQLLQKEKEKLTVLERRYHSLTGGRPFPKTTSTLKEMEKLLLPAVDLEQWYQELMAGLGTGPAAASPHSSPPPLPAKASRQLQVYRSKMDGEATSPLPRTRSGPLPSSSGSSSSSSQLSVATLGRSPSPKSALLTQNGTGSLPRNLAATLQDIETKRQLALQQKVESLPAEPLPTDDPAGQQVIEEQRRRLAELKQKAAAEAQCQWDALHGAAPFPAGPSGFPPLMHHSILHHLPAGRERGEEGEHAYDTLSLESSDSMETSISTGGNSACSPDNMSSASGLDMGKIEEMEKMLKEAHAEKNRLMESREREMELRRQALEEERRRREQVERRLQSESARRQQLVEKEVKMREKQFSQARPLTRYLPIRKEDFDLKTHIESSGHGVDTCLHVVLSSKVCRGYLVKMGGKIKSWKKRWFVFDRLKRTLSYYVDKHETKLKGVIYFQAIEEVYYDHLRSAAKSPNPALTFCVKTHDRLYYMVAPSAEAMRIWMDVIVTGAEGYTQFMN

SEQ ID NO: 47465 - protein, 200 aa, Homo sapiens
MVKGLDSYEEKEDKVIKEMAAQIREVEQSRQEVVRSVLEPQAVPDPEEGSSAPRSWKGMNSQVASSLQQPSNLDLPPAPELDWMETGPSLTFIGHQDIPGVGNIHSGATPPWMIQDEEYIAGNQEIGPSYEEFLKEKEKQKLKKLPPDRVGANFDHSSRTSAGWLPSFGRVWNNGRRWQSRHQFKTEAAAMKKQSHTEKS

SEQ ID NO: 47466 - protein, 25 aa, Homo sapiens
MLWGTTSLRTKALQLPGIWLLTSHS

SEQ ID NO: 47467 - protein, 406 aa, Homo sapiens
MSWTPAETNALIAVWGNERLVEARYQQLEGAGTVFGSKAPGPAMYERVSRALAELGYERTPSQCRERIKELESDGSTMEDYSQEDWGNHSQDLHGYPTDQELDEIPVTKRTLKIKQESSEEAQKRDIMQNIVQILESVQLKWELFQSWTDFSRLHLSNKLAIFGIGYNTRWKEDIRYHYAEISSQVPLGKRLREYFNSEKPEGRIIMTRVQKMNWKNVYYKFLEITISEARCLELHMEIDWIPIAHSKPTGGNVVQYLLPGGIPKSPGLYAIGYEECIERPLSPHMEQSSLDPGKEGRVDLETLSAQASLQVEIEPTRIIYCYLGIAEVRTLQQCLFLHFQANTKTFSKDWVGINGFLSQNCIVDPGVSPKSIYIKFVEVERDFLSAGSLVECLEKAIGYPLKFNN

SEQ ID NO: 47468 - protein, 443 aa, Homo sapiens
MTATAQPPSKAQAVHISAPSAAASTPVPSAPIDPQAQLEADKRAVYRHPLFPLLTLLFEKCEQATQGSECITSASFDVDIENFVHQQEQEHKPFFSDDPELDNLMVKAIQVLRIHLLELEKVNELCKDFCNRYITCLKTKMHSDNLLRNDLGGPYSPNQPSINLHSQDLLQNSPNSMSGVSNNPQGIVVPASALQQGNIAMTTVNSQVVSGGALYQPVTMVTSQGQVVTQAIPQGAIQIQNTQVNLDLTSLLDNEDKKSKNKRGVLPKHATNIMRSWLFQHLMHPYPTEDEKRQIAAQTNLTLLQVNNWFINARRRILQPMLDASNPDPAPKAKKIKSQHRPTQRFWPNSIAAGVLQQQGGAPGTNPDGSINLDNLQSLSSDSATMAMQQAMMAAHDDSLDGTEEEDEDEMEEEEEEELEEEVDELQTTNVSDLGLEHSDSLE

SEQ ID NO: 47469 - protein, 334 aa, Homo sapiens [sequence omitted]

SEQ ID NO: 47470 - protein, 435 aa, Homo sapiens
MKRAVDCPENIKKEICINKMLNHENVVKFYGHRREGNIQYLFLEYCSGGELFDRIEPDIGMPEPDAQRFFHQLMAGVVYLHGIGITHRDIKPENLLLDERDNLKISDFGLATVFRYNNRERLLNKMCGTLPYVAPELLKRREFHAEPVDVWSCGIVLTAMLAGELPWDQPSDSCQEYSDWKEKKTYLNPWKKIDSAPLALLHKILVENPSARITIPDIKKDRWYNKPLKKGAKRPRVTSGGVSESPSGFSKHIQSNLDFSPVNSASSEENVKYSSSQPEPRTGLSLWDTSPSYIDKLVQGISFSQPTCPDHMLLNSQLLGTPGSSQNPWQRLVKRMTRFFTKLDADKSYQCLKETCEKLGYQWKKSCMNQVTISTTDRRNNKLIFKVNLLEMDDKILVDFRLSKGDGLEFKRHFLKIKGKLIDIVSSQKIWLPAT

SEQ ID NO: 47471 - protein, 200 aa, Homo sapiens
MKRAVDCPENIKKEICINKMLNHENVVKFYGHRREGNIQYLFLEYCSGGELFDRIEPDIGMPEPDAQRFFHQLMAGVVYLHGIGITHRDIKPENLLLDERDNLKISDFGLATVFRYNNRERLLNKMCGTLPYVAPELLKRREFHAEPVDVWSCGIVLTAMLAGELPWDQPSDSCQEYSDWKEKKTYLNPWKKIDSAPLGN

SEQ ID NO: 47472 - protein, 2047 aa, Homo sapiens
MKSSVHSEEDDFVPELHRNVHPRERPDWEETLSAMARGADVPEIPGDLTLKTCGSTASMKVKHVKKLPFTKGHFPKMAECAHFHYENVEFGSIQLSLSEEQNEVMKNGCESKELVYLVQIACQGKSWIVKRSYEDFRVLDKHLHLCIYDRRFSQLSELPRSDTLKDSPESVTQMLMAYLSRLSAIAGNKINCGPALTWMEIDNKGNHLLVHEESSINTPAVGAAHVIKRYTARAPDELTLEVGDIVSVIDMPPKVLSTWWRGKHGFQVGLFPGHCVELINQKVPQSVTNSVPKPVSKKHGKLITFLRTFMKSRPTKQKLKQRGILKERVFGCDLGEHLLNSGFEVPQVLQSCTAFIERYGIVDGIYRLSGVASNIQRLRHEFDSEHVPDLTKEPYVQDIHSVGSLCKLYFRELPNPLLTYQLYEKFSDAVSAATDEERLIKIHDVIQQLPPPHYRTLEFLMRHLSLLADYCSITNMHAKNLAIVWAPNLLRSKQIESACFSGTAAFMEVRIQSVVVEFILNHVDVLFSGRISMAMQEGAASLSRPKSLLVSSPSTKLLTLEEAQARTQAQVNSPIVTENKYIEVGEGPAALQGKFHTIIEFPLERKRPQNKMKKSPVGSWRSFFNLGKSSSVSKRKLQRNESEPSEMKAMALKGGRAEGTLRSAKSEESLTSLHAVDGDSKLFRPRRPRSSSDALSASFNGEMLGNRCNSYDNLPHDNESEEEGGLLHIPALMSPHSAEDVDLSPPDIGVASLDFDPMSFQCSPPKAESECLESGASFLDSPGYSKDKPSANKKDAETGSSQCQTPGSTASSEPVSPLQEKLSPFFTLDLSPTEDKSSKPSSFTEKVVYAFSPKIGRKLSKSPSMSISEPISVTLPPRVSEVIGTVSNTTAQNASSSTWDKCVEERDATNRSPTQIVKMKTNETVAQEAYESEVQPLDQVAAEEVELPGKEDQSVSSSQSKAVASGQTQTGAVTHDPPQDSVPVSSVSLIPPPPPPKNVARMLALALAESAQQASTQSLKRPGTSQAGYTNYGDIAVATTEDNLSSSYSAVALDKAYFQTDRPAEQFHLQNNAPGNCDHPLPETTATGDPTHSNTTESGEQHHQVDLTGNQPHQAYLSGDPEKARITSVPLDSEKSDDHVSFPEDQSGKNSMPTVSFLDQDQSPPRFYSGDQPPSYLGASVDKLHHPLEFADKSPTPPNLPSDKIYPPSGSPEENTSTATMTYMTTTPATAQMSTKEASWDVAEQPTTADFAAATLQRTHRTNRPLPPPPSQRSAEQPPVVGQVQAATNIGLNNSHKVQGVVPVPERPPEPRAMDDPASAFISDSGAAAAQCPMATAVQPGLPEKVRDGARVPLLHLRAESVPAHPCGFPAPLPPTRMMESKMIAAIHSSSADATSSSNYHSFVTASSTSVDDALPLPLPVPQPKHASQKTVYSSFARPDVTTEPFGPDNCLHFNMTPNCQYRPQSVPPHHNKLEQHQVYGARSEPPASMGLRYNTYVAPGRNASGHHSKPCSRVEYVSSLSSSVRNTCYPEDIPPYPTIRRVQSLHAPPSSMIRSVPISRTEVPPDDEPAYCPRPLYQYKPYQSSQARSDYHVTQLQPYFENGRVHYRYSPYSSSSSSYYSPDGALCDVDAYGTVQLRPLHRLPNRDFAFYNPRLQGKSLYSYAGLAPRPRANVTGYFSPNDHNVVSMPPAADVKHTYTSWDLEDMEKYRMQSIRRESRARQKVKGPVMSQYDNMTPAVQDDLGGIYVIHLRSKSDPGKTGLLSVAEGKESRHAAKAISPEGEDRFYRRHPEAEMDRAHHHGGHGSTQPEKPSLPQKQSSLRSRKLPDMGCSLPEHRAHQEASHRQFCESKNGPPYPQGAGQLDYGSKGIPDTSEPVSYHNSGVKYAASGQESLRLNHKEVRLSKEMERPWVRQPSAPEKHSRDCYKEEEHLTQSIVPPPKPERSHSLKLHHTQNVERDPSVLYQYQPHGKRQSSVTVVSQYDNLEDYHSLPQHQRGVFGGGGMGTYVPPGFPHPQSRTYATALGQGAFLPAELSLQHPETQIHAE

SEQ ID NO: 47473 - protein, 582 aa, Homo sapiens
MPHDNVKVCEEVFGKLRANHMMSPTLIQIDRANPWSACSAAIITDFLDSGHGDCLLDQPSKPISLPEDLPGASYTLSQQCELAFGVGSKPCPYMQYCTKLWCTGKAKGQMVCQTRHFPWADGTSCGEGKLCLKGACVERHNLNKHRVDGSWAKWDPYGPCSRTCGGGVQLARRQCTNPTPANGGKYCEGVRVKYRSCNLEPCPSSASGKSFREEQCEAFNGYNHSTNRLTLAVAWVPKYSGVSPRDKCKLICRANGTGYFYVLAPKVVDGTLCSPDSTSVCVQGKCIKAGCDGNLGSKKRFDKCGVCGGDNKSCKKVTGLFTKPMHGYNFVVAIPAGASSIDIRQRGYKGLIGDDNYLALKNSQGKYLLNGHFVVSAVERDLVVKGSLLRYSGTGTAVESLQASRPILEPLTVEVLSVGKMTPPRVRYSFYLPKEPREDKSSHPKDPRGPSVLHNSVLSLSNQVEQPDDRPPARWVAGSWGPCSASCGSGLQKRAVDCRGSAGQRTVPACDAAHRPVETQACGEPCPTWELSAWSPCSKSCGRGFQRRSLKCVGHGGRLLARDQCNLHRKPQELDFCVLRPC

SEQ ID NO: 47474 - protein, 59 aa, Homo sapiens
MLFELNEPTSSTLLQEVKTTALTPWKGPGAVSEVSNGTSRRAGCVWLLPLLVLHLLLKF

SEQ ID NO: 47475 - protein, 423 aa, Homo sapiens
MAECEAENEDLLKKLELYKEACEGQHKLECDLQQREEEIAELQKALSDMQVCLFQEREHVLRLYSENDRLRIRELEDKKKIQNLLALVGTDAGEVTYFCKEPPHKVTILQKTIQAVGECEQSESSAFKADPKISKRRPSRERKESSEHYQRDIQTLILQVEALQAQLGEQTKLSREQIEGLIEDRRIHLEEIQVQHQRNQNKIKELTKNLHHTQELLYESTKDFLQLRSENQNKEKSWMLEKDNLMSKIKQYRVQCKKKEDKIGKVLPVMHESHHAQSEYIKSLKDKLVQEKKLSNMYQEQCISLEEELARIREEEGMRREIFKDRTNKMGKRLQIMTKRYEALERRRILEVEGFKTDIKVLRQKLKDLEQMLYKATVNARANQDLALLCEVRDSNRRAHKIQGELKNLKSKVFGLENELRLC

SEQ ID NO: 47476 - protein, 2109 aa, Homo sapiens
MNANAAAGLAPEHIPTPGAALSWQAAIDAARQAKLMGSAGNATISTVSSTQRKRQQYGKPKKQGSTTATRPPRALLCLTLKNPIRRACISIVEWKPFEIIILLTIFANCVALAIYIPFPEDDSNATNSNLERVEYLFLIIFTVEAFLKVIAYGLLFHPNAYLRNGWNLLDFIIVVVGLFSAILEQATKADGANALGGKGAGFDVKALRAFRVLRPLRLVSGVPSLQVVLNSIIKAMVPLLHIALLVLFVIIIYAIIGLELFMGKMHKTCYNQEGIADVPAEDDPSPCALETGHGRQCQNGTVCKPGWDGPKHGITNFDNFAFAMLTVFQCITMEGWTDVLYWVNDAVGRDWPWIYFVTLIIIGSFFVLNLVLGVLSGEFSKEREKAKARGDFQKLREKQQLEEDLKGYLDWITQAEDIDPENEDEGMDEEKPRNMSMPTSETESVNTENVAGGDIEGENCGARLAHRISKSKFSRYWRRWNRFCRRKCRAAVKSNVFYWLVIFLVFLNTLTIASEHYNQPNWLTEVQDTANKALLALFTAEMLLKMYSLGLQAYFVSLFNRFDCFVVCGGILETILVETKIMSPLGISVLRCVRLLRIFKITRYWNSLSNLVASLLNSVRSIASLLLLLFLFIIIFSLLGMQLFGGKFNFDEMQTRRSTFDNFPQSLLTVFQILTGEDWNSVMYDGIMAYGGPSFPGMLVCIYFIILFICGNYILLNVFLAIAVDNLADAESLTSAQKEEEEEKERKKLARTASPEKKQELVEKPAVGESKEEKIELKSITADGESPPATKINMDDLQPNENEDKSPYPNPETTGEEDEEEPEMPVGPRPRPLSELHLKEKAVPMPEASAFFIFSSNNRFRLQCHRIVNDTIFTNLILFFILLSSISLAAEDPVQHTSFRNHILFYFDIVFTTIFTIEIALKMTAYGAFLHKGSFCRNYFNILDLLVVSVSLISFGIQSSAINVVKILRVLRVLRPLRAINRAKGLKHVVQCVFVAIRTIGNIVIVTTLLQFMFACIGVQLFKGKLYTCSDSSKQTEAECKGNYITYKDGEVDHPIIQPRSWENSKFDFDNVLAAMMALFTVSTFEGWPELLYRSIDSHTEDKGPIYNYRVEISIFFIIYIIIIAFFMMNIFVGFVIVTFQEQGEQEYKNCELDKNQRQCVEYALKARPLRRYIPKNQHQYKVWYVVNSTYFEYLMFVLILLNTICLAMQHYGQSCLFKIAMNILNMLFTGLFTVEMILKLIAFKPKHYFCDAWNTFDALIVVGSIVDIAITEVNPAEHTQCSPSMNAEENSRISITFFRLFRVMRLVKLLSRGEGIRTLLWTFIKSFQALPYVALLIVMLFFIYAVIGMQVFGKIALNDTTEINRNNNFQTFPQAVLLLFRCATGEAWQDIMLACMPGKKCAPESEPSNSTEGETPCGSSFAVFYFISFYMLCAFLIINLFVAVIMDNFDYLTRDWSILGPHHLDEFKRIWAEYDPEAKGRIKHLDVVTLLRRIQPPLGFGKLCPHRVACKRLVSMNMPLNSDGTVMFNATLFALVRTALRIKTEGNLEQANEELRAIIKKIWKRTSMKLLDQVVPPAGDDEVTVGKFYATFLIQEYFRKFKKRKEQGLVGKPSQRNALSLQAGLRTLHDIGPEIRRAISGDLTAEEELDKAMKEAVSAASEDDIFRRAGGLFGNHVSYYQSDGRSAFPQTFTTQRPLHINKAGSSQGDTESPSHEKLVDSTFTPSSYSSTGSNANINNANNTALGRLPRPAGYPSTVSTVEGHGPPLSPAIRVQEVAWKLSSNRCHSRESQAAMAGQEETSQDETYEVKMNHDTEACSEPSLLSTEMLSYQDDENRQLTLPEEDKRDIRQSPKRGFLRSASLGRRASFHLECLKRQKDRGGDISQKTVLPLHLVHHQALAVAGLSPLLQRSHSPASFPRPFATPPATPGSRGWPPQPVPTLRLEGVESSEKLNSSFPSIHCGSWAETTPGGGGSSAARRVRPVSLMVPSQAGAPGRQFHGSASSLVEAVLISEGLGQFAQDPKFIEVTTQELADACDMTIEEMESAADNILSGGAPQSPNGALLPFVNCRDAGQDRAGGEEDAGCVRARGRPSEEELQDSRVYVSSL

SEQ ID NO: 47477 - protein, 440 aa, Homo sapiens [sequence omitted]

SEQ ID NO: 47478 - protein, 384 aa, Homo sapiens
MLTCVGVGDVCNKGKNLLVAVSAEGWFHLFDLTPAKVLDASGHHETLIGEEQRPVFKQHIPANTKVMLISDIDGDGCRELVVGYTDRVVRAFRWEELGEGPEHLTGQLVSLKKWMLEGQVDSLSVTLGPLGLPELMVSQPGCAYAILLCTWKKDTGSPPASEGPTDGSRETPAARDVVLHQTSGRIHNKNVSTHLIGNIKQGHGTESSGSGLFALCTLDGTLKLMEEMEEADKLLWSVQVDHQLFALEKLDVTGNGHEEVVACAWDGQTYIIDHNRTVVRFQVDENIRAFCAGLYACKEGRNSPCLVYVTFNQKIYVYWEVQLERMESTNLVKLLETKPEYHSLLQELGVDPDDLPVTRALLHQTLYHPDQPPQCAPSSLQDPT

SEQ ID NO: 47479 - protein, 261 aa, Homo sapiens
MLEGQVDSLSVTLGPLGLPELMVSQPGCAYAILLCTWKKDTGSPPASEGPTDGSRETPAARDVVLHQTSGRIHNKNVSTHLIGNIKQGHGTESSGSGLFALCTLDGTLKLMEEMEEADKLLWSVQVDHQLFALEKLDVTGNGHEEVVACAWDGQTYIIDHNRTVVRFQVDENIRAFCAGLYACKEGRNSPCLVYVTFNQKIYVYWEVQLERMESTNLVKLLETKPEYHSLLQELGVGESQKSQWPECPGDPQHAAGAGRGS

SEQ ID NO: 47480 - protein, 420 aa, Homo sapiens [sequence omitted]

SEQ ID NO: 47481 - protein, 657 aa, Homo sapiens
MQRLHKELPLSLEELEDVFDALDADGNGYLTPQEFTTGFSHFFFSQNNPSQEDAGEQVAQRHEEKVYLSRGDEDLGDMGEDEEAQFRMLMDRLGAQKVLEDESDVKQLWLQLKKEEPHLLSNFEDFLTRIISQLQEAHEEKNELECALKRKIAAYDEEIQHLYEEMEQQIKSEKEQFLLKDTERFQARSQELEQKLLCKEQELEQLTQKQKRLEGQCTALHHDKHETKAENTKLKLTNQELARELERTSWELQDAQQQLESLQQEACKLHQEKEMEVYRVTESLQREKAGLLKQLDFLRERNKHLRDERDICFQKNKAAKANTAASRASWKKRSGSVIGKYVDSRGILRSQSEEEEEVFGIPRRSSLGLSGYPLTEEEPGTGEPGPGGPYPRPLRRIISVEEDPLPQLLDGGFEQPLSKCSEEEEVSDQGVQGQIPEAPPLKLTPTSPRGQPVGKEALCKEESSPSAPDRLFKIVFVGNSAVGKTSFLRRFCEDRFSPGMAATVGIDYRVKTLNVDNSQVALQLWDTAGQERYRCITQQFFRKADGVIVMYDLTDKQSFLSVRRWLSSVEEAVGDRVPVLLLGNKLDNEKEREVPRGLGEQLATENNLIFYECSAYSGHNTKESLLHLARFLKEQEDTVREDTIQVGHPAKKKSCCG

SEQ ID NO: 47482 - protein, 178 aa, Homo sapiens
MDRNRIKRIQRIQNLDLWEFFCRKKAQLKKKRGVPQINEQMLFHGTSSEFVEAICIHNFDWRINGIHGAVFGKGTYFARDAAYSSRFCKDDIKHGNTFQIHGVSLQQRHLFRTYKSMFLARVLIGDYINGDSKYMRPPSKDGSYVNLYDSCVDDTWNPKIFVVFDANQIYPEYLIDFH

SEQ ID NO: 47483 - protein, 234 aa, Homo sapiens
MWSLGCITAELYTGYPLFPGENEVEQLACIMEVLGLPPAGFIQTASRRQTFFDSKGFPKNITNNRGKKRYPDSKDLTMVLKTYDTSFLDFLRRCLVWEPSLRMTPDQALKHAWIHQSRNLKPQPRPQTLRKSNSFFPSETRKDKVQGCHHSSRKADEITKETTEKTKDSPTKHVQHSGDQQDCLQHGADTVQLPQLVDAPKKSEAAVGAEVSMTSPGQSKNFSLKNTNVLPPIV

SEQ ID NO: 47484 - protein, 233 aa, Homo sapiens
MWSLGCITAELYTGYPLFPGENEVEQLACIMEVLGLPPAGFIQTASRRQTFFDSKGFPKNITNNRGKKRYPDSKDLTMVLKTYDTSFLDFLRRCLVWEPSLRMTPDQALKHAWIHQSRNLKPQPRPQTLRKSNSFFPSETRKDKVQGCHHSSRKDEITKETTEKTKDSPTKHVQHSGDQQDCLQHGADTVQLPQLVDAPKKSEAAVGAEVSMTSPGQSKNFSLKNTNVLPPIV

SEQ ID NO: 47485 - protein, 347 aa, Homo sapiens
MGQVEISSCTVDRDTVCGCRKNQYRHYWSENLFQCFNCSLCLNGTVHLSCQEKQNTVCTCHAGFFLRENECVSCSNCKKSLECTKLCLPQIENVKGTEDSGTTVLLPLVIFFGLCLLSLLFIGLMYRYQRWKSKLYSIVCGKSTPEKEGELEGTTTKPLAPNPSFSPTPGFTPTLGFSPVPSSTFTSSSTYTPGDCPNFAAPRREVAPPYQGADPILATALASDPIPNPLQKWEDSAHKPQSLDTDDPATLYAVVENVPPLRWKEFVRRLGLSDHEIDRLELQNGRCLREAQYSMLATWRRRTPRREATLELLGRVLRDMDLLGCLEDIEEALCGPAALPPAPSLLR

SEQ ID NO: 47486 - protein, 328 aa, Homo sapiens
MGLEEIAPCTSKRKTQCRCQPGMFCAAWALECTHCELLSDCPPGTEAELKDEVGKGNNHCVPCKAGHFQNTSSPSARCQPHTRCENQGLVEAAPGTAQSDTTCKNPLEPLPPEMSGTMLMLAVLLPLAFFLLLATVFSCIWKSHPSLCRKLGSLLKRRPQGEGPNPVAGSWEPPKAHPYFPDLVQPLLPISGDVSPVSTGLPAAPVLEAGVPQQQSPLDLTREPQLEPGEQSQVAHGTNGIHVTGGSMTITGNIYIYNGPVLGGPPGPGDLPATPEPPYPIPEEGDPGPPGLSTPHQEDGKAWHLAETEHCGATPSNRGPRNQFITHD

SEQ ID NO: 47487 - protein, 496 aa, Homo sapiens
MALRNDLGSNINVLKTLNLRFRCFLAKVHELERRNRLLEKQLQQALEEGKQGRRGLGRRDQAVQTGFVSPIRPLGLQLGARPAAVCSPSARVLGSPARSPAGPLAPSAASLSSSSTSTSTTYSSSARFMPGTIWSFSHARRLGPGLEPTLVQGPGLSWVHPDGVGVQIDTITPEIRALYNVLAKVKRERDEYKRRWEEEYTVRIQLQDRVNELQEEAQEADACQEELALKVEQLKAELVVFKGLMSNNLSELDTKIQEKAMKVDMDICRRIDITAKLCDVAQQRNCEDMIQMFQVPSMGGRKRERKAAVEEDTSLSESEGPRQPDGDEEESTALSINEEMQRMLNQLREYDFEDDCDSLTWEETEETLLLWEDFSGYAMAAAEAQGEQEDSLEKVIKDTESLFKTREKEYQETIDQIELELATAKNDMNRHLHEYMEMCSMKRGLDVQMETCRRLITQSGDRKSPAFTAVPLSDPPPPPSEAEDSDRDVSSDSSMR

SEQ ID NO: 47488 - protein, 1893 aa, Homo sapiens [sequence omitted]

SEQ ID NO: 47489 - protein, 1880 aa, Homo sapiens
MDALLNNSLPPPHPENEEDPEEDLSETETPKLKKKKKPKKPRDPKIPKSKRQKKERMLLCRQLGDSSGEGPEFVEEEEEVALRSDSEGSDYTPGKKKKKKLGPKKEKKSKSKRKEEEEEEDDDDDSKEPKSSAQLLEDWGMEDIDHVFSEEDYRTLTNYKAFSQFVRPLIAAKNPKIAVSKMMMVLGAKWREFSTNNPFKGSSGASVAAAAAAAVAVVESMVTATEVAPPPPPVEVPIRKAKTKEGKGPNARRKPKGSPRVPDAKKPKPKKVAPLKIKLGGFGSKRKRSSSEDDDLDVESDFDDASINSYSVSDGSTSRSSRSRKKLRTTKKKKKDHQDYCEVCQQGGEIILCDTCPRAYHMVCLDPDMEKAPEGKWSCPHCEKEGIQWEAKEDNSEGEEILEEVGGDLEEEDDHHMEFCRVCKDGGELLCCDTCPSSYHIHCLNPPLPEIPNGEWLCPRCTCPALKGKVQKILIWKWGQPPSPTPVPRPPDADPNTPSPKPLEGRPERQFFVKWQGMSYWHCSWVSELQLELHCQVMFRNYQRKNDMDEPPSGDFGGDEEKSRKRKNKDPKFAEMEERFYRYGIKPEWMMIHRILNHSVDKKGHVHYLIKWRDLPYDQASWESEDVEIQDYDLFKQSYWNHRELMRGEEGRPGKKLKKVKLRKLERPPETPTVDPTVKYERQPEYLDATGGTLHPYQMEGLNWLRFSWAQGTDTILADEMGLGKTVQTAVFLYSLYKEGHSKGPFLVSAPLSTIINWEREFEMWAPDMYVVTYVGDKDSRAIIRENEFSFEDNAIRGGKKASRMKKEASVKFHVLLTSYELITIDMAILGSIDWACLIVDEAHRLKNNQSKFFRVLNGYSLQHKLLLTGTPLQNNLEELFHLLNFLTPERFHNLEGFLEEFADIAKEDQIKKLHDMLGPHMLRRLKADVFKNMPSKTELIVRVELSPMQKKYYKYILTRNFEALNARGGGNQVSLLNVVMDLKKCCNHPYLFPVAAMEAPKMPNGMYDGSALIRASGKLLLLQKMLKNLKEGGHRVLIFSQMTKMLDLLEDFLEHEGYKYERIDGGITGNMRQEAIDRFNAPGAQQFCFLLSTRAGGLGINLATADTVIIYDSDWNPHNDIQAFSRAHRIGQNKKVMIYRFVTRASVEERITQVAKKKMMLTHLVVRPGLGSKTGSMSKQELDDILKFGTEELFKDEATDGGGDNKEGEDSSVIHYDDKAIERLLDRNQDETEDTELQGMNEYLSSFKVAQYVVREEEMGEEEEVEREIIKQEESVDPDYWEKLLRHHYEQQQEDLARNLGKGKRIRKQVNYNDGSQEDRDWQDDQSDNQSDYSVASEEGDEDFDERSEAPRRPSRKGLRNDKDKPLPPLLARVGGNIEVLGFNARQRKAFLNAIMRYGMPPQDAFTTQWLVRDLRGKSEKEFKAYVSLFMRHLCEPGADGAETFADGVPREGLSRQHVLTRIGVMSLIRKKVQEFEHVNGRWSMPELAEVEENKKMSQPGSPSPKTPTPSTPGDTQPNTPAPVPPAEDGIKIEENSLKEEESIEGEKEVKSTAPETAIECTQAPAPASEDEKVVVEPPEGEEKVEKAEVKERTEEPMETEPKGAADVEKVEEKSAIDLTPIVVEDKEEKKEEEEKKEVMLQNGETPKDLNDEKQKKNIKQRFMFNIADGGFTELHSLWQNEERAATVTKKTYEIWHRRHDYWLLAGIINHGYARWQDIQNDPRYAILNEPFKGEMNRGNFLEIKNKFLARRFKLLEQALVIEEQLRRAAYLNMSEDPSHPSMALNTRFAEVECLAESHQHLSKESMAGNKPANAVLHKVLKQLEELLSDMKADVTRLPATIARIPPVAVRLQMSERNILSRLANRAPEPTPQQVAQQQ

SEQ ID NO: 47490 - protein, 490 aa, Homo sapiens
MFINKMKDQLLPEKGCGLAPPHYPTLLTVPASVSLPSGISMDTESKSDQLTPHSQASVTQNITVVPVPSTGLMTAGVSCSQRWRREGSQSRGPGLVITSPSGSLVTTASSAQTFPISAPMIVSALPPGSQALQVVPDLSKKVASTLTEEGGGGGGGGGSVAPKPPRGRKKKRMLESGLPEMNDPYVLSPEDDDDHQKDGKTYRCRMCSLTFYSKSEMQIHSKSHTETKPHKCPHCSKTFANSSYLAQHIRIHSGAKPYSCNFCEKSFRQLSHLQQHTRIHTGDRPYKCAHPGCEKAFTQLSNLQSHRRQHNKDKPFKCHNCHRAYTDAASLEVHLSTHTVKHAKVYTCTICSRAYTSETYLMKHMRKHNPPDLQQQVQAAAAAAAVAQAQAQAQAQAQAQAQAQAQAQASQASQQQQQQQQQQQQQQQQPPPHFQSPGAAPQGGGGGDSNPNPPPQCSFDLTPYKTAEHHKDICLTVTTSTIQVEHLASS

SEQ ID NO: 47491 - protein, 551 aa, Homo sapiens
MFINKMKDQLLPEKGCGLAPPHYPTLLTVPASVSLPSGISMDTESKSDQLTPHSQASVTQNITVVPVPSTGLMTAGVSCSQRWRREGSQSRGPGLVITSPSGSLVTTASSAQTFPISAPMIVSALPPGSQALQVVPDLSKKVASTLTEEGGGGGGGGGSVAPKPPRGRKKKRMLESGLPEMNDPYVLSPEDDDDHQKDGKTYRCRMCSLTFYSKSEMQIHSKSHTETKPHKCPHCSKTFANSSYLAQHIRIHSGAKPYSCNFCEKSFRQLSHLQQHTRIHSKMHTETIKPHKCPHCSKTFANTSYLAQHLRIHSGAKPYNCSYCQKAFRQLSHLQQHTRIHTGDRPYKCAHPGCEKAFTQLSNLQSHRRQHNKDKPFKCHNCHRAYTDAASLEVHLSTHTVKHAKVYTCTICSRAYTSETYLMKHMRKHNPPDLQQQVQAAAAAAAVAQAQAQAQAQAQAQAQAQAQAQASQASQQQQQQQQQQQQQQQQPPPHFQSPGAAPQGGGGGDSNPNPPPQCSFDLTPYKTAEHHKDICLTVTTSTIQVEHLASS

SEQ ID NO: 47492 - protein, 235 aa, Homo sapiens [sequence omitted]

SEQ ID NO: 47493 - protein, 29 aa, Homo sapiens
MEHLGTSFKDPDPWTPAALIPEALREKLR

SEQ ID NO: 47494 - protein, 281 aa, Homo sapiens
MGTALKLLLGAGAVAYGVRESVFTVEGGHRAIFFNRIGGVQQDTILAEGLHFRIPWFQYPIIYDIRARPRKISSPTGSKDLQMVNISLRVLSRPNAQELPSMYQRLGLDYEERVLPSIVNEVLKSVVAKFNASQLITQRAQVSLLIRRELTERAKDFSLILDDVAITELSFSREYTAAVEAKQVAQQEAQRAQFLVEKAKQEQRQKIVQAEGEAEAAKMLGEALSKNPGYIKLRKIRAAQNISKTIATSQNRIYLTADNLVLNLQDESFTRGSDSLIKGKK

SEQ ID NO: 47495 - protein, 637 aa, Homo sapiens
MKLAGHFTQDKALRQEGLRPGPWPPGAPASEAVSVLEVESPGAASEAASKPLGVASEDELVAEFLQDQNAPLVSRAPQTFKMDDLLAEMQQIEQSNFRQAPQRAPGVADLALSENWAQEFLAAGDAVDVTQDYNETDWSQEFISEVTDPLSVSPARWAEEYLEQSEEKLWLGEPEGTATDRWYDEYHPEEDLQHTASDFVAKVDDPKLANSEFLKFVRQIGEGQVSLESGAGSGRAQAEQWAAEFIQQQGTSDAWVDQFTRPVNTSALDMEFERAKSAIESDVDFWDKLQAELEEMAKRDAEAHPWLSDYDDLTSATYDKGYQFEEENPLRDHPQPFEEGLRRLQEGDLPNAVLLFEAAVQQDPKHMEAWQYLGTTQAENEQELLAISALRRCLELKPDNQTALMALAVSFTNESLQRQACETLRDWLRYTPAYAHLVTPAEEGAGGAGLGPSKRILGSLLSDSLFLEVKELFLAAVRLDPTSIDPDVQCGLGVLFNLSGEYDKAVDCFTAALSVRPNDYLLWNKLGATLANGNQSEEAVAAYRRALELQPGYIRSRYNLGISCINLGAHREAVEHFLEALNMQRKSRGPRGEGGAMSENIWSTLRLALSMLGQSDAYGAADARDLSTLLTMFGLPQ

SEQ ID NO: 47496 - protein, 106 aa, Homo sapiens [sequence omitted]

SEQ ID NO: 47497 - protein, 1462 aa, Homo sapiens
MYWTDWGEVPKIERAGMDGSSRFIIINSEIYWPNGLTLDYEEQKLYWADAKLNFIHKSNLDGTNRQAVVKGSLPHPFALTLFEDILYWTDWSTHSILACNKYTGEGLREIHSDIFSPMDIHAFSQQRQPNATNPCGIDNGGCSHLCLMSPVKPFYQCACPTGVKLLENGKTCKDGATELLLLARRTDLRRISLDTPDFTDIVLQLEDIRHAIAIDYDPVEGYIYWTDDEVRAIRRSFIDGSGSQFVVTAQIAHPDGIAVDWVARNLYWTDTGTDRIEVTRLNGTMRKILISEDLEEPRAIVLDPMVGYMYWTDWGEIPKIERAALDGSDRVVLVNTSLGWPNGLALDYDEGKIYWGDAKTDKIEVMNTDGTGRRVLVEDKIPHIFGFTLLGDYVYWTDWQRRSIERVHKRSAEREVIIDQLPDLMGLKATNVHRVIGSNPCAEENGGCSHLCLYRPQGLRCACPIGFELISDMKTCIVPEAFLLFSRRADIRRISLETNNNNVAIPLTGVKEASALDFDVTDNRIYWTDISLKTISRAFMNGSALEHVVEFGLDYPEGMAVDWLGKNLYWADTGTNRIEVSKLDGQHRQVLVWKDLDSPRALALDPAEGFMYWTEWGGKPKIDRAAMDGSERTTLVPNVGRANGLTIDYAKRRLYWTDLDTNLIESSNMLGLNREVIADDLPHPFGLTQYQDYIYWTDWSRRSIERANKTSGQNRTIIQGHLDYVMDILVFHSSRQSGWNECASSNGHCSHLCLAVPVGGFVCGCPAHYSLNADNRTCSAPTTFLLFSQKSAINRMVIDEQQSPDIILPIHSLRNVRAIDYDPLDKQLYWIDSRQNMIRKAQEDGSQGFTVVVSSVPSQNLEIQPYDLSIDIYSRYIYWTCEATNVINVTRLDGRSVGVVLKGEQDRPRAVVVNPEKGYMYFTNLQERSPKIERAALDGTEREVLFFSGLSKPIALALDSRLGKLFWADSDLRRIESSDLSGANRIVLEDSNILQPVGLTVFENWLYWIDKQQQMIEKIDMTGREGRTKVQARIAQLSDIHAVKELNLQEYRQHPCAQDNGGCSHICLVKGDGTTRCSCPMHLVLLQDELSCGEPPTCSPQQFTCFTGEIDCIPVAWRCDGFTECEDHSDELNCPVCSESQFQCASGQCIDGALRCNGDANCQDKSDEKNCEVLCLIDQFRCANGQCIGKHKKCDHNVDCSDKSDELDCYPTEEPAPQATNTVGSVIGVIVTIFVSGTVYFICQRMLCPRMKGDGETMTNDYVVHGPASVPLGYVPHPSSLSGSLPGMSRGKSMISSLSIMGGSSGPPYDRAHVTGASSSSSSSTKGTYFPAILNPPPSPATERSHYTMEFGYSSNSPSTHRSYSYRPYSYRHFAPPTTPCSTDVCDSDYAPSRRMTSVATAKGYTSDLNYDSEPVPPPPTPRSQYLSAEENYESCPPSPYTERSYSHHLYPPPPSPCTDSS

SEQ ID NO: 47498 - protein, 47 aa, Homo sapiens [sequence omitted]

SEQ ID NO: 47499 - protein, 415 aa, Homo sapiens
MEKQDKWTRKNIKEYKTDSFWRHTGYVMAQIDGLYVGAKKRAILEGTKPMTLFQIQFLNSVGDLLDLIPSLSPTKNGSLKVFKRWDMGHCSALIKVLPGFENILFAHSSWYTYAAMLRIYKHWDFNVIDKDTSSSRLSFSSYPGFLESLDDFYILSSGLILLQTTNSVFNKTLLKQVIPETLLSWQRVRVANMMADSGKRWADIFSKYNSGTYNNQYMVLDLKKVKLNHSLDKGTLYIVEQIPTYVEYSEQTDVLRKGYWPSYNVPFHEKIYNWSGYPLLVQKLGLDYSYDLAPRAKIFRRDQGKVTDTASMKYIMRYNNYKKDPYSRGDPCNTICCREDLNSPNPSPGGCYDTKVADIYLASQYTSYAISGPTVQGGLPVFRWDRFNKTLHQGMPEVYNFDFITMKPILKLDIK

SEQ ID NO: 47500 - protein, 603 aa, Homo sapiens
MVRAAVLKMKDPKQIIRDMEKLDEMEFNPVQQPQLNEKVLKDKRKKLRETFERILRLYEKENPDIYKELRKLEVEYEQKRAQLSQYFDAVKNAQHVEVESIPLPDMPHAPSNILIQDIPLPGAQPPSILKKTSAYGPPTRAVSILPLLGHGVPRLPPGRKPPGPPPGPPPPQVVQMYGRKVGFALDLPPRRRDEDMLYSPELAQRGHDDDVSSTSEDDGYPEDMDQDKHDDSTDDSDTDKSDGESDGDEFVHRDNGERDNNEEKKSGLSVRFADMPGKSRKKKKNMKELTPLQAMMLRMAGQEIPEEGREVEEFSEDDDEDDSDDSEAEKQSQKQHKEESHSDGTSTASSQQQAPPQSVPPSQIQAPPMPGPPPLGPPPAPPLRPPGPPTGLPPGPPPGAPPFLRPPGMPGLRGPLPRLLPPGPPPGRPPGPPPGPPPGLPPGPPPRGPPPRLPPPAPPGIPPPRPGMMRPPLVPPLGPAPPGLFPPAPLPNPGVLSAPPNLIQRPKADDTSAATIEKKATATISAKPQITNPKAEITRFVPTALRVRRENKGATAAPQRKSEDDSAVPLAKAAPKSGPSVPVSVQTKDDVYEAFMKEMEGLL

SEQ ID NO: 47501 - protein, 78 aa, Homo sapiens
MESYELNPFINRRNANTFISPQQRWRAKVQERIRERSKPVHELNREACDDYRLCERYAMVYGYNAAYNRYFRKRRGTK

SEQ ID NO: 47502 - protein, 510 aa, Homo sapiens
MADLEELSRLSPLPPGSPGSAARGRAEPPEEEEEEEEEEEEAEAEAVAALLLNGGSGGGGGGGGGGVGGGEAETMSEPSPESASQAGEDEDEEEDDEEEEDESSSSGGGEEESSAESLVGSSGGSSSDETRSLSPGAASSSSGDGDGKEGLEEPKGPRGSQGGGGGGSSSSSVVSSGGDEGYGTGGGGSSATSGGRRGSLEMSSDGEPLSRMDSEDSISSTIMDVDSTISSGRSTPAMMNGQGSTTSSSKNIAYNCCWDQCQACFNSSPDLADHIRSIHVDGQRGGVFVCLWKGCKVYNTPSTSQSWLQRHMLTHSGDKPFKCVVGGCNASFASQGGLARHVPTHFSQQNSSKVSSQPKAKEESPSKAGMNKRRKLKNKRRRSLPRPHDFFDAQTLDAIRHRAICFNLSAHIESLGKGHSVVFHSTVIAKRKEDSGKIKLLLHWMPEDILPDVWVNESERHQLKTKVVHLSKLPKDTALLLDPNIYRTMPQKRLKRTLIRKVFNLYLSKQ

SEQ ID NO: 47503 - protein, 638 aa, Homo sapiens
MDRASDLTDAFVEVKFGNTTFKTDVYLKSLNPQWNSEWFKFEVDDEDLQDEPLQITVLDHDTYSANDAIGKVYIDIDPLLYSEAATVISGWFPIYDTIHGIRGEINVVVKVDLFNDLNRFRQSSCGVKFFCTTSIPKCYRAVIIHGFVEELVVNEDPEYQWIDRIRTPRASNEARQRLISLMSGELQRKIGLKVLEMRGNAVVGYLQCFDLEGESGLVVRAIGTACTLDKLSSPAAFLPACNSPSKEMKESPLVHPPSHGCRSTHNSPIHTATGSRLTQNFSVSVPTLIYTGMGSGSAGKEGGPFKALLRQQTQSALEQRGGSPHRFCRRREFPFFTLTAFPPGFLVHVGGVVSARSVKLLDRIHNPDEPETRDAWWAEIRQEIKSHAKALGCHAVVGYSESTSICEEVCILSASGTAAVLNPRFLQDGTVEGCLEQRLEENLPTRCGFCHIPYDELNMPFPAHLTYCYNCRKQKVPDVLFTTIDLPTDATVIGKGCLIQARLCRLKKKAQAEANATAISNLLPFMEYEVHTQLMNKLKLKGMNALFGLRIQITVGENMLMGLASATGVYLAALPTPGGIQIAGKTPNDGSYEQHISHMQKKINDTIAKNKELYEINPPVSKTNLHCECISYCLLVYF

SEQ ID NO: 47504 - protein, 122 aa, Homo sapiens
MRDQYMRTGEGFLCVFAINNTKSFEDIHHYREQIKRVKDSEDVPMVLVGNKCDLPSRTVDTKQAQDLARSYGIPFIETSAKTRQGVDDAFYTLVREIRKHKEKMSKDGKKKKKKSKTKCVIM

SEQ ID NO: 47505 - protein, 32 aa, Homo sapiens
MLLEKIQSALADIAQSQLKTRSGTHSQSLPDS

SEQ ID NO: 47506 - protein, 334 aa, Homo sapiens [sequence omitted]

SEQ ID NO: 47507 - protein, 862 aa, Homo sapiens
MAENTSHKSYRPLCVLTFKLNIFLTGMNPFYFHAVNIILHCLVTLVLMYTCDKTVFKNRGLAFVTALLFAVHPIHTEAVAGIVGRADVLACLLFLLAFLSYNRSLDQGCVGGSFPSTVSPFFLLLSLFLGTCAMLVKETGITVFGVCLVYDLFSLSNKQDKSSNGALCPRSPQQPGSPQPSSLPGHPHRENGKQQRFPHKGAWGGCHSPLPPEPKSSGFPVSPRAVWSMMRYLRASSNRNFLLTMRPFLKRAILVLSYVLVILYFRLWIMGGSMPLFSEQDNPASFSPYILTRFLTYSYLLAFNVWLLLAPVTLCYDWQVGSIPLVETIWDMRNLATIFLAVVMALLSLHCLAAFKRLEHKEVLVGLLFLVFPFIPASNLFFRVGFVVAERVLYMPSMGYCILFVHGLSKLCTWLNRCGATTLIVSTVLLLLLFSWKTVKQNEIWLSRESLFRSGVQTLPHNAKVHYNYANFLKDQGRNKEAIYHYRTALKLYPRHASALNNLGTLTRDTAEAKMYYQRALQLHPQHNRALFNLGNLLKSQEKKEEAITLLKDSIKYGPEFADAYSSLASLLAEQERFKEAEEIYQTGIKNCPDSSDLHNNYGVFLVDTGLPEKAVAHYQQAIKLSPSHHVAMVNLGRLYRSLGENSMAEEWYKRALQVAHKAEILSPLGALYYNTGRYEEALQIYQEAAALQPSQRELRLALAQVLAVMGQTKEAEKMTNHIVSEETGCLECYRLLSAIYSKQENHDKALDAIDKALQLKPKDPKVISELFFTKGNQLREQNLLDKAFESYRVAVQLNPDQAQAWMNMGGIQHIKGKYVSARAYYERALQLVPDSKLLKENLAKLDRLEKRLQEVREKDQT

SEQ ID NO: 47508 - protein, 996 aa, Homo sapiens
MKSAKPQVNHSQHGESQRALSPLQSTLSSAASPSQAYETYIENGLICLKHKIRNIEKKKLKLEDYKDRLKSGEHLNPDQLEAVEKYEEVLHNLEFAKELQKTFSGLSLDLLKAQKKAQRREHMLKLEAEKKKLRTILQVQYVLQNLTQEHVQKDFKGGLNGAVYLPSKELDYLIKFSKLTCPERNESLSVEDQMEQSSLYFWDLLEGSEKAVVGTTYKHLKDLLSKLLNSGYFESIPVPKNAKEKEVPLEEEMLIQSEKKTQLSKTESVKESESLMEFAQPEIQPQEFLNRRYMTEVDYSNKQGEEQPWEADYARKPNLPKRWDMLTEPDGQEKKQESFKSWEASGKHQEVSKPAVSLEQRKQDTSKLRSTLPEEQKKQEISKSKPSPSQWKQDTPKSKAGYVQEEQKKQETPKLWPVQLQKEQDPKKQTPKSWTPSMQSEQNTTKSWTTPMCEEQDSKQPETPKSWENNVESQKHSLTSQSQISPKSWGVATASLIPNDQLLPRKLNTEPKDVPKPVHQPVGSSSTLPKDPVLRKEKLQDLMTQIQGTCNFMQESVLDFDKPSSAIPTSQPPSATPGSPVASKEQNLSSQSDFLQEPLQATSSPVTCSSNACLVTTDQASSGSETEFMTSETPEVFNVNAPLPPRKEQEIKESPYSPGYNQSFTTASTQTPPQCQLPSIHVEQTVHSQETANYHPDGTIQVSNGSLAFYPAQTNVFPRPTQPFVNSRGSVRGCTRGGRLITNSYRSPGGYKGFDTYRGLPSISNGNYSQLQFQAREYSGAPYSQRDNFQQCYKRGGTSGGPRANSRAGWSDSSQVSSPERDNETFNSGDSGQGDSRSMTPVDVPVTNPAATILPVHVYPLPQQMRVAFSAARTSNLAPGTLDQPIVFDLLLNNLGETFDLQLGRFNCPVNGTYVFIFHMLKLAVNVPLYVNLMKNEEVLVSAYANDGAPDHETASNHAILQLFQGDQIWLRLHRGAIYGSSWKYSTFSGYLLYQD

SEQ ID NO: 47509 - protein, 879 aa, Homo sapiens
MKSAKPQVNHSQHGESQRALSPLQSTLSSAASPSQAYETYIENGLICLKHKIRNIEKKKLKLEDYKDRLKSGEHLNPDQLEAVEKYEEVLHNLEFAKELQKTFSGLSLDLLKAQKKAQRREHMLKLEAEKKKLRTILQVQYVLQNLTQEHVQKDFKGGLNGAVYLPSKELDYLIKFSKLTCPERNESLSVEDQMEQSSLYFWDLLEGSEKAVVGTTYKHLKDLLSKLLNSGYFESIPVPKNAKEKEVPLEEEMLIQSEKKTQLSKTESVKESESLMEFAQPEIQPQEFLNRRYMTEVDYSNKQGEEQPWEADYARKPNLPKRWDMLTEPDGQEKKQESFKSWEASGKHQEVSKPAVSLEQRKQDTSKLRSTLPEEQKKQEISKSKPSPSQWKQDTPKSKAGYVQEEQKKQETPKLWPVQLQKEQDPKKQTPKSWTPSMQSEQNTTKSWTTPMCEEQDSKQPETPKSWENNVESQKHSLTSQSQISPKSWGVATASLIPNDQLLPRKLNTEPKDVPKPVHQPVGSSSTLPKDPVLRKEKLQDLMTQIQGTCNFMQESVLDFDKPSSAIPTSQPPSATPGSPVASKEQNLSSQSDFLQEPLQATSSPVTCSSNACLVTTDQASSGSETEFMTSETPEAAIPPGKQPSSLASPNPPMAKGSEQGFQSPPASSSSVTINTAPFQAMQTVFNVNAPLPPRKEQEIKESPYSPGYNQSFTTASTQTPPQCQLPSIHVEQTVHSQETANYHPDGTIQVSNGSLAFYPAQTNVFPRPTQPFVNSRGSVRGCTRGGRLITNSYRSPGGYKGFDTYRGLPSISNGNYSQLQFQAREYSGAPYSQRDNFQQCYKRGGTSGGPRANSRANCFIMRNSLLLIKQQGGVILLR

SEQ ID NO: 47510 - protein, 213 aa, Homo sapiens
MYRSIEGCCICRAKSSSSRFTDSKRYEKDFQSCFGLHETRSGDICNACVLLVKRWKKLPAGSKKNWNHVVDARAGPSLKTTLKPKKVKTLSGNRIKSNQISKLQKEFKRHNSDAHSTTSSASPAQSPCYSNQSDDGSDTEMASGSNRTPVFSFLDLTYWKRQKICCGIIYKGRFGEVLIDTHLFKPCCSNKKAAAEKPEEQGPEPLPISTQEW

SEQ ID NO: 47511 - protein, 1193 aa, Homo sapiens
MPKGLSFRTQTDNKDPQFHSFIITREDGSRTYGFVLTFYEEVTSKQICTAMQTLYQMHNAEHYSSVYASSSCSMDSLASSLDEGDTTSLLKLQRYNSYDISRDTLYVSKSICLITPLPFMQACKKFLIQLYKAVTSQQPPPLPLESYIHNILYEVPLPPPGRSLKFYGVYEPVICQRPGPSELPLSDYPLREAFELLGLENLVQVFTCVLLEMQILLYSQDYQRLMTVAEGITTLLFPFQWQHVYVPILPASLLHFLDAPVPYLMGLQSKEGTDRSKLELPQEANLCFVDIDNHFIELPEEFPQFPNKVDFIQELSEVLVQFGIPPEGSLHCSESTSKLKNMVLKDLVNDKKNGNVCTNNISMYELLKGNETIARLQALAKRTGVAVEKMDLSASLGEKDKDLKLHCEEAELRDYQLNVQLREVFANRFTQMFADYEAFVIQTAQDMESWLTNREQMQNFDKASFLSDQPEPYLPFLSRFIETQMFATFIDNKIMSQWEEKDPLLRVFDTRIDKIRLYNVRAPTLRTSIYQKCSTLKEAAQSIEQRLMKMDHTAIHPHLLDMKIGQGKYEQGFFPKLQSDVLATGPTSNNRWVSRSATAQRRKERLRQHSEHVGLDNDLREKYMQEARSLGKNLRQPKLSDLSPAVIAQTNCKFVEGLLKECRMKTKRMLVEKMGHEAVELGHGEANITGLEENTLIASLCDLLERIWSHGLQVKQGKSALWSHLIQFQDREEKQEHLAESPVALGPERRKSDSGVMLPTLRVSLIQDMRHIQNMSEIKTDVGRARAWIRLSLEKKLLSQHLKQLLSNQPLTKKLYKRYAFLRCEEEREQFLYHLLSLNAVDYFCFTSVFTTIMIPYRSVIIPIKKLSNAIITSNPWICVSGELGDTGVMQIPKNLLEMTFECQNLGKLTTVQIGHDNSGLLAKWLVDCVMVRNEITGHTYRFPCGRWLGKGIDDGSLERILIGELMTSASDEDLVKQCRTPPQQKSPTTARRLSITSLTGKNNKPNAGQIQEGIGEAVNNIVKHFHKPEKERGSLTVLLCGENGLVAALEQVFHHGFKSARIFHKNVFIWDFIEKVVAYFETTDQILDNEDDVLIQKSSCKTFCHYVNAINTAPRNIGKDGKFQILVCLGTRDRLLPQWIPLLAECPAITRMYEESALLRDRMTVNSLIRILQTIQDFTIVLEGSLIKGVDV

SEQ ID NO: 47512 - protein, 413 aa, Homo sapiens
MITTLPGLYLVSIGVIKPAIWIFGWSEHVVCSIGMLRFVNLLFSVGNFYLLYLLFCKVQPRNKAASSIQRVLSTLTLAVFPTLYFFNFLYYTEAGSMFFTLFAYLMCLYGNHKTSAFLGFCGFMFRQTNIIWAVFCAGNVIAQKLTEAWKTELQKKEDRLPPIKGPFAEFRKILQFLLAYSMSFKNLSMLLLLTWPYILLGFLFCAFVVVNGGIVIGDRSSHEACLHFPQLFYFFSFTLFFSFPHLLSPSKIKTFLSLVWKRRILFFVVTLVSVFLVWKFTYAHKYLLADNRHYTFYVWKRVFQRYETVKYLLVPAYIFAGWSIADSLKSKSIFWNLMFFICLFTVIVPQKLLEFRYFILPYVIYRLNIPLPPTSRLICELSCYAVVNFITFFIFLNKTFQWPNSQDIQRFMW

SEQ ID NO: 47513 - protein, 1933 aa, Homo sapiens
MYPDDQEIQCLGLSLIGYLITKKNVFIGTGHLLAKILVSSLYRFKDVAEIQTKGFQTILAILKLSASFSKLLVHHSFDLVIFHQMSSNIMEQKDQQFLNLCCKCFAKVAMDDYLKNVMLERACDQNNSIMVECLLLLGADANQAKEGSSLICQVCEKESSPKLVELLLNSGSREQDVRKALTISIGKGDSQIISLLLRRLALDVANNSICLGGFCIGKVEPSWLGPLFPDKTSNLRKQTNIASTLARMVIRYQMKSAVEEGTASGSDGNFSEDVLSKFDEWTFIPDSSMDSVFAQSDDLDSEGSEGSFLVKKKSNSISVGEFYRDAVLQRCSPNLQRHSNSLGPIFDHEDLLKRKRKILSSDDSLRSSKLQSHMRHSDSISSLASEREYITSLDLSANELRDIDALSQKCCISVHLEHLEKLELHQNALTSFPQQLCETLKSLTHLDLHSNKFTSFPSYLLKMSCIANLDVSRNDIGPSVVLDPTVKCPTLKQFNLSYNQLSFVPENLTDVVEKLEQLILEGNKISGICSPLRLKELKILNLSKNHISSLSENFLEACPKVESFSARMNFLAAMPFLPPSMTILKLSQNKFSCIPEAILNLPHLRSLDMSSNDIQYLPGPAHWKSLNLRELLFSHNQISILDLSEKAYLWSRVEKLHLSHNKLKEIPPEIGCLENLTSLDVSYNLELRSFPNEMGKLSKIWDLPLDELHLNFDFKHIGCKAKDIIRFLQQRLKKAVPYNRMKLMIVGNTGSGKTTLLQQLMKTKKSDLGMQSATVGIDVKDWPIQIRDKRKRDLVLNVWDFAGREEFYSTHPHFMTQRALYLAVYDLSKGQAEVDAMKPWLFNIKARASSSPVILVGTHLDVSDEKQRKACMSKITKELLNKRGFPAIRDYHFVNATEESDALAKLRKTIINESLNFKIRDQLVVGQLIPDCYVELEKIILSERKNVPIEFPVIDRKRLLQLVRENQLQLDENELPHAVHFLNESGVLLHFQDPALQLSDLYFVEPKWLCKIMAQILTVKVEGCPKHPKGIISRRDVEKFLSKKRKFPKNYMSQYFKLLEKFQIALPIGEEYLLVPSSLSDHRPVIELPHCENSEIIIRLYEMPYFPMGFWSRLINRLLEISPYMLSGRERALRPNRMYWRQGIYLNWSPEAYCLVGSEVLDNHPESFLKITVPSCRKGCILLGQVVDHIDSLMEEWFPGLLEIDICGEGETLLKKWALYSFNDGEEHQKILLDDLMKKAEEGDLLVNPDQPRLTIPISQIAPDLILADLPRNIMLNNDELEFEQAPEFLLGDGSFGSVYRAAYEGEEVAVKIFNKHTSLRLLRQELVVLCHLHHPSLISLLAAGIRPRMLVMELASKGSLDRLLQQDKASLTRTLQHRIALHVADGLRYLHSAMIIYRDLKPHNVLLFTLYPNAAIIAKIADYGIAQYCCRMGIKTSEGTPGFRAPEVARGNVIYNQQADVYSFGLLLYDILTTGGRIVEGLKFPNEFDELEIQGKLPDPVKEYGCAPWPMVEKLIKQCLKENPQERPTSAQVFDILNSAELVCLTRRILLPKNVIVECMVATHHNSRNASIWLGCGHTDRGQLSFLDLNTEGYTSEEVADSRILCLALVHLPVEKESWIVSGTQSGTLLVINTEDGKKRHTLEKMTDSVTCLYCNSFSKQSKQKNFLLVGTADGKLAIFEDKTVKLKGAAPLKILNIGNVSTPLMCLSESTNSTERNVMWGGCGTKIFSFSNDFTIQKLIETRTSQLFSYAAFSDSNIITVVVDTALYIAKQNSPVVEVWDKKTEKLCGLIDCVHFLREVMVKENKESKHKMSYSGRVKTLCLQKNTALWIGTGGGHILLLDLSTRRLIRVIYNFCNSVRVMMTAQLGSLKNVMLVLGYNRKNTEGTQKQKEIQSCLTVWDINLPHEVQNLEKHIEVRKELAEKMRRTSVE

SEQ ID NO: 47514 - protein, 345 aa, Homo sapiens [sequence omitted]

SEQ ID NO: 47515 - protein, 823 aa, Homo sapiens [sequence omitted]

SEQ ID NO: 47516 - protein, 120 aa, Homo sapiens [sequence omitted]

SEQ ID NO: 47517 - protein, 616 aa, Homo sapiens
MLEDPQERERRERRERMERETNGNEDEEGRQKIREEKDKSKELHAIKERYLGGIKKRRRTRHLNDRKFVFEWDASEDTSIDYNPLYKERHQVQLLGRGFIAGIDLKQQKREQSRFYGDLMEKRRTLEEKEQEEARLRKLRKKEAKQRWDDRHWSQKKLDEMTDRDWRIFREDYSITTKGGKIPNPIRSWKDSSLPPHILEVIDKCGYKEPTPIQRQAIPIGLQNRDIIGVAETGSGKTAAFLIPLLVWITTLPKIDRIEESDQGPYAIILAPTRELAQQIEEETIKFGKPLGIRTVAVIGGISREDQGFRLRMGCEIVIATPGRLIDVLENRYLVLSRCTYVVLDEADRMIDMGFEPDVQKILEHMPVSNQKPDTDEAEDPEKMLANFESGKHKYRQTVMFTATMPPAVERLARSYLRRPAVVYIGSAGKPHERVEQKVFLMSESEKRKKLLAILEQGFDPPIIIFVNQKKGCDVLAKSLEKMGYNACTLHGGKGQEQREFALSNLKAGAKDILVATDVAGRGIDIQDVSMVVNYDMAKNIEDYIHRIGRTGRAGKSGVAITFLTKEDSAVFYELKQAILESPVSSCPPELANHPDAQHKPGTILTKKRREETIFA

SEQ ID NO: 47518 - protein, 5331 aa, Homo sapiens
MKTLQLLCPEHSEGAAYLEEARCAVCEGPGELCDLFFCTSCGHHYHGACLDTALTARKRAGWQCPECKVCQACRKPGNDSKMLVCETCDKGYHTFCLKPPMEELPAHSWKCKACRVCRACGAGSAELNPNSEWFENYSLCHRCHKAQGGQTIRSVAEQHTPVCSRFSPPEPGDTPTDEPDALYVACQGQPKGGHVTSMQPKEPGPLQCEAKPLGKAGVQLEPQLEAPLNEEMPLLPPPEESPLSPPPEESPTSPPPEASRLSPPPEELPASPLPEALHLSRPLEESPLSPPPEESPLSPPPESSPFSPLEESPLSPPEESPPSPALETPLSPPPEASPLSPPFEESPLSPPPEELPTSPPPEASRLSPPPEESPMSPPPEESPMSPPPEASRLFPPFEESPLSPPPEESPLSPPPEASRLSPPPEDSPMSPPPEESPMSPPPEVSRLSPLPVVSRLSPPPEESPLSPPPEESPTSPPPEASRLSPPPEDSPTSPPPEDSPASPPPEDSLMSLPLEESPLLPLPEEPQLCPRSEGPHLSPRPEEPHLSPRPEEPHLSPQAEEPHLSPQPEEPCLCAVPEEPHLSPQAEGPHLSPQPEELHLSPQTEEPHLSPVPEEPCLSPQPEESHLSPQSEEPCLSPRPEESHLSPELEKPPLSPRPEKPPEEPGQCPAPEELPLFPPPGEPSLSPLLGEPALSEPGEPPLSPLPEELPLSPSGEPSLSPQLMPPDPLPPPLSPIITAAAPPALSPLGELEYPFGAKGDSDPESPLAAPILETPISPPPEANCTDPEPVPPMILPPSPGSPVGPASPILMEPLPPQCSPLLQHSLVPQNSPPSQCSPPALPLSVPSPLSPIGKVVGVSDEAELHEMETEKVSEPECPALEPSATSPLPSPMGDLSCPAPSPAPALDDFSGLGEDTAPLDGIDAPGSQPEPGQTPGSLASELKGSPVLLDPEELAPVTPMEVYPECKQTAGQGSPCEEQEEPRAPVAPTPPTLIKSDIVNEISNLSQGDASASFPGSEPLLGSPDPEGGGSLSMELGVSTDVSPARDEGSLRLCTDSLPETDDSLLCDAGTAISGGKAEGEKGRRRSSPARSRIKQGRSSSFPGRRRPRGGAHGGRGRGRARLKSTASSIETLVVADIDSSPSKEEEEEDDDTMQNTVVLFSNTDKFVLMQDMCVVCGSFGRGAEGHLLACSQCSQCYHPYCVNSKITKVMLLKGWRCVECIVCEVCGQASDPSRLLLCDDCDISYHTYCLDPPLLTVPKGGWKCKWCVSCMQCGAASPGFHCEWQNSYTHCGPCASLVTCPICHAPYVEEDLLIQCRHCERWMHAGCESLFTEDDVEQAADEGFDCVSCQPYVVKPVAPVAPPELVPMKVKEPEPQYFRFEGVWLTETGMALLRNLTMSPLHKRRQRRGRLGLPGEAGLEGSEPSDALGPDDKKDGDLDTDELLKGEGGVEHMECEIKLEGPVSPDVEPGKEETEESKKRKRKPYRPGIGGFMVRQRKSHTRTKKGPAAQAEVLSGDGQPDEVIPADLPAEGAVEQSLAEGDEKKKQQRRGRKKSKLEDMFPAYLQEAFFGKELLDLSRKALFAVGVGRPSFGLGTPKAKGDGGSERKELPTSQKGDDGPDIADEESRGLEGKADTPGPEDGGVKASPVPSDPEKPGTPGEGMLSSDLDRISTEELPKMESKDLQQLFKDVLGSEREQHLGCGTPGLEGSRTPLQRPFLQGGLPLGNLPSSSPMDSYPGLCQSPFLDSRERGGFFSPEPGEPDSPWTGSGGTTPSTPTTPTTEGEGDGLSYNQRSLQRWEKDEELGQLSTISPVLYANINFPNLKQDYPDWSSRCKQIMKLWRKVPAADKAPYLQKAKDNRAAHRINKVQKQAESQINKQTKVGDIARKTDRPALHLRIPPQPGALGSPPPAAAPTIFIGSPTTPAGLSTSADGFLKPPAGSVPGPDSPGELFLKLPPQVPAQVPSQDPFGLAPAYPLEPRFPTAPPTYPPYPSPTGAPAQPPMLGASSRPGAGQPGEFHTTPPGTPRHQPSTPDPFLKPRCPSLDNLAVPESPGVGGGKASEPLLSPPPFGESRKALEVKKEELGASSPSYGPPNLGFVDSPSSGTHLGGLELKTPDVFKAPLTPRASQVEPQSPGLGLRPQEPPPAQALAPSPPSHPDIFRPGSYTDPYAQPPLTPRPQPPPPESCCALPPRSLPSDPFSRVPASPQSQSSSQSPLTPRPLSAEAFCPSPVTPRFQSPDPYSRPPSRPQSRDPFAPLHKPPRPQPPEVAFKAGSLAHTSLGAGGFPAALPAGPAGELHAKVPSGQPPNFVRSPGTGAFVGTPSPMRFTFPQAVGEPSLKPPVPQPGLPPPHGINSHFGPGPTLGKPQSTNYTVATGNFHPSGSPLGPSSGSTGESYGLSPLRPPSVLPPPAPDGSLPYLSHGASQRSGITSPVEKREDPGTGMGSSLATAELPGTQDPGMSGLSQTELEKQRQRQRLRELLIRQQIQRNTLRQEKETAAAAAGAVGPPGSWGAEPSSPAFEQLSRGQTPFAGTQDKSSLVGLPPSKLSGPILGPGSFPSDDRLSRPPPPATPSSMDVNSRQLVGGSQAFYQRAPYPGSLPLQQQQQQLWQQQQATAATSMRFAMSARFPSTPGPELGRQALGSPLAGISTRLPGPGEPVPGPAGPAQFIELRHNVQKGLGPGGTPFPGQGPPQRPRFYPVSEDPHRLAPEGLRGLAVSGLPPQKPSAPPAPELNNSLHPTPHTKGPTLPTGLELVNRPPSSTELGRPNPLALEAGKLPCEDPELDDDFDAHKALEDDEELAHLGLGVDVAKGDDELGTLENLETNDPHLDDLLNGDEFDLLAYTDPELDTGDKKDIFNEHLRLVESANEKAEREALLRGVEPGPLGPEERPPPAADASEPRLASVLPEVKPKVEEGGRHPSPCQFTIATPKVEPAPAANSLGLGLKPGQSMMGSRDTRMGTGPFSSSGHTAEKASFGATGGPPAHLLTPSPLSGPGGSSLLEKFELESGALTLPGGPAASGDELDKMESSLVASELPLLIEDLLEHEKKELQKKQQLSAQLQPAQQQQQQQQQHSLLSAPGPAQAMSLPHEGSSPSLAGSQQQLSLGLAGARQPGLPQPLMPTQPPAHALQQRLAPSMAMVSNQGHMLSGQHGGQAGLVPQQSSQPVLSQKPMGTMPPSMCMKPQQLAMQQQLANSFFPDTDLDKFAAEDIIDPIAKAKMVALKGIKKVMAQGSIGVAPGMNRQQVSLLAQRLSGGPSSDLQNHVAAGSGQERSAGDPSQPRPNPPTFAQGVINEADQRQYEEWLFHTQQLLQMQLKVLEEQIGVHRKSRKALCAKQRTAKKAGREFPEADAEKLKLVTEQQSKIQKQLDQVRKQQKEHTNLMAEYRNKQQQQQQQQQQQQQQHSAVLALSPSQSPRLLTKLPGQLLPGHGLQPPQGPPGGQAGGLRLTPGGMALPGQPGGPFLNTALAQQQQQQHSGGAGSLAGPSGGFFPGNLALRSLGPDSRLLQERQLQLQQQRMQLAQKLQQQQQQQQQQQHLLGQVAIQQQQQQGPGVQTNQALGPKPQGLMPPSSHQGLLVQQLSPQPPQGPQGMLGPAQVAVLQQQHPGALGPQGPHRQVLMTQSRVLSSPQLAQQGQGLMGHRLVTAQQQQQQQQHQQQGSMAGLSHLQQSLMSHSGQPKLSAQPMGSLQQLQQQQQLQQQQQLQQQQQQQLQQQQQLQQQQLQQQQQQQQLQQQQQQQLQQQQQQLQQQQQQQQQQFQQQQQQQQMGLLNQSRTLLSPQQQQQQQVALGPGMPAKPLQHFSSPGALGPTLLLTGKEQNTVDPAVSSEATEGPSTHQGGPLAIGTTPESMATEPGEVKPSLSGDSQLLLVQPQPQPQPSSLQLQPPLRLPGQQQQQVSLLHTAGGGSHGQLGSGSSSEASSVPHLLAQPSVSLGDQPGSMTQNLLGPQQPMLERPMQNNTGPQPPKPGPVLQSGQGLPGVGIMPTVGQLRAQLQGVLAKNPQLRHLSPQQQQQLQALLMQRQLQQSQAVRQTPPYQEPGTQTSPLQGLLGCQPQLGGFPGPQTGPLQELGAGPRPQGPPRLPAPPGALSTGPVLGPVHPTPPPSSPQEPKRPSQLPSPSSQLPTEAQLPPTHPGTPKPQGPTLEPPPGRVSPAAAQLADTLFSKGLGPWDPPDNLAETQKPEQSSLVPGHLDQVNGQVVPEASQLSIKQEPREEPCALGAQSVKREANGEPIGAPGTSNHLLLAGPRSEAGHLLLQKLLRAKNVQLSTGRGSEGLRAEINGHIDSKLAGLEQKLQGTPSNKEDAAARKPLTPKPKRVQKASDRLVSSRKKLRKEDGVRASEALLKQLKQELSLLPLTEPAITANFSLFAPFGSGCPVNGQSQLRGAFGSGALPTGPDYYSQLLTKNNLSNPPTPPSSLPPTPPPSVQQKMVNGVTPSEELGEHPKDAASARDSERALRDTSEVKSLDLLAALPTPPHNQTEDVRMESDEDSDSPDSIVPASSPESILGEEAPRFPHLGSGRWEQEDRALSPVIPLIPRASIPVFPDTKPYGALGLEVPGKLPVTTWEKGKGSEVSVMLTVSAAAAKNLNGVMVAVAELLSMKIPNSYEVLFPESPARAGTEPKKGEAEGPGGKEKGLEGKSPDTGPDWLKQFDAVLPGYTLKSQLDILSLLKQESPAPEPPTQHSYTYNVSNLDVRQLSAPPPEEPSPPPSPLAPSPASPPTEPLVELPTEPLAEPPVPSPLPLASSPESARPKPRARPPEEGEDSRPPRLKKWKGVRWKRLRLLLTIQKGSGRQEDEREVAEFMEQLGTALRPDKVPRDMRRCCFCHEEGDGATDGPARLLNLDLDLWVHLNCALWSTEVYETQGGALMNVEVALHRGLLTKCSLCQRTGATSSCNRMRCPNVYHFACAIRAKCMFFKDKTMLCPMHKIKGPCEQELSSFAVFRRVYIERDEVKQIASIIQRGERLHMFRVGGLVFHAIGQLLPHQMADFHSATALYPVGYEATRIYWSLRTNNRRCCYRCSIGENNGRPEFVIKVIEQGLEDLVFTDASPQAVWNRIIEPVAAMRKEADMLRLFPEYLKGEELFGLTVHAVLRIAESLPGVESCQNYLFRYGRHPLMELPLMINPTGCARSEPKILTHYKRPHTLNSTSMSKAYQSTFTGETNTPYSKQFVHSKSSQYRRLRTEWKNNVYLARSRIQGLGLYAAKDLEKHTMVIEYIGTIIRNEVANRREKIYEEQNRGIYMFRINNEHVIDATLTGGPARYINHSCAPNCVAEVVTFDKEDKIIIISSRRIPKGEELTYDYQFDFEDDQHKIPCHCGAWNCRKWMN

SEQ ID NO: 47519 - protein, 322 aa, Homo sapiens
MVWVASAIVDKNKANRESLYDFWEYYLPYLYSCISFLGVLLLLVCTPLGLARMFSVTGKLLVKPRLLEDLEEQLYCSAFEEAALTRRICNPTSCWLPLDMELLHRQVLALQTQRVLLEKRRKASAWQRNLGYPLAMLCLLVLTGLSVLIVAIHILELLIDEAAMPRGMQGTSLGQVSFSKLGSFGAVIQVVLIFYLMVSSVVGFYSSPLFRSLRPRWHDTAMTQIIGNCVCLLVLSSALPVFSRTLGLTRFDLLGDFGRFNWLGNFYIVFLYNAAFAGLTTLCLVKTFTAAVRAELIRAFGLDRLPLPVSGFPQASRKTQHQ

SEQ ID NO: 47520 - protein, 476 aa, Homo sapiens
MEGSASEVLKEWTVTGKKKNKKKKNKPKPAAEPSNGIPDSSKSVSIQEEQSAPSSEKGGMNGYHVNGAINDTESVDSLSEGLETLSIDARELEDPESAMLDTLDRTGSMLQNGVSDFETKSLTMHSIHNSQQPRNAAKSLSRPTTETQFSNMGMEDVPLATSKKLSSNIEKSVKDLQRCTVSLARYRVVVKEEMDASIKKMKQAFAELESCLMDREVALLAEMDKVKAEAMEILLSRQKKAELLKKMTHVAVQMSEQQLVELRADIKHFVSERKYDEDLGRVARFTCDVETLKKSIDSFGQVSHPKNSYSTRSRCSSVTSVSLSSPSDASAASSSTCASPPSLTSANKKNFAPGETPAAIANSSGQPYQPLREVLPGNRRGGQGYRPQGQKSNDPMNQGRHDSMGRYRNSSWYSSGSRYQSAPSQAPGNTIERGQTHSAGTNGTGVSMEPSPPTPSFKKGLPQRKPRTSQTEAVNS

SEQ ID NO: 47521 - protein, 205 aa, Homo sapiens
MKQYYLLEDQTVQPLPKGDQVLNFSDAEDLIDDSKLKDMRDEVLEHELMVADRRQKREIRQLEQELHKWQVLVDSITGMSSPDFDNQTLAVLRGRMVRYLMRSREITLGRATKDNQIDVDLSLEGPAWKISRKQGVIKLKNNGDFFIANEGRRPIYIDGRPVLCGSKWRLSNNSVVEIASLRFVFLINQDLIALIRAEAAKITPQ

SEQ ID NO: 47522 - protein, 583 aa, Homo sapiens
MYSSSCETTRNTTGIEESTDGMILGPEDLSYQIYDVSGESNSAVSTEDLKECLKKQLEFCFSRENLSKDLYLISQMDSDQFIPIWTVANMEEIKKLTTDPDLILEVLRSSPMVQVDEKGEKVRPSHKRCIVILREIPETTPIEEVKGLFKSENCPKVISCEFAHNSNWYITFQSDTDAQQAFKYLREEVKTFQGKPIMARIKAINTFFAKNGYRLMDSSIYSHPIQTQAQYASPVFMQPVYNPHQQYSVYSIVPQSWSPNPTPYFETPLAPFPNGSFVNGFNSPGSYKTNAAAMNMGRPFQKNRRTLFRGRRRREDDRISRPHPSTAESKAPTPKFDLLASNFPPLPGSSSRMPGELVLENRMSDVVKGVYKEKDNEELTISCPVPADEQTECTSAQQLNMSTSSPCAAELTALSTTQQEKDLIEDSSVQKDGLNQTTIPVSPPSTTKPSRASTASPCNNNINAATAVALQEPRKLSYAEVCQKPPKEPSSVLVQPLRELRSNVVSPTKNEDNGAPENSVEKPHEKPEARASKDYSGFRGNIIPRGAAGKIREQRRQFSHRAIPQGVTRRNGKEQYVPPRSPK

SEQ ID NO: 47523 - protein, 408 aa, Homo sapiens
MKLTKNGTVESVEADGLTLDDVSDEDIDVENVEVDDYFFLQPLPTKRRRALLRASGVHRIDAEEKQELRAIRLSREECGCDCRLYCDPEACACSQAGIKCQVDRMSFPCGCSRDGCGNMAGRIEFNPIRVRTHYLHTIMKLELESKRQVSRPAAPDEEPSPTASCSLTGAQGSETQDFQEFIAENETAVMHLQSAEELERLKAEEDSSGSSASLDSSIESLGVCILEEPLAVPEELCPGLTAPILIQAQLPPGSSVLCFTENSDHPTASTVNSPSYLNSGPLVYYQVEQRPVLGVKGEPGTEEGSASFPKEKDLNVFSLPVTSLVACSSTDPAALCKSEVGKTPTLEALLPEDCNPEEPENEDFHPSWSPSSLPFRTDNEEGCGMVKTSQQNEDRPPEDSSLELPLAV

SEQ ID NO: 47524 - protein, 1801 aa, Homo sapiens
MCTILTNCVFMTFSNPPDWSKNVEYTFTGIYTFESLVKIIARGFCIDGFTFLRDPWNWLDFSVIMMAYITEFVNLGNVSALRTFRVLRALKTISVIPGLKTIVGALIQSVKKLSDVMILTVFCLSVFALIGLQLFMGNLRNKCVVWPINFNESYLENGTKGFDWEEYINNKTNFYTVPGMLEPLLCGNSSDAGQCPEGYQCMKAGRNPNYGYTSFDTFSWAFLALFRLMTQDYWENLYQLTLRAAGKTYMIFFVLVIFVGSFYLVNLILAVVAMAYEEQNQATLEEAEQKEAEFKAMLEQLKKQQEEAQAAAMATSAGTVSEDAIEEEGEEGGGSPRSSSEISKLSSKSAKERRNRRKKRKQKELSEGEEKGDPEKVFKSESEDGMRRKAFRLPDNRIGRKFSIMNQSLLSIPGSPFLSRHNSKSSIFSFRGPGRFRDPGSENEFADDEHSTVEESEGRRDSLFIPIRARERRSSYSGYSGYSQGSRSSRIFPSLRRSVKRNSTVDCNGVVSLIGGPGSHIGGRLLPEATTEVEIKKKGPGSLLVSMDQLASYGRKDRINSIMSVVTNTLVEELEESQRKCPPCWYKFANTFLIWECHPYWIKLKEIVNLIVMDPFVDLAITICIVLNTLFMAMEHHPMTPQFEHVLAVGNLVFTGIFTAEMFLKLIAMDPYYYFQEGWNIFDGFIVSLSLMELSLADVEGLSVLRSFRLLRVFKLAKSWPTLNMLIKIIGNSVGALGNLTLVLAIIVFIFAVVGMQLFGKSYKECVCKINQDCELPRWHMHDFFHSFLIVFRVLCGEWIETMWDCMEVAGQAMCLIVFMMVMVIGNLVVLNLFLALLLSSFSADNLAATDDDGEMNNLQISVIRIKKGVAWTKLKVHAFMQAHFKQREADEVKPLDELYEKKANCIANHTGADIHRNGDFQKNGNGTTSGIGSSVEKYIIDEDHMSFINNPNLTVRVPIAVGESDFENLNTEDVSSESDPEGSKDKLDDTSSSEGSTIDIKPEVEEVPVEQPEEYLDPDACFTEGCVQRFKCCQVNIEEGLGKSWWILRKTCFLIVEHNWFETFIIFMILLSSGALAFEDIYIEQRKTIRTILEYADKVFTYIFILEMLLKWTAYGFVKFFTNAWCWLDFLIVAVVVNALVGAIPSIMNVLLVCLIFWLIFSIMGVNLFAGKYHYCFNETSEIRFEIEDVNNKTECEKLMEGNNTEIRWKNVKINFDNVGAGYLALLQVATFKGWMDIMYAAVDSRKPDEQPKYEDNIYMYIYFVIFIIFGSFFTLNLFIGVIIDNFNQQKKKFGGQDIFMTEEQKKYYNAMKKLGSKKPQKPIPRPLNKIQGIVFDFVTQQAFDIVIMMLICLNMVTMMVETDTQSKQMENILYWINLVFVIFFTCECVLKMFALRHYYFTIGWNIFDFVVVILSIVGMFLADIIEKYFVSPTLFRVIRLARIGRILRLIKGAKGIRTLLFALMMSLPALFNIGLLLFLVMFIFSIFGMSNFAYVKHEAGIDDMFNFETFGNSMICLFQITTSAGWDGLLLPILNRPPDCSLDKEHPGSGFKGDCGNPSVGIFFFVSYIIISFLIVVNMYIAIILENFSVATEESADPLSEDDFETFYEIWEKFDPDATQFIEYCKLADFADALEHPLRVPKPNTIELIAMDLPMVSGDRIHCLDILFAFTKRVLGDSGELDILRQQMEERFVASNPSKVSYEPITTTLRRKQEEVSAVVLQRAYRGHLARRGFICKKTTSNKLENGGTHREKKESTPSTASLPSYDSVTKPEKEKQQRAEEGRRERAKRQKEVRESKC

SEQ ID NO: 47525 - protein, 1842 aa, Homo sapiens
MCTILTNCVFMTFSNPPDWSKNVEYTFTGIYTFESLVKIIARGFCIDGFTFLRDPWNWLDFSVIMMAYVTEFVDLGNVSALRTFRVLRALKTISVIPGLKTIVGALIQSVKKLSDVMILTVFCLSVFALIGLQLFMGNLRNKCVVWPINFNESYLENGTKGFDWEEYINNKTNFYTVPGMLEPLLCGNSSDAGQCPEGYQCMKAGRNPNYGYTSFDTFSWAFLALFRLMTQDYWENLYQLTLRAAGKTYMIFFVLVIFVGSFYLVNLILAVVAMAYEEQNQATLEEAEQKEAEFKAMLEQLKKQQEEAQAAAMATSAGTVSEDAIEEEGEEGGGSPRSSSEISKLSSKSAKERRNRRKKRKQKELSEGEEKGDPEKVFKSESEDGMRRKAFRLPDNRIGRKFSIMNQSLLSIPGSPFLSRHNSKSSIFSFRGPGRFRDPGSENEFADDEHSTVEESEGRRDSLFIPIRARERRSSYSGYSGYSQGSRSSRIFPSLRRSVKRNSTVDCNGVVSLIGGPGSHIGGRLLPEATTEVEIKKKGPGSLLVSMDQLASYGRKDRINSIMSVVTNTLVEELEESQRKCPPCWYKFANTFLIWECHPYWIKLKEIVNLIVMDPFVDLAITICIVLNTLFMAMEHHPMTPQFEHVLAVGNLVFTGIFTAEMFLKLIAMDPYYYFQEGWNIFDGFIVSLSLMELSLADVEGLSVLRSFRLLRVFKLAKSWPTLNMLIKIIGNSVGALGNLTLVLAIIVFIFAVVGMQLFGKSYKECVCKINQDCELPRWHMHDFFHSFLIVFRVLCGEWIETMWDCMEVAGQAMCLIVFMMVMVIGNLVVLNLFLALLLSSFSADNLAATDDDGEMNNLQISVIRIKKGVAWTKLKVHAFMQAHFKQREADEVKPLDELYEKKANCIANHTGADIHRNGDFQKNGNGTTSGIGSSVEKYIIDEDHMSFINNPNLTVRVPIAVGESDFENLNTEDVSSESDPEGSKDKLDDTSSSEGSTIDIKPEVEEVPVEQPEEYLDPDACFTEGCVQRFKCCQVNIEEGLGKSWWILRKTCFLIVEHNWFETFIIFMILLSSGALAFEDIYIEQRKTIRTILEYADKVFTYIFILEMLLKWTAYGFVKFFTNAWCWLDFLIVAVSLVSLIANALGYSELGAIKSLRTLRALRPLRALSRFEGMRVVVNALVGAIPSIMNVLLVCLIFWLIFSIMGVNLFAGKYHYCFNETSEIRFEIEDVNNKTECEKLMEGNNTEIRWKNVKINFDNVGAGYLALLQVATFKGWMDIMYAAVDSRKPDEQPKYEDNIYMYIYFVIFIIFGSFFTLNLFIGVIIDNFNQQKKKFGGQDIFMTEEQKKYYNAMKKLGSKKPQKPIPRPLNKIQGIVFDFVTQQAFDIVIMMLICLNMVTMMVETDTQSKQMENILYWINLVFVIFFTCECVLKMFALRHYYFTIGWNIFDFVVVILSIVGMFLADIIEKYFVSPTLFRVIRLARIGRILRLIKGAKGIRTLLFALMMSLPALFNIGLLLFLVMFIFSIFGMSNFAYVKHEAGIDDMFNFETFGNSMICLFQITTSAGWDGLLLPILNRPPDCSLDKEHPGSGFKGDCGNPSVGIFFFVSYIIISFLIVVNMYIAIILENFSVATEESADPLSEDDFETFYEIWEKFDPDATQFIEYCKLADFADALEHPLRVPKPNTIELIAMDLPMVSGDRIHCLDILFAFTKRVLGDSGELDILRQQMEERFVASNPSKVSYEPITTTLRRKQEEVSAVVLQRAYRGHLARRGFICKKTTSNKLENGGTHREKKESTPSTASLPSYDSVTKPEKEKQQRAEEGRRERAKRQKEVRESKC

SEQ ID NO: 47526 - protein, 261 aa, Homo sapiens
MSSLSPGKPWQTKLSSAGLIYLHFGHKLLAQLLGTSEEDSMVGTLYDKMYENFVEEVDAVDNGISQWAEGEPRYALTTTLSARVARLNPTWNHPDQDTEAGFKRAMDLVQEEFLQRLDFYQHSWLPARALVEEALAQRFQVDPSGEIVELAKGACPWKEHLYHLESGLSPPVAIFFVIYTDQAGQWRIQCVPKEPHSFQSRLPLPEPWRGLRDEALDQVSGIPGCIFVHASGFTGGHHTREGALSMARATLAQRSYLPQIS

SEQ ID NO: 47527 - protein, 52 aa, Homo sapiens
MYLTRERRLEISKTINLTDRQVKIWFQNRRMKLKKMNRENRIRELTSNFNFT

SEQ ID NO: 47528 - protein, 108 aa, Homo sapiens
MQKRAERFNVPVSLESKKAARAARFGISSVPTKGLSSDNKPMVNLDKLKERAQRFGLNVSSISRKSEDDEKLKKRKERFGIVTSSAGTGTTEDTEAKKRKRAERFGIA

SEQ ID NO: 47529 - protein, 716 aa, Homo sapiens [sequence omitted]

SEQ ID NO: 47530 - protein, 488 aa, Homo sapiens
MGTLLGLGAVLAYQDHRCRAAQESTHIYTKEEVSSHTSPETGIWVTLGSEVFDVTEFVDLHPGGPSKLMLAAGGPLEPFWALYAVHNQSHVRELLAQYKIGELNPEDKVAPTVETSDPYADDPVRHPALKVNSQRPFNAEPPPELLTENYITPNPIFFTRNHLPVPNLDPDTYRLHVVGAPGGQSLSLSLDDLHNFPRYEITVTLQCAGNRRSEMTQVKEVKGLEWRTGAISTARWAGARLCDVLAQAGHQLCETEAHVCFEGLDSDPTGTAYGASIPLARAMDPEAEVLLAYEMNGQPLPRDHGFPVRVVVPGVVGARHVKWLGRVSVQPEESYSHWQRRDYKGFSPSVDWETVDFDSAPSIQELPVQSAITEPRDGETVESGEVTIKGYAWSGGGRAVIRVDVSLDGGLTWQVAKLDGEEQRPRKAWAWRLWQLKAPVPAGQKELNIVCKAVDDGYNVQPDTVAPIWNLRGVLSNAWHRVHVYVSP

SEQ ID NO: 47531 - protein, 116 aa, Homo sapiens [sequence omitted]

SEQ ID NO: 47532 - protein, 92 aa, Homo sapiens [sequence omitted]

SEQ ID NO: 47533 - protein, 218 aa, Homo sapiens
MSHLSDCEHNPKRPVTCEQGCGLEMPKDELPNHNCIKHLRSVVQQQQTRIAELEKTSAEHKHQLAEQKRDIQLLKAYMRAIRSVNPNLQNLEETIEYNEILEWVNSLQPARVTRWGGMISTPDAVLQAVIKRSLVESGCPASIVNELIENAHERSWPQGLATLETRQMNRRYYENYVAKRIPGKQAVVVMACENQHMGDDMVQEPGLVMIFAHGVEEI

SEQ ID NO: 47534 - protein, 1112 aa, Homo sapiens
MLWVGSHGGHATSFFGPALERYSSFQVNGSDDIRQIQSLENGILFLTKNNLKYMARGGLIIFDYLLDENEDMHSLLLTDSSTLLVGGLQNHIIEIDLNTVQETQKYAVETPGVTIMRQTNRFFFCGHTSGKVSLRDLRTFKVEHEFDAFSGSLSDFDVHGNLLAACGFSSRLTGLACDRFLKVYDLRMMRAITPLQVHVDPAFLRFIPTYTSRLAIISQSGQCQFCEPTGLANPADIFHVNPVGPLLMTFDVSASKQALAFGDSEGCVHLWTDSPEPSFNPYSRETEFALPCLVDSLPPLDWSQDLLPLSLIPVPLTTDTLLSDWPAANSAPAPRRAPPVDAEILRTMKKVGFIGYAPNPRTRLRNQIPYRLKESDSEFDSFSQVTESPVGREEEPHLHMVSKKYRKVTIKYSKLGLEDFDFKHYNKTLFAGLEPHIPNAYCNCMIQVLYFLEPVRCLIQNHLCQKEFCLACELGFLFHMLDLSRGDPCQGNNFLRAFRTIPEASALGLILADSDEASGKGNLARLIQRWNRFILTQLHQDMQELEIPQAYRGAGGSSFCSSGDSVIGQLFSCEMENCSLCRCGSETVRASSTLLFTLSYPDDKTGKNYDFAQVLKRSICLDQNTQAWCDTCEKYQPTIQTRNIRHLPDILVINCEVNSSKEADFWRMQAEVAFKMAVKKHGGEISKNKEFALADWKELGSPEGVLVCPSIEELKNVWLPFSIRMKMTKNKGLDVCNWTDGDEMQWGPARAEEEHGVYVYDLMATVVHILDSRTGGSLVAHIKVGETYHQRKEGVTHQQWYLFNDFLIEPIDKHEAVQFDMNWKVPAILYYVKRNLNSRYNLNIKNPIEASVLLAEASLARKQRKTHTTFIPLMLNEMPQIGDLVGLDAEFVTLNEEEAELRSDGTKSTIKPSQMSVARITCVRGQGPNEGIPFIDDYISTQEQVVDYLTQYSGIKPGDLDAKISSKHLTTLKSTYLKLRFLIDIGVKFVGHGLQKDFRVINLMVPKDQVLDTVYLFHMPRKRMISLRFLAWYFLDLKIQGETHDSIEDARTALQLYRKYLELSKNGTEPESFHKVLKGLYEKGRKMDWKVPEPEGQTSPKNAAVFSSVLAL

SEQ ID NO: 47535 - protein, 794 aa, Homo sapiens
MLFFHFLDQLNYECGRCSQDPESLLLQHNLRKFCRDIQPFSQDPTQLAEMIFNLLLEEKRILIQAQRAQLEQGEPVLETPVESQQHEIESRILDLRAMMEKLVKSISQLKDQQDVFCFRYKIQAKGKTPSLDPHQTKEQKILQETLNELDKRRKEVLDASKALLGRLTTLIELLLPKLEEWKAQQQKACIRAPIDHGLEQLETWFTAGAKLLFHLRQLLKELKGLSCLVSYQDDPLTKGVDLRNAQVTELLQRLLHRAFVVETQPCMPQTPHRPLILKTGSKFTVRTRLLVRLQEGNESLTVEVSIDRNPPQLQGFRKFNILTSNQKTLTPEKGQSQGLIWDFGYLTLVEQRSGGSGKGSNKGPLGVTEELHIISFTVKYTYQGLKQELKTDTLPVVIISNMNQLSIAWASVLWFNLLSPNLQNQQFFSNPPKAPWSLLGPALSWQFSSYVGRGLNSDQLSMLRNKLFGQNCRTEDPLLSWADFTKRESPPGKLPFWTWLDKILELVHDHLKDLWNDGRIMGFVSRSQERRLLKKTMSGTFLLRFSESSEGGITCSWVEHQDDDKVLIYSVQPYTKEVLQSLPLTEIIRHYQLLTEENIPENPLRFLYPRIPRDEAFGCYYQEKVNLQERRKYLKHRLIVVSNRQVDELQQPLELKPEPELESLELELGLVPEPELSLDLEPLLKAGLDLGPELESVLESTLEPVIEPTLCMVSQTVPEPDQGPVSQPVPEPDLPCDLRHLNTEPMEIFRNCVKIEEIMPNGDPLLAGQNTVDEVYVSRPSHFYTDGPLMPSDF

SEQ ID NO: 47536 - protein, 401 aa, Homo sapiens
MNQLSIAWASVLWFNLLSPNLQPTLLPPLQNQQFFSNPPKAPWSLLGPALSWQFSSYVGRGLNSDQLSMLRNKLFGQNCRTEDPLLSWADFTKRESPPGKLPFWTWLDKILELVHDHLKDLWNDGRIMGFVSRSQERRLLKKTMSGTFLLRFSESSEGGITCSWVEHQDDDKVLIYSVQPYTKEVLQSLPLTEIIRHYQLLTEENIPENPLRFLYPRIPRDEAFGCYYQEKVNLQERRKYLKHRLIVVSNRQVDELQQPLELKPEPELESLELELGLVPEPELSLDLEPLLKAGLDLGPELESVLESTLEPVIEPTLCMVSQTVPEPDQGPVSQPVPEPDLPCDLRHLNTEPMEIFRNCVKIEEIMPNGDPLLAGQNTVDEVYVSRPSHFYTDGPLMPSDF

SEQ ID NO: 47537 - protein, 761 aa, Homo sapiens
MLFFHFLDQLNYECGRCSQDPESLLLQHNLRKFCRDIQPFSQDPTQLAEMIFNLLLEEKRILIQAQRAQLEQGEPVLETPVESQQHEIESRILDLRAMMEKLVKSISQLKDQQDVFCFRYKIQAKGKTPSLDPHQTKEQKILQETLNELDKRRKEVLDASKALLGRLTTLIELLLPKLEEWKAQQQKACIRAPIDHGLEQLETWFTAGAKLLFHLRQLLKELKGLSCLVSYQDDPLTKGVDLRNAQVTELLQRLLHRAFVVETQPCMPQTPHRPLILKTGSKFTVRTRLLVRLQEGNESLTVEVSIDRNPPQLQGFRKFNILTSNQKTLTPEKGQSQGLIWDFGYLTLVEQRSGGSGKGSNKGPLGVTEELHIISFTVKYTYQGLKQELKNQQFFSNPPKAPWSLLGPALSWQFSSYVGRGLNSDQLSMLRNKLFGQNCRTEDPLLSWADFTKRESPPGKLPFWTWLDKILELVHDHLKDLWNDGRIMGFVSRSQERRLLKKTMSGTFLLRFSESSEGGITCSWVEHQDDDKVLIYSVQPYTKEVLQSLPLTEIIRHYQLLTEENIPENPLRFLYPRIPRDEAFGCYYQEKVNLQERRKYLKHRLIVVSNRQVDELQQPLELKPEPELESLELELGLVPEPELSLDLEPLLKAGLDLGPELESVLESTLEPVIEPTLCMVSQTVPEPDQGPVSQPVPEPDLPCDLRHLNTEPMEIFRNCVKIEEIMPNGDPLLAGQNTVDEVYVSRPSHFYTDGPLMPSDF

SEQ ID NO: 47538 - protein, 984 aa, Homo sapiens
MFRDQNPEQLAGVGQGRLAQERSADFAELEVLRQREMAEKKTRALQRGNRHSRFGGSYIVQGLKSIGERDLIFHKGLHNLRNYSSDLGKQPKKVPKRRQAARELSIQRRSALNVRLFLRDFCSEFLENCYNRLMGSVKDHLLREKAQQHDETYYMWALAFFMAFNRAASFRPGLVSETLSVRTFHFIEQNLTNYYEMMLTDRKEAASWARRMHLALKAYQELLATVNEMDISPDEAVRESSRIIKNNIFYVMEYRELFLALFRKFDERCQPRSFLRDLVETTHLFLKMLERFCRSRGNLVVQNKQKKRRKKKKKVLDQAIVSGNVPSSPEEVEAVWPALAEQLQCCAQNSELSMDSVVPFDAASEVPVEEQRAEAMVRIQDCLLAGQAPQALTLLRSAREVWPEGDVFGSQDISPEEEIQLLKQILSAPLPRQQGPEERGAEEEEEEEEEEEEELQVVQVSEKEFNFLDYLKRFACSTVVRAYVLLLRSYQQNSAHTNHCIVKMLHRLAHDLKMEALLFQLSVFCLFNRLLSDPAAGAYKELVTFAKYILGKFFALAAVNQKAFVELLFWKNTAVVREMTEGYGSLDDRSSSRRAPTWSPEEEAHLRELYLANKDVEGQDVVEAILAHLNTVPRTRKQIIHHLVQMGLADSVKDFQRKGTHIVLWTGDQELELQRLFEEFRDSDDVLGHIMKNITAKRSRARIVDKLLALGLVAERRELYKKRQKKLASSILPNGAESLKDFCQEDLEEEENLPEEDSEEEEEGGSEAEQVQGSLVLSNENLGQSLHQEGFSIPLLWLQNCLIRAADDREEDGCSQAVPLVPLTEENEEAMENEQFQQLLRKLGVRPPASGQETFWRIPAKLSPTQLRRAAASLSQPEEEQKLQPELQPKVPGEQGSDEEHCKEHRAQALRALLLAHKKKAGLASPEEEDAVGKEPLKAAPKKRQLLDSDEEQEEDEGRNRAPELGAPGIQKKKRYQIEDDEDD

SEQ ID NO: 47539 - protein, 442 aa, Homo sapiens
MALVGMATKPLHVRRLQKALREWATNPGLFSQPVPAVPVSSIPLFKISETAGTRKGSMSNGHGSPGEKAGSARSFSPKSPLELGEKLSPLPGGPGAGDPRIWPGRSTPESDVGAGGEEEAGSPPFSPPAGGGVPEGTGAGGLAAGGTGGGPDRLEPEMVRMVVESVERIFRSFPRGDAGEVTSLLKLNKKLARSVGHIFEMDDNDSQKEEEIRKYSIIYGRFDSKRREGKQLSLHELTINEAAAQFCMRDNTLLLRRVELFSLSRQVARESTYLSSLKGSRLHPEELGGPPLKKLKQEVGEQSHPEIQQPPPGPESYVPPYRPSLEEDSASLSGESLDGHLQAVGSCPRLTPPPADLPLALPAHGLWSRHILQQTLMDEGLRLARLVSHDRVGRLSPCVPAKPPLAEFEEGLLDRCPAPGPHPALVEGRRSSVKVEAEASRQ

SEQ ID NO: 47540 - protein, 346 aa, Homo sapiens
MGAISPTATCLTSSGYQPRPSSSSLCPISSTALAVCVSVQPKTGLIDYNQLALTARLFRPRLIIAGTSAYARLIDYARMREVCDEVKAHLLADMAHISGLVAAKVIPSPFKHADIVTTTTHKTLRGARSGLIFYRKGVKAVDPKTGREIPYTFEDRINFAVFPSLQGGPHNHAIAAVAVALKQACTPMFREYSLQVLKNARAMADALLERGYSLVSGGTDNHLVLVDLRPKGLDGARAERVLELVSITANKNTCPGDRSAITPGGLRLGAPALTSRQFREDDFRRVVDFIDEGVNIGLEVKSKTAKLQDFKSFLLKDSETSQRLANLRQRVEQFARAFPMPGFDEH

SEQ ID NO: 47541 - protein, 1695 aa, Homo sapiens [sequence omitted]

SEQ ID NO: 47542 - protein, 1701 aa, Homo sapiens
MQSDLRALSLECKKKFPPVKEAAESGIIKVKTIAARNTEILAALKENSSEVVQPFLMGCGTKEPKITQLCLAAIQRLMSHEVVSETAAGNIINMLWQLMENSLEELKLLQTVLVLLTTNTVVHDEALSKAIVLCFRLHFTKDNITNNTAAATVRQVVTVVFERMVAEDERHRDIIEQPVLVQGNSNRRSVSTLKPCAKDAYMLFQDLCQLVNADAPYWLVGMTEMTRTFGLELLESVLNDFPQVFLQHQEFSFLLKERVCPLVIKLFSPNIKFRQGSSTSSSPAPVEKPYFPICMRLLRVVSVLIKQFYSLLVTECEIFLSLLVKFLDADKPQWLRAVAVESIHRFCVQPQLLRSFCQSYDMKQHSTKVFRDIVNALGSFIQSLFLVPPTGNPATSNQAGNNNLGGSVSAPANSGMVGIGGGVTLLPAFEYRGTWIPILTITVQGSAKATYLEMLDKVEPPTIPEGYAMSVAFHCLLDLVRGITSMIEGELGELETECQTTTEEGSSPTQSTEQQDLQSTSDQMDKEIVSRAVWEEMVNACWCGLLAALSLLLDASTDEAATENILKAELTMAALCGRLGLVTSRDAFITAICKGSLPPHYALTVLNTTTAATLSNKSYSVQGQSVMMISPSSESHQQVVAVGQPLAVQPQGTVMLTSKNIQCMRTLLNLAHCHGAVLGTSWQLVLATLQHLVWILGLKPSSGGALKPGRAVEGPSTVLTTAVMTDLPVISNILSRLFESSQYLDDVSLHHLINALCSLSLEAMDMAYGNNKEPSLFAVAKLLETGLVNMHRIEILWRPLTGHLLEVCQHPNSRMREWGAEALTSLIKAGLTFNHDPPLSQNQRLQLLLLNPLKEMSNINHPDIRLKQLECVLQILQSQGDSLGPGWPLVLGVMGAIRNDQGESLIRTAFQCLQLVVTDFLPTMPCTCLQIVVDVAGSFGLHNQELNISLTSIGLLWNISDYFFQRGETIEKELNKEEAAQQKQAEEKGVVLNRPFHPAPPFDCLWLCLYAKLGELCVDPRPAVRKSAGQTLFSTIGAHGTLLQHSTWHTVIWKVLFHLLDRVRESSTTADKEKIESGGGNILIHHSRDTAEKQWAETWVLTLAGVARIFNTRRYLLQPLGDFSRAWDVLLDHIQSAALSKNNEVSLAALKSFQEILQIVSPVRDSDKPETPPVVNVPVPVLIGPISGMSRPFVRTDSIGEKLGRYSSSEPPIVTDELEDLNLWWAAWNTWYRIGSESTKPPITFDKLTFIPSQPFLTALIQIFPALYQHIKTGFNMDDLQKLGVILHSAISVPISSDASPFILPSYTEAVLTSLQEAVLTALDVLQKAICVGPENMQIMYPAIFDQLLAFVEFSCKPPQYGQLETKHIANAKYNQIQLFAPAEWVALNYVPFAERSLEVVVDLYQKTACHKAVVNEKVLQNIIKTLRVPLSLKYSCPSESTWKLAVSSLLRVLSIGLPVARQHASSGKFDSMWPELANTFEDFLFTKSIPPDNLSIQEFQRNENIDVEVVQLISNEILPYANFIPKEFVGQIMTMLNKGSIHSQSSSFTEAEIDIRLREEFSKMCFETLLQFSFSNKVTTPQEGYISRMALSVLLKRSQDVLHRYIEDERLSGKCPLPRQQVTEIIFVLKAVSTLIDSLKKTQPENVDGNTWAQVIALYPTLVECITCSSSEVCSALKEALVPFKDFMQPPASRVQNGES

SEQ ID NO: 47543 - protein, 1011 aa, Homo sapiens
MAKTRSTKDHQQYKKDQNLLSPVNCWYLLLNQVRRESKDHATLSDIYLNNVIMRFMQISEDSTRMFKKSKEIAFQLHEDLMKVLNELYTVMKTYHMYHAESISAESKLKEAEKQEEKQIGRSGDPVFHIRLEERHQRRSSVKKIEKMKEKRQAKYSENKLKSIKARNEYLLTLEATNASVFKYYIHDLSDLIDCCDLGYHASLNRALRTYLSAEYNLETSRHEGLDIIENAVDNLEPRSDKQRFMEMYPAAFCPPMKFEFQSHMGDEVCQVSAQQPVQAELMLRYQQLQSRLATLKIENEEVKKTTEATLQTIQDMVTIEDYDVSECFQHSRSTESVKSTVSETYLSKPSIAKRRANQQETEQFYFMKLREYLEGSNLITKLQAKHDLLQRTLGEGHRAEYMTTRPPNVPPKPQKHRKSRPRSQYNTKLFNGDLETFVKDSGQVIPLIVESCIRFINLYGLQHQGIFRVSGSQVEVNDIKNSFERGENPLADDQSNHDINSVAGVLKLYFRGLENPLFPKERFNDLISCIRIDNLYERALHIRKLLLTLPRSVLIVMRYLFAFLNHLSQYSDENMMDPYNLAICFGPTLMPVPEIQDQVSCQAHVNEIIKTIIIHHETIFPDAKELDGPVYEKCMAGDDYCDSPYSEHGTLEEVDQDAGTEPHTSEDECEPIEAIAKFDYVGRSARELSFKKGASLLLYHRASEDWWEGRHNGIDGLVPHQYIVVQDMDDTFSDTLSQKADSEASSGPVTEDKSSSKDMNSPTDRHPDGYLARQRKRGEPPPPVRRPGRTSDGHCPLHPPHALSNSSVDLGSPSLASHPRGLLQNRGLNNDSPERRRRPGHGSLTNISRHDSLKKIDSPPIRRSTSSGQYTGFNDHKPLDPETIAQDIEETMNTALNELRELERQSTAKHAPDVVLDTLEQVKNSPTPATSTESLSPLHNVALRSSEPQIRRSTSSSSDTMSTFKPMVAPRMGVQLKPPALRPKPAVLPKTNPTIGPAPPPQGPTDKSCTM

SEQ ID NO: 47544 - protein, 988 aa, Homo sapiens
MAKTRSTKDHQQYKKDQNLLSPVNCWYLLLNQVRRESKDHATLSDIYLNNVIMRFMQISEDSTRMFKKSKEIAFQLHEDLMKVLNELYTVMKTYHMYHAESISAESKLKEAEKQEEKQIGRSGDPVFHIRLEERHQRRSSVKKIEKMKEKRQAKYSENKLKSIKARNEYLLTLEATNASVFKYYIHDLSDLIDCCDLGYHASLNRALRTYLSAEYNLETSRHEGLDIIENAVDNLEPRSDKQRFMEMYPAAFCPPMKFEFQSHMGDEVCQVSAQQPVQAELMLRYQQLQSRLATLKIENEEVKKTTEATLQTIQDMVTIEDYDVSECFQHSRSTESVKSTVSETYLSKPSIAKRRANQQETEQFYFMKLREYLEGSNLITKLQAKHDLLQRTLGEGHRAEYMTTSRGRRNSHTRHQDSGQVIPLIVESCIRFINLYGLQHQGIFRVSGSQVEVNDIKNSFERGENPLADDQSNHDINSVAGVLKLYFRGLENPLFPKERFNDLISCIRIDNLYERALHIRKLLLTLPRSVLIVMRYLFAFLNHLSQYSDENMMDPYNLAICFGPTLMPVPEIQDQVSCQAHVNEIIKTIIIHHETIFPDAKELDGPVYEKCMAGDDYCDSPYSEHGTLEEVDQDAGTEPHTSEDECEPIEAIAKFDYVGRSARELSFKKGASLLLYHRASEDWWEGRHNGIDGLVPHQYIVVQDMDDTFSDTLSQKADSEASSGPVTEDKSSSKDMNSPTDRHPDGYLARQRKRGEPPPPVRRPGRTSDGHCPLHPPHALSNSSVDLGSPSLASHPRGLLQNRGLNNDSPERRRRPGHGSLTNISRHDSLKKIDSPPIRRSTSSGQYTGFNDHKPLDPETIAQDIEETMNTALNELRELERQSTAKHAPDVVLDTLEQVKNSPTPATSTESLSPLHNVALRSSEPQIRRSTSSSSDTMSTFKPMVAPRMGVQLKPPALRPKPAVLPKTNPTIGPAPPPQGPTDKSCTM

SEQ ID NO: 47545 - protein, 300 aa, Homo sapiens
MYTLSTQKFINAEELVGLLDAIMKKYSSRFHHPILSPLESSFQLEVDVLCHLLKAQAQVSEWKFLPSLVNLHSAHTKLQTWGQIFEKQRETKKHLFGGQSQKAVQPPHLFLWLMKLKNMLLAKFSFYFHEALSRQTTASEMKTLTAKANPDFFGKISSFIRKYDAANVSLIFDNRGSESFQGHGYHHPHSYREAPKGVDQYPAVVSLPSDRPVMHWPNVIMIMTDRTSDLNSLEKVVHFYDDKVQSTYFLTRPEPHFTIVIIFESKKSERDSHFISFLNEVSLALKNPKVFASLKPGAKG

SEQ ID NO: 47546 - protein, 37 aa, Homo sapiens
MHKLSPEEYVLAAISLYLDIINLFLHLLRFLEAVNKK

SEQ ID NO: 47547 - protein, 434 aa, Homo sapiens
MELKDLHQPKRKLTPWKHQRLGKVNSEYRAKFLSPAQYLYKAGAWTHVKGNMPNQVKELREKAEFYRKRVQGTHFSRDHLNQILSDSNCCWDVSSTTSSEGTVSSNIRALDLAGDPTSHKTLQKCPSTEPEEKGNIVEEQPQKNTTEKLGVSAPTIPVRRRLAWDTENTSEDVQKQPGEKEEEDDNEEEGDRKTGKQAFMGEQEKLDVREKSKADKMKEGSDSSVSSEKGGRLPTPKLRELGGIQRTHHDLTTPAVGGAVLVSPSKMKPPAPEQRKRMTSQDCLETSKNDFTKKESRAVSLLTSPAAGIKTVDPLPLREDSEDNIHKFAEATLPVSKIPKYPTNPPGQLPSPPHVPSYWHPSRRIQGSLRDPEFQHNVGKARMNNLQLPQHEAFNDEDEDRLSEISARSAASSLRAFQTLARAKKRKENFWGKT

SEQ ID NO: 47548 - protein, 205 aa, Homo sapiens
MTTPVIIAIQTFCYQKTFSTRIQLTLIPITLGVILNSYYDVKFNFLGMVFAALGVLVTSLYQVWVGAKQHELQVNSMQLLYYQAPMSSAMLLVAVPFFEPVFGEGGIFGPWSVSALLMVLLSGVIAFMVNLSIYWIIGNTSPVTYNMFGHFKFCITLFGGYVLFKDPLSINQALGILCTLFGILAYTHFKLSEQEGSRSKLAQRP

SEQ ID NO: 47549 - protein, 416 aa, Homo sapiens [sequence omitted]

SEQ ID NO: 47550 - protein, 256 aa, Homo sapiens
MVSFVSNYSHTANILPDIENEDFIKDCVRIHNKFRSEVKPTASDMLYMTWDPALAQIAKAWASNCQFSHNTRLKPPHKLHPNFTSLGENIWTGSVPIFSVSSAITNWYDEIQDYDFKTRICKKVCGHYTQVVWADSYKVGCAVQFCPKVSGFDALSNGAHFICNYGPGGNYPTWPYKRGATCSACPNNDKCLDNLCVNRQRDQVKRYYSVVYPGWPIYPRNRYTSLFLIVNSVILILSVIITILVQHKYPNLVLLD

SEQ ID NO: 47551 - protein, 2143 aa, Homo sapiens
MQSSLAARYATQSNHSGIATSQKKPTRLPGPSRVPAAGSSSKVQGASNLNRRSQSFNSIDKNKPPNYANGNEKDSSKGPQSSSGVNGNVQPPSTAGQPPASAIPSPSASKPWRSKSMNVKHSATSTMLTVKQSSTATSPTPSSDRLKPPVSEGVKTAPSGQKSMLEKFKLVNARTALRPPQPPSSGPSDGGKDDDAFSESGEMEGFNSGLNSGGSTNSSPKVSPKLAPPKAGSKNLSNKKSLLQPKEKEEKNRDKNKVCTEKPVKEEKDQVTEMAPKKTSKIASLIPKGSKTTAAKKESLIPSSSGIPKPGSKVPTVKQTISPGSTASKESEKFRTTKGSPSQSLSKPITMEKASASSCPAPLEGREAGQASPSGSCTMTVAQSSGQSTGNGAVQLPQQQQHSHPNTATVAPFIYRAHSENEGTALPSADSCTSPTKMDLSYSKTAKQCLEEISGEDPETRRMRTVKNIADLRQNLEETMSSLRGTQISHSTLETTFDSTVTTEVNGRTIPNLTSRPTPMTWRLGQACPRLQAGDAPSLGAGYPRSGTSRFIHTDPSRFMYTTPLRRAAVSRLGNMSQIDMSEKASSDLDMSSEVDVGGYMSDGDILGKSLRTDDINSGYMTDGGLNLYTRSLNRIPDTATSRDIIQRGVHDVTVDADSWDDSSSVSSGLSDTLDNISTDDLNTTSSVSSYSNITVPSRKNTQLRTDSEKRSTTDETWDSPEELKKPEEDFDSHGDAGGKWKTVSSGLPEDPEKAGQKASLSVSQTGSWRRGMSAQGGAPSRQKAGTSALKTPGKTDDAKASEKGKAPLKGSSLQRSPSDAGKSSGDEGKKPPSGIGRSTATSSFGFKKPSGVGSSAMITSSGATITSGSATLGKIPKSAAIGGKSNAGRKTSLDGSQNQDDVVLHVSSKTTLQYRSLPRPSKSSTSGIPGRGGHRSSTSSIDSNVSSKSAGATTSKLREPTKIGSGRSSPVTVNQTDKEKEKVAVSDSESVSLSGSPKSSPTSASACGAQGLRQPGSKYPDIASPTFRRLFGAKAGGKSASAPNTEGVKSSSVMPSPSTTLARQGSLESPSSGTGSMGSAGGLSGSSSPLFNKPSDLTTDVISLSHSLASSPASVHSFTSGGLVWAANMSSSSAGSKDTPSYQSMTSLHTSSESIDLPLSHHGSLSGLTTGTHEVQSLLMRTGSVRSTLSESMQLDRNTLPKKGLRYTPSSRQANQEEGKEWLRSHSTGGLQDTGNQSPLVSPSAMSSSAAGKYHFSNLVSPTNLSQFNLPGPSMMRSNSIPAQDSSFDLYDDSQLCGSATSLEERPRAISHSGSFRDSMEEVHGSSLSLVSSTSSLYSTAEEKAHSEQIHKLRRELVASQEKVATLTSQLSANAHLVAAFEKSLGNMTGRLQSLTMTAEQKESELIELRETIEMLKAQNSAAQAAIQGALNGPDHPPKDLRIRRQHSSESVSSINSATSHSSIGSGNDADSKKKKKKNWVNSRGSELRSSFKQAFGKKKSTKPPSSHSDIEELTDSSLPASPKLPHNAGDCGSASMKPSQSASAICECTEAEAEIILQLKSELREKELKLTDIRLEALSSAHHLDQIREAMNRMQNEIEILKAENDRLKAETGNTAKPTRPPSESSSSTSSSSSRQSLGLSLNNLNITEAVSSDILLDDAGDATGHKDGRSVKIIVSISKGYGRAKDQKSQAYLIGSIGVSGKTKWDVLDGVIRRLFKEYVFRIDTSTSLGLSSDCIASYCIGDLIRSHNLEVPELLPCGYLVGDNNIITVNLKGVEENSLDSFVFDTLIPKPITQRYFNLLMEHHRIILSGPSGTGKTYLANKLAEYVITKSGRKKTEDAIATFNVDHKSSKELQQYLANLAEQCSADNNGVELPVVIILDNLHHVGSLSDIFNGFLNCKYNKCPYIIGTMNQGVSSSPNLELHHNFRWVLCANHTEPVKGFLGRYLRRKLIEIEIERNIRNNDLVKIIDWIPKTWHHLNSFLETHSSSDVTIGPRLFLPCPMDVEGSRVWFMDLWNYSLVPYILEAVREGLQMYGKRTPWEDPSKWVLDTYPWSSATLPQESPALLQLRPEDVGYESCTSTKEATTSKHIPQTDTEGDPLMNMLMKLQEAANYSSTQSCDSESTSHHEDILDSSLESTL

SEQ ID NO: 47552 - protein, 2200 aa, Homo sapiens
MQTVYTQVRSKPDSLEVLLTNLNPGTTYEIKVAAENSAGIGVFSDPFLFQTAESAPGKVVNLTVEAYNASAVKLIWYLPRQPNGKITSFKISVKHARSGIVVKDVSIRVEDILTGKLPECNENSESFLWSTASPSPTLGRVTPPSRTTHSSSTLTQNEISSVWKEPISFVVTHLRPYTTYLFEVSAATTEAGYIDSTIVRTPESVPEGPPQNCVTGNITGKSFSILWDPPTIVTGKFSYRVELYGPSGRILDNSTKDLKFAFTNLTPFTMYDVYIAAETSAGTGPKSNISVFTPPDVPGAVFDLQLAEVESTQVRITWKKPRQPNGIINQYRVKVLVPETGIILENTLLTGNNEYINDPMAPEIVNIVEPMVGLYEGSAEMSSDLHSLATFIYNSHPDKNFPARNRAEDQTSPVVTTRNQYITDIAAEQLSYVIRRLVPFTEHMISVSAFTIMGEGPPTVLSVRTRQQVPSSIKIINYKNISSSSILLYWDPPEYPNGKITHYTIYAMELDTNRAFQITTIDNSFLITGLKKYTKYKMRVAASTHVGESSLSEENDIFVRTSEDEPESSPQDVEVIDVTADEIRLKWSPPEKPNGIIIAYEVLYKNIDTLYMKNTSTTDIILRNLRPHTLYNISVRSYTRFGHGNQVSSLLSVRTSETVPDSAPENITYKNISSGEIELSFLPPSSPNGIIQKYTIYLKRSNGNEERTINTTSLTQNIKVLKKYTQYIIEVSASTLKGEGVRSAPISILTEEDAPDSPPQDFSVKQLSGVTVKLSWQPPLEPNGIILYYTVYVWNRSSLKTINVTETSLELSDLDYNVEYSAYVTASTRFGDGKTRSNIISFQTPEGAPSDPPKDVYYANLSSSSIILFWTPPSKPNGIIQYYSVYYRNTSGTFMQNFTLHEVTNDFDNMTVSTIIDKLTIFSYYTFWLTASTSVGNGNKSSDIIEVYTDQDIPEGFVGNLTYESISSTAINVSWVPPAQPNGLVFYYVSLILQQTPRHVRPPLVTYERSIYFDNLEKYTDYILKITPSTEKGFSDTYTAQLYIKTEEDVPETSPIINTFKNLSSTSVLLSWDPPVKPNGAIISYDLTLQGPNENYSFITSDNYIILEELSPFTLYSFFAAARTRKGLGPSSILFFYTDESVPLAPPQNLTLINCTSDFVWLKWSPSPLPGGIVKVYSFKIHEHETDTIYYKNISGFKTEAKLVGLEPVSTYSIRVSAFTKVGNGNQFSNVVKFTTQESVPDVVQNMQCMATSWQSVLVKWDPPKKANGIITQYMVTVERNSTKVSPQDHMYTFIKLLANTSYVFKVRASTSAGEGDESTCHVSTLPETVPSVPTNIAFSDVQSTSATLTWIRPDTILGYFQNYKITTQLRAQKCKEWESEECVEYQKIQYLYEAHLTEETVYGLKKFRWYRFQVAASTNAGYGNASNWISTKTLPGPPDGPPENVHVVATSPFSISISWSEPAVITGPTCYLIDVKSVDNDEFNISFIKSNEENKTIEIKDLEIFTRYSVVITAFTGNISAAYVEGKSSAEMIVTTLESAPKDPPNNMTFQKIPDEVTKFQLTFLPPSQPNGNIQVYQALVYREDDPTAVQIHNLSIIQKTNTFVIAMLEGLKGGHTYNISVYAVNSAGAGPKVPMRITMDIKAPARPKTKPTPIYDATGKLLVTSTTITIRMPICYYSDDHGPIKNVQVLVTETGAQHDGNVTKWYDAYFNKARPYFTNEGFPNPPCTEGKTKFSGNEEIYIIGADNACMIPGNEDKICNGPLKPKKQYLFKFRATNIMGQFTDSDYSDPVKTLGEGLSERTVEIILSVTLCILSIILLGTAIFAFARIRQKQKEGGTYSPQDAEIIDTKLKLDQLITVADLELKDERLTRLLSYRKSIKPISKKSFLQHVEELCTNNNLKFQEEFSELPKFLQDLSSTDADLPWNRAKNRFPNIKPYNNNRVKLIADASVPGSDYINASYISGYLCPNEFIATQGPLPGTVGDFWRMVWETRAKTLVMLTQCFEKGRIRCHQYWPEDNKPVTVFGDIVITKLMEDVQIDWTIRDLKIERHGDCMTVRQCNFTAWPEHGVPENSAPLIHFVKLVRASRAHDTTPMIVHCSAGVGRTGVFIALDHLTQHINDHDFVDIYGLVAELRSERMCMVQNLAQYIFLHQCILDLLSNKGSNQPICFVNYSALQKMDSLDAMEGDVELEWEETTM

SEQ ID NO: 47553 - protein, 516 aa, Homo sapiens
MTDFPKIFCETSQKLVSVEAFALAAKYYSVQNLGICTPFEQLLVALRGNQNQRIGENQKAVEFMNMKKSHEVQAMSELISSIADYYGIKQVIDLGSGKGYLSSFLSLKYGLKVYGIDSSNTNTHGAEERNRKLKKHWKLCHAQSRLDVNGLALKMAKERKVQNKVKNKADTEEVFNNSPTNQEKMPTSAILPDFSGSVISNIRNQMETLHSQPHQEENLCFENSFSLINLLPINAVEPTSSQQIPNRETSEANKERRKMTSKSSESNIYSPLTSFITADSELHDIIKDLEDCLMVGLHTCGDLAPNTLRIFTSNSEIKGVCSVGCCYHLLSEEFENQHKERTQEKWGFPMCHYLKEERWCCGRNARMSACLALERVAAGQGLPTESLFYRAVLQDIIKDCYGITKCDRHVGKIYSKCSSFLDYVRRSLKKLGLDESKLPEKIIMNYYEKYKPRMNELEAFNMLKVVLAPCIETLILLDRLCYLKEQEDIAWSALVKLFDPVKSPRCYAVIALKKQQ

SEQ ID NO: 47554 - protein, 194 aa, Homo sapiens
MITLKYVPGMDVLPSHCWISEMVVQLSDSLTDLLDKFSNISEGLSNYSIIDKLVNIVDDLVECVKENSSKDLKKSFKSPEPRLFTPEEFFRIFNRSIDAFKDFVVASETSDCVVSSTLSPEKGKAKNPPGDSSLHWAAMALPALFSLIIGFAFGALYWKKRQPSLTRAVENIQINEEDNEISMLQEKEREFQEV

SEQ ID NO: 47555 - protein, 288 aa, Homo sapiens
MYCDELKLKSVPMVPPGIKYLYLRNNQIDHIDEKAFENVTDLQWLILDHNLLENSKIKGRVFSKLKQLKKLHINHNNLTESVGPLPKSLEDLQLTHNKITKLGSFEGLVNLTFIHLQHNRLKEDAVSAAFKGLKSLEYLDLSFNQIARLPSGLPVSLLTLYLDNNKISNIPDEYFKRFNALQYLRLSHNELADSGIPGNSFNVSSLVELDLSYNKLKNIPTVNENLENYYLEVNQLEKFDIKSFCKILGPLSYSKIKHLRLDGNRISETSLPPDMYECLRVANEVTLN

SEQ ID NO: 47556 - protein, 81 aa, Homo sapiens
MTKIYHPNVDKLGRICLDILKDKWSPALQIRTVLLSIQALLSAPNPDDPLANDVAEQWKTNEAQAIETARAWTRLYAMNNI

SEQ ID NO: 47557 - protein, 146 aa, Homo sapiens
MTVNEAKEKLKEAPEGTFLIRDSSHSDYLLTISVKTSAGPTNLRIEYQDGKFRLDSIICVKSKLKQFDSVVHLIDYYVQMCKDKRTGPEAPRNGTVHLYLTKPLYTSAPSLQHLCRLTINKCTGAIWGLPLPTRLKDYLEEYKFQV

SEQ ID NO: 47558 - protein, 53 aa, Homo sapiens
MTDDPPTTKPLTARKFIWTNHKFNVTGTPEQYVPYSTTRKKIQEWIPPSTPYK

SEQ ID NO: 47559 - protein, 354 aa, Homo sapiens
MNYDKLSRALRYYYDKNIIKKVIGQKFVYKFVSFPEILKMDPHAVEISRESLLLQDSDCKASPEGREAHKHGLAALRSTSRNEYIHSGLYSSFTINSLQNPPDAFKAIKTEKLEEPPEDSPPVEEVRTVIRFVTNKTDKHVTRPVVSLPSTSEAAAASAFLASSVSAKISSLMLPNAASISSASPFSSRSPSLSPNSPLPSEHRSLFLEAACHDSDSLEPLNLSSGSKTKSPSLPPKAKKPKGLEISAPPLVLSGTDIGSIALNSPALPSGSLTPAFFTAQTPNGLLLTPSPLLSSIHFWSSLSPVAPLSPARLQGPSTLFQFPTLLNGHMPVPIPSLDRAASPVLLSSNSQKS

SEQ ID NO: 47560 - protein, 5 aa, Homo sapiens
MHFTG

SEQ ID NO: 47561 - protein, 346 aa, Homo sapiens [sequence omitted]

SEQ ID NO: 47562 - protein, 338 aa, Homo sapiens
MAPNSITLLGLAVNVVTTLVLISYCPTATEEAPYWTYLLCALGLFIYQSLDAIDGKQARRTNSCSPLGELFDHGCDSLSTVFMAVGASIAARLGTYPDWFFFCSFIGMFVFYCAHWQTYVSGMLRFGKVDVTEIQIALVIVFVLSAFGGATMWDYTIPILEIKLKILPVLGFLGGVIFSCSNYFHVILHGGVGKNGSTIAGTSVLSPGLHIGLIIILAIMIYKKSATDVFEKHPCLYILMFGCVFAKVSQKLVVAHMTKSELYLQDTVFLGPGLLFLDQYFNNFIDEYVVLWMAMVISSFDMVIYFSALCLQISRHLHLNIFKTACHQAPEQVHKHID

SEQ ID NO: 47563 - protein, 1119 aa, Homo sapiens
MLVLDPALPANITLKDLPSLYPSFHSASDIFNVAKPKNPSTNVSVVVFDSTKDVEDAHSGLLKGNSRQTVWRGYLTTDKEVPGLVLMQDLAFLSGFPPTFKETNQLKTKLPENLSSKVKLLQLYSEASVALLKLNNPKDFQELNKQTKKNMTIDGKELTISPAYLLWDLSAISQSKQDEDISASRFEDNEELRYSLRSIERHAPWVRNIFIVTNGQIPSWLNLDNPRVTIVTHQDVFRNLSHLPTFSSPAIESHIHRIEGLSQKFIYLNDDVMFGKDVWPDDFYSHSKGQKVYLTWPVPNCAEGCPGSWIKDGYCDKACNNSACDWDGGDCSGNSGGSRYIAGGGGTGSIGVGQPWQFGGGINSVSYCNQGCANSWLADKFCDQACNVLSCGFDAGDCGQDHFHELYKVILLPNQTHYIIPKGECLPYFSFAEVAKRGVEGAYSDNPIIRHASIANKWKTIHLIMHSGMNATTIHFNLTFQNTNDEEFKMQITVEVDTREGPKLNSTAQKGYENLVSPITLLPEAEILFEDIPKEKRFPKFKRHDVNSTRRAQEEVKIPLVNISLLPKDAQLSLNTLDLQLEHGDITLKGYNLSKSALLRSFLMNSQHAKIKNQAIITDETNDSLVAPQEKQVHKSILPNSLGVSERLQRLTFPAVSVKVNGHDQGQNPPLDLETTARFRVETHTQKTIGGNVTKEKPPSLIVPLESQMTKEKKITGKEKENSRMEENAENHIGVTEVLLGRKLQHYTDSYLGFLPWEKKKYFQDLLDEEESLKTQLAYFTDSKNTGRQLKDTFADSLRYVNKILNSKFGFTSRKVPAHMPHMIDRIVMQELQDMFPEEFDKTSFHKVRHSEDMQFAFSYFYYLMSAVQPLNISQVFDEVDTDQSGVLSDREIRTLATRIHELPLSLQDLTGLEHMLINCSKMLPADITQLNNIPPTQESYYDPNLPPVTKSLVTNCKPVTDKIHKAYKDKNKYRFEIMGEEEIAFKMIRTNVSHVVGQLDDIRKNPRKFVCLNDNIDHNHKDAQTVKAVLRDFYESMFPIPSQFELPREYRNRFLHMHELQEWRAYRDKLKFWTHCVLATLIMFTIFSFFAEQLIALKRKIFPRRRIHKEASPNRIRV

SEQ ID NO: 47564 - protein, 71 aa, Homo sapiens
MGYLDYRKKAIKDLGISPSTCSFNPGVIVANMTEWKHQRITKQLEKWMQKNVEYVKASLPFFPCLETKSFN

SEQ ID NO: 47565 - protein, 555 aa, Homo sapiens
MSSLNHPHIISIYEVFENKDKIVIIMEYASKGELYDYISERRRLSERETRHFFRQIVSAVHYCHKNGVVHRDLKLENILLDDNCNIKIADFGLSNLYQKDKFLQTFCGSPLYASPEIVNGRPYRGPEVDSWALGVLLYTLVYGTMPFDGFDHKNLIRQISSGEYREPTQPSDARGLIRWMLMVNPDRRATIEDIANHWWVNWGYKSSVCDCDALHDSESPLLARIIDWHHRSTGLQADTEAKMKGLAKPTTSEVMLERQRSLKKSKKENDFAQSGQDAVPESPSKLSSKRPKGILKKRSNSEHRSHSTGFIEGVVGPALPSTFKMEQDLCRTGVLLPSSPEAEVPGKLSPKQSATMPKKGILKKTQQRESGYYSSPERSESSELLDSNDVMGSSIPSPSPPDPARVTSHSLSCRRKGILKHSSKYSAGTMDPALVSPEMPTLESLSEPGVPAEGLSRSYSRPSSVISDDSVLSSDSFDLLDLQENRPARQRIRSCVSAENFLQIQDFEGLQNRPRPQYLKRYRNRLADSSFSLLTDMDDVTQVYKQALEICSKLN

SEQ ID NO: 47566 - protein, 289 aa, Homo sapiens
MTPVIEVWDLDIVDSLEPVFTLGSKLSKKKKKKGKKSSSAEGHTDAVLDLSWNKLIRNVLASASADNTVILWDMSLGKPAASLAVHTDKVQTLQFHPFEAQTLISGSYDKSVALYDCRSPDESHRMWRFSGQIERVTWNHFSPCHFLASTDDGFVYNLDARSDKPIFTLNAHNDEISGLDLSSQIKGCLVTASADKYVKIWDILGDRPSLVHSRDMKMGVLFCSSCCPDLPFIYAFGGQKEGLRVWDISTVSSVNEAFGRRERLVLGSARNSSISGPFGSRSSDTPMES

SEQ ID NO: 47567 - protein, 787 aa, Homo sapiens
MEQLTSSSVSNALPVSGSHLGLAASPTHSAIPAPGLPVAIPNLGPSLSSLPSALSLMLPMGIGDRGVMCGLPERNYTLPPPPYPHLESSYFRTILPGILSYLADRPPPQYIHPNSINVDGNTALSITNNPSALDPYQSNGNVGLEPGIVSIDSRSVNTHGAQSLHPSDGHEVALDTAITMENVSRVTSPISTDGMAEELTMDGVAGEHSQIPNGSRSHEPLSVDSVSNNLAADAVGHGGVIPMHGNGLELPVVMETDHIASRVNGMSDSALSDSIHTVAMSTNSVSVALSTSHNLASLESVSLHEVGLSLEPVAVSSITQEVAMGTGHVDVSSDSLSFVSPSLQMEDSNSNKENMATLFTIWCTLCDRAYPSDCPEHGPVTFVPDTPIESRARLSLPKQLVLRQSIVGAEVGVWTGETIPVRTCFGPLIGQQSHSMEVAEWTDKAVNHIWKIYHNGVLEFCIITTDENECNWMMFVRKARNREEQNLVAYPHDGKIFFCTSQDIPPENELLFYYSRDYAQQIGVPEHPDVHLCNCGKECNSYTEFKAHLTSHIHNHLPTQGHSGSHGPSHSKERKWKCSMCPQAFISPSKLHVHFMGHMGMKPHKCDFCSKAFSDPSNLRTHLKIHTGQKNYRCTLCDKSFTQKAHLESHMVIHTGEKNLKCDYCDKLFMRRQDLKQHVLIHTQERQIKCPKCDKLFLRTNHLKKHLNSHEGKRDYVCEKCTKAYLTKYHLTRHLKTCKGPTSSSSAPEEEEEDDSEEEDLADSVGTEDCRINSAVYSADESLSAHK

SEQ ID NO: 47568 - protein, 913 aa, Homo sapiens
MGPAWDQQEEGVSESDGDEYAMASSAESSPGEYEWEYDEEEEKNQLEIERLEEQLSINVYDYNCHVDLIRLLRLEGELTKVRMARQKMSEIFPLTEELWLEWLHDEISMAQDGLDREHVYDLFEKAVKDYICPNIWLEYGQYSVGGIGQKGGLEKVRSVFERALSSVGLHMTKGLALWEAYREFESAIVEAARLEKVHSLFRRQLAIPLYDMEATFAEYEEWSEDPIPESVIQNYNKALQQLEKYKPYEEALLQAEAPRLAEYQAYIDFEMKIGDPARIQLIFERALVENCLVPDLWIRYSQYLDRQLKVKDLVLSVHNRAIRNCPWTVALWSRYLLAMERHGVDHQVISVTFEKALNAGFIQATDYVEIWQAYLDYLRRRVDFKQDSSKELEELRAAFTRALEYLKQEVEERFNESGDPSCVIMQNWARIEARLCNNMQKARELWDSIMTRGNAKYANMWLEYYNLERAHGDTQHCRKALHRAVQCTSDYPEHVCEVLLTMERTEGSLEDWDIAVQKTETRLARVNEQRMKAAEKEAALVQQEEEKAEQRKRARAEKKALKKKKKIRGPEKRGADEDDEKEWGDDEEEQPSKRRRVENSIPAAGETQNVEVAAGPAGKCAAVDVEPPSKQKEKAASLKRDMPKVLHDSSKDSITVFVSNLPYSMQEPDTKLRPLFEACGEVVQIRPIFSNRGDFRGYCYVEFKEEKSALQALEMDRKSVEGRPMFVSPCVDKSKNPDFKVFRYSTSLEKHKLFISGLPFSCTKEELEEICKAHGTVKDLRLVTNRAGKPKGLAYVEYENESQASQAVMKMDGMTIKENIIKVAISNPPQRKVPEKPETRKAPGGPMLLPQTYGARGKGRTQLSLLPRALQRPSAAAPQAENGPAAAPAVAAPAATEAPKMSNADFAKLFLRK

SEQ ID NO: 47569 - protein, 969 aa, Homo sapiens
MINLLRCEDRIKLAVRLESAWADRVRYMVVVYSSGRQDTEENILLGVDFSSKESKSCTIGMVLRLWSDTKIHLDGDGGFSVSTAGRMHIFKPVSVQAMWSALQVLHKACEVARRHNYFPGGVALIWATYYESCISSEQSCINEWNAMQDLESTRPDSPALFVDKPTEGERTERLIKAKLRSIMMSQDLENVTSKEIRNELEKQMNCNLKELKEFIDNEMLLILGQMDKPSLIFDHLYLGSEWNASNLEELQGSGVDYILNVTREIDNFFPGLFAYHNIRVYDEETTDLLAHWNEAYHFINKAKRNHSKCLVHCKMGVSRSASTVIAYAMKEFGWPLEKAYNYVKQKRSITRPNAGFMRQLSEYEGILDASKQRHNKLWRQQTDSSLQQPVDDPAGPGDFLPETPDGTPESQLPFLDDAAQPGLGPPLPCCFRRLSDPLLPSPEDETGSLVHLEDPEREALLEEAAPPAEVHRPARQPQQGSGLCEKDVKKKLEFGSPKGRSGSLLQVEETEREEGLGAGRWGQLPTQLDQNLLNSENLNNNSKRSCPNGMEDDAIFGILNKVKPSYKSCADCMYPTASGAPEASRERCEDPNAPAICTQPAFLPHITSSPVAHLASRSRVPEKPASGPTEPPPFLPPAGSRRADTSGPGAGAALEPPASLLEPSRETPKVLPKSLLLKNSHCDKNPPSTEVVIKEESSPKKDMKPAKDLRLLFSNESEKPTTNSYLMQHQESIIQLQKAGLVRKHTKELERLKSVPADPAPPSRDGPASRLEASIPEESQDPAALHELGPLVMPSQAGSDEKSEAAPASLEGGSLKSPPPFFYRLDHTSSFSKDFLKTICYTPTSSSMSSNLTRSSSSDSIHSVRGKPGLVKQRTQEIETRLRLAGLTVSSPLKRSHSLAKLGSLTFSTEDLSSEADPSTVADSQDTTLSESSFLHEPQGTPRDPAATSKPSGKPAPENLKSPSWMSKS

SEQ ID NO: 47570 - protein, 2433 aa, Homo sapiens
MTDSKPITKSKSEANLIPSQEPFPASDNSGETPQRNGEGHTLPKTPSQAEPASHKGPKDAGRRRNSLPPSHQKPPRNPLSSSDAAPSPELQANGTGTQGLEATDTNGLSSSARPQGQQAGSPSKEDKKQANIKRQLMTNFILGSFDDYSSDEDSVAGSSRESTRKGSRASLGALSLEAYLTTGEAETRVPTMRPSMSGLHLVKRGREHKKLDLHRDFTVASPAEFVTRFGGDRVIEKVLIANNGIAAVKCMRSIRRWAYEMFRNERAIRFVVMVTPEDLKANAEYIKMADHYVPVPGGPNNNNYANVELIVDIAKRIPVQAVWAGWGHASENPKLPELLCKNGVAFLGPPSEAMWALGDKIASTVVAQTLQVPTLPWSGSGLTVEWTEDDLQQGKRISVPEDVYDKGCVKDVDEGLEAAERIGFPLMIKASEGGGGKGIRKAESAEDFPILFRQVQSEIPGSPIFLMKLAQHARHLEVQILADQYGNAVSLFGRDCSIQRRHQKIVEEAPATIAPLAIFEFMEQCAIRLAKTVGYVSAGTVEYLYSQDGSFHFLELNPRLQVEHPCTEMIADVNLPAAQLQIAMGVPLHRLKDIRLLYGESPWGVTPISFETPSNPPLARGHVIAARITSENPDEGFKPSSGTVQELNFRSSKNVWGYFSVAATGGLHEFADSQFGHCFSWGENREEAISNMVVALKELSIRGDFRTTVEYLINLLETESFQNNDIDTGWLDYLIAEKVQAEKPDIMLGVVCGALNVADAMFRTCMTDFLHSLERGQVLPADSLLNLVDVELIYGGVKYILKVARQSLTMFVLIMNGCHIEIDAHRLNDGGLLLSYNGNSYTTYMKEEVDSYRITIGNKTCVFEKENDPTVLRSPSAGKLTQYTVEDGGHVEAGSSYAEMEVMKMIMTLNVQERGRVKYIKRPGAVLEAGCVVARLELDDPSKVHPAEPFTGELPAQQTLPILGEKLHQVFHSVLENLTNVMSGFCLPEPVFSIKLKEWVQKLMMTLRHPSLPLLELQEIMTSVAGRIPAPVEKSVRRVMAQYASNITSVLCQFPSQQIATILDCHAATLQRKADREVFFINTQSIVQLVQRYRSGIRGYMKTVVLDLLRRYLRVEHHFQQAHYDKCVINLREQFKPDMSQVLDCIFSHAQVAKKNQLVIMLIDELCGPDPSLSDELISILNELTQLSKSEHCKVALRARQILIASHLPSYELRHNQVESIFLSAIDMYGHQFCPENLKKLILSETTIFDVLPTFFYHANKVVCMASLEVYVRRGYIAYELNSLQHRQLPDGTCVVEFQFMLPSSHPNRMTVPISITNPDLLRHSTELFMDSGFSPLCQRMGAMVAFRRFEDFTRNFDEVISCFANVPKDTPLFSEARTSLYSEDDCKSLREEPIHILNVSIQCADHLEDEALVPILRTFVQSKKNILVDYGLRRITFLIAQEKEFPKFFTFRARDEFAEDRIYRHLEPALAFQLELNRMRNFDLTAVPCANHKMHLYLGAAKVKEGVEVTDHRFFIRAIIRHSDLITKEASFEYLQNEGERLLLEAMDELEVAFNNTSVRTDCNHIFLNFVPTVIMDPFKIEESVRYMVMRYGSRLWKLRVLQAEVKINIRQTTTGSAVPIRLFITNESGYYLDISLYKEVTDSRSGNIMFHSFGNKQGPQHGMLINTPYVTKDLLQAKRFQAQTLGTTYIYDFPEMFRQALFKLWGSPDKYPKDILTYTELVLDSQGQLVEMNRLPGGNEVGMVAFKMRFKTQEYPEGRDVIVIGNDITFRIGSFGPGEDLLYLRASEMARAEGIPKIYVAANSGARIGMAEEIKHMFHVAWVDPEDPHKGFKYLYLTPQDYTRISSLNSVHCKHIEEGGESRYMITDIIGKDDGLGVENLRGSGMIAGESSLAYEEIVTISLVTCRAIGIGAYLVRLGQRVIQVENSHIILTGASALNKVLGREVYTSNNQLGGVQIMHYNGVSHITVPDDFEGVYTILEWLSYMPKDNHSPVPIITPTDPIDREIEFLPSRAPYDPRWMLAGRPHPTLKGTWQSGFFDHGSFKEIMAPWAQTVVTGRARLGGIPVGVIAVETRTVEVAVPADPANLDSEAKIIQQAGQVWFPDSAYKTAQAVKDFNREKLPLMIFANWRGFSGGMKDMYDQVLKFGAYIVDGLRQYKQPILIYIPPYAELRGGSWVVIDATINPLCIEMYADKESRGGVLEPEGTVEIKFRKKDLIKSMRRIDPAYKKLMEQLGEPDLSDKDRKDLEGRLKAREDLLLPIYHQVAVQFADFHDTPGRMLEKGVISDILEWKTARTFLYWRLRRLLLEDQVKQEILQASGELSHVHIQSMLRRWFVETEGAVKAYLWDNNQVVVQWLEQHWQAGDGPRSTIRENITYLKHDSVLKTIRGLVEENPEVAVDCVIYLSQHISPAERAQVVHLLSTMDSPAST

SEQ ID NO: 47571 - protein, 267 aa, Homo sapiens
MQTLTKQDTMLKAMFSGRMEVLTDSEGWILIDRCGKHFGTILNYLRDGAVPLPESRREIEELLAEAKYYLVQGLVEECQAALQNKDTYEPFCKVPVITSSKEEQKLIATSNKPAVKLLYNRSNNKYSYTSNSDDNMLKNIELFDKLSLRFNGRVLFIKDVIGDEICCWSFYGQGRKIAEVCCTSIVYATEKKQTKVEFPEARIYEETLNILLYEAQDGRGPDNALLEATGGAAGRSHHLDEDEERERIERVRRIHIKRPDDRAHLHQ

SEQ ID NO: 47572 - protein, 268 aa, Homo sapiens
MQTLTKQDTMLKAMFSGRMEVLTDSEGWILIDRCGKHFGTILNYLRDGAVPLPESRREIEELLAEAKYYLVQGLVEECQAALQQNKDTYEPFCKVPVITSSKEEQKLIATSNKPAVKLLYNRSNNKYSYTSNSDDNMLKNIELFDKLSLRFNGRVLFIKDVIGDEICCWSFYGQGRKIAEVCCTSIVYATEKKQTKVEFPEARIYEETLNILLYEAQDGRGPDNALLEATGGAAGRSHHLDEDEERERIERVRRIHIKRPDDRAHLHQ

SEQ ID NO: 47573 - protein, 130 aa, Homo sapiens
MYGAEWPKVGATLALMWLKRGLRFIQVFLQSICDGERDENHPNLIRVNATKAYEMALKKYHGWIVQKIFQAALYAAPYKSDFLKALSKGQNVTEEECLEKIRLFLVNYTATIDVIYEMYTQMNAELNYKV

SEQ ID NO: 47574 - protein, 668 aa, Homo sapiens
MDSLNKEPFRKNYNLITFDSLEPMQLLQVLSDVLAEIDPKQLVDIREEMPEQTAKRMLSLLGILKYKPSGNATDMSTFRQGLVIGSKPVIYPVLHWLLQRTNELKKRAYLARFLIKLEVPSEFLQDETVADTNKQYEELMEAFKTLHKEYEQLKISGFSTAEIRKDISAMEEEKDQLIKRVEHLKKRVETAQNHQWMLKIARQLRVEKEREEYLAQQKQEQKNQLFHAVQRLQRVQNQLKSMRQAAADAKPESLMKRLEEEIKFNLYMVTEKFPKELENKKKELHFLQKVVSEPAMGHSDLLELESKINEINTEINQLIEKKMMRNEPIEGKLSLYRQQASIISRKKEAKAEELQEAKEKLASLEREASVKRNQTREFDGTEVLKGDEFKRYVNKLRSKSTVFKKKHQIIAELKAEFGLLQRTEELLKQRHENIQQQLQTMEEKKGISGYSYTQEELERVSALKSEVDEMKGRTLDDMSEMVKKLYSLVSEKKSALASVIKELRQLRQKYQELTQECDEKKSQYDSCAAGLESNRSKLEQEVRRLREECLQEESRYHYTNCMIKNLEVQLRRATDEMKAYISSDQQEKRKAIREQYTKNTAEQENLGKKLREKQKVIRESHGPNMKQAKMWRDLEQLMECKKQCFLKQQSQTSIGQVIQEGGEDRLIL

SEQ ID NO: 47575 - protein, 29 aa, Homo sapiens
MDPDTKLIGNMALLPIRSQFKGPAPRERQ

SEQ ID NO: 47576 - protein, 276 aa, Homo sapiens [sequence omitted]

SEQ ID NO: 47577 - protein, 982 aa, Homo sapiens
MRMVHILTSVVGSKCEVQVKNGGIYEGVFKTYSPKCDLVLDAAHEKSTESSSGPKREEIMESILFKCSDFVVVQFKDMDSSYAKRDAFTDSAISAKVNGEHKEKDLEPWDAGELTANEELEALENDVSNGWDPNDMFRYNEENYGVVSTYDSSLSSYTVPLERDNSEEFLKREARANQLAEEIESSAQYKARVALENDDRSEEEKYTAVQRNSSEREGHSINTRENKYIPPGQRNREVISWGSGRQNSPRMGQPGSGSMPSRSTSHTSDFNPNSGSDQRVVNGGVPWPSPCPSPSSRPPSRYQSGPNSLPPRAATPTRPPSRPPSRPSRPPSHPSAHGSPAPVSTMPKRMSSEGPPRMSPKAQRHPRNHRVSAGRGSISSGLEFVSHNPPSEAATPPVARTSPSGGTWSSVVSGAKDSRLQDQRQNSPAGNKENIKPNETSPSFSKAENKGISPVVSEHRKQIDDLKKFKNDFRLQPSSTSESMDQLLNKNREGEKSRDLIKDKIEPSAKDSFIENSSSNCTSGSSKPNSPSISPSILSNTEHKRGPEVTSQGVQTSSPACKQEKDDKEEKKDAAEQVRKSTLNPNAKEFNPRSFSQPKPSTTPTSPRPQAQPSPSMVGHQQPTPVYTQPVCFAPNMMYPVPVSPGVQPLYPIPMTPMPVNQAKTYRAVPNMPQQRQDQHHQSAMMHPASAAGPPIAATPPAYSTQYVAYSPQQFPNQPLVQHVPHYQSQHPHVYSPVIQGNARMMAPPTHAQPGLVSSSATQYGAHEQTHAMYACPKLPYNKETSPSFYFAISTGSLAQQYAHPNATLHPHTPHPQPSATPTGQQQSQHGGSHPAPSPVQHHQHQAAQALHLASPQQQSAIYHAGLAPTPPSMTPASNTQSPQNSFPAAQQTVFTIHPSHVQPAYTNPPHMAHVPQAHVQSGMVPSHPTAHAPMMLMTTQPPGGPQAALAQSALQPIPVSTTAHFPYMTHPSVQAHHQQQL

SEQ ID NO: 47578 - protein, 1061 aa, Homo sapiens
MRMVHILTSVVGSKCEVQVKNGGIYEGVFKTYSPKCDLVLDAAHEKSTESSSGPKREEIMESILFKCSDFVVVQFKDMDSSYAKRDAFTDSAISAKVNGEHKEKDLEPWDAGELTANEELEALENDVSNGWDPNDMFRYNEENYGVVSTYDSSLSSYTVPLERDNSEEFLKREARANQLAEEIESSAQYKARVALENDDRSEEEKYTAVQRNSSEREGHSINTRENKYIPPGQRNREVISWGSGRQNSPRMGQPGSGSMPSRSTSHTSDFNPNSGSDQRVVNGGVPWPSPCPSPSSRPPSRYQSGPNSLPPRAATPTRPPSRPPSRPSRPPSHPSAHGSPAPVSTMPKRMSSEGPPRMSPKAQRHPRNHRVSAGRGSISSGLEFVSHNPPSEAATPPVARTSPSGGTWSSVVSGVPRLSPKTHRPRSPRQNSIGNTPSGPVLASPQAGIIPTEAVAMPIPAASPTPASPASNRAVTPSSEAKDSRLQDQRQNSPAGNKENIKPNETSPSFSKAENKGISPVVSEHRKQIDDLKKFKNDFRLQPSSTSESMDQLLNKNREGEKSRDLIKDKIEPSAKDSFIENSSSNCTSGSSKPNSPSISPSILSNTEHKRGPEVTSQGVQTSSPACKQEKDDKEEKKDAAEQVRKSTLNPNAKEFNPRSFSQPKPSTTPTSPRPQAQPSPSMVGHQQPTPVYTQPVCFAPNMMYPVPVSPGVQPLYPIPMTPMPVNQAKTYRAGKVKYLELELLRYVPNMPQQRQDQHHQSAMMHPASAAGPPIAATPPAYSTQYVAYSPQQFPNQPLVQHVPHYQSQHPHVYSPVIQGNARMMAPPTHAQPGLVSSSATQYGAHEQTHAMYACPKLPYNKETSPSFYFAISTGSLAQQYAHPNATLHPHTPHPQPSATPTGQQQSQHGGSHPAPSPVQHHQHQAAQALHLASPQQQSAIYHAGLAPTPPSMTPASNTQSPQNSFPAAQQTVFTIHPSHVQPAYTNPPHMAHVPQAHVQSGMVPSHPTAHAPMMLMTTQPPGGPQAALAQSALQPIPVSTTAHFPYMTHPSVQAHHQQQL

SEQ ID NO: 47579 - protein, 922 aa, Homo sapiens
MTEAITQIRAKGLQTAVLSNNFYLPNQKSFLPLDRKQFDVIVESCMEGICKPDPRIYKLCLEQLGLQPSESIFLDDLGTNLKEAARLGIHTIKVNDPETAVKELEALLGFTLRVGVPNTRPVKKTMEIPKDSLQKYLKDLLGIQTTGPLELLQFDHGQSNPTYYIRLANRDLVLRKKPPGTLLPSAHAIEREFRIMKALANAGVPVPNVLDLCEDSSVIGTPFYVMEYCPGLIYKDPSLPGLEPSHRRAIYTAMNTVLCKIHSVDLQAVGLEDYGKQGDYIPRQVRTWVKQYRASETSTIPAMERLIEWLPLHLPRQQRTTVVHGDFRLDNLVFHPEEPEVLAVLDWELSTLGDPLADVAYSCLAHYLPSSFPVLRGINDCDLTQLGIPAAEEYFRMYCLQMGLPPTENWNFYMAFSFFRVAAILQGVYKRSLTGQASSTYAEQTGKLTEFVSNLAWDFAVKEGFRVFKEMPFTNPLTRSYHTWARPQSQWCPTGSRSYSSVPEASPAHTSRGGLVISPESLSPPVRELYHRLKHFMEQRVYPAEPELQSHQASAARWSPSPLIEDLKEKAKAEGLWNLFLPLEADPEKKYGAGLTNVEYAHLCELMGTSLYAPEVCNCSAPDTGNMELLVRYGTEAQKARWLIPLLEGKARSCFAMTEPQVASSDATNIEASIREEDSFYVINGHKWWITGILDPRCQLCVFMGKTDPHAPRHRQQSVLLVPMDTPGIKIIRPLTVYGLEDAPGGHGEVRFEHVRVPKENMVLGPGRGFEIAQGRLGPGRIHHCMRLIGFSERALALMKARVKSRLAFGKPLVEQGTVLADIAQSRVEIEQARLLVLRAAHLMDLAGNKAAALDIAMIKMVAPSMASRVIDRAIQAFGAAGLSSDYPLAQFFTWARALRFADGPDEVHRATVAKLELKHRI

SEQ ID NO: 47580 - protein, 123 aa, Homo sapiens
MVHLTSSVPWWPSLTRTQPAWPLGHCLVRAAPVRGAGKAAGEGAGWLSSGLLPPGAGVLVTTVVAGGITILHPFMAASRPFFRDIVFYMVAVFLTFLMLFRGRVTLAWALGEQLWGSGVRSQG

SEQ ID NO: 47581 - protein, 436 aa, Homo sapiens
MFPSYKVKVTGLNPKTKYILLMDIVPADDHRYKFADNKWSVTGKAEPAMPGRLYVHPDSPATGAHWMRQLVSFQKLKLTNNHLDPFGHIILNSMHKYQPRLHIVKADENNGFGSKNTAFCTHVFPETAFIAVTSYQNHKITQLKIENNPFAKGFRGSDDMELHRMSRMQSKEYPVVPRSTVRQKVASNHSPFSSESRALSTSSNLGSQYQCENGVSGPSQDLLPPPNPYPLPQEHSQIYHCTKRKEEECSTTDHPYKKPYMETSPSEEDSFYRSSYPQQQGLGASYRTESAQRQACMYASSAPPSEPVPSLEDISCNTWPSMPSYSSCTVTTVQPMDRLPYQHFSAHFTSGPLVPRLAGMANHGSPQLGEGMFQHQTSVAHQPVVRQCGPQTGLQSPGTLQPPEFLYSHGVPRTLSPHQYHSVHGVGMVPEWSDNS

SEQ ID NO: 47582 - protein, 255 aa, Homo sapiens
MVLELNASDDRGIDIIRGPILSFASTRTIFKKGFKLVILDEADAMTQDAQNALRRVIEKFTENTRFCLICNYLSKIIPALQSRCTRFRFGPLTPELMVPRLEHVVEEEKVDISEDGMKALVTLSSGDMRRALNILQSTNMAFGKVTEETVYTCTGHPLKSDIANILDWMLNQDFTTAYRNITELKTLKGLALHDILTEIHLFVHRVDFPSSVRIHLLTKMADIEYRLSVGTNEKIQLSSLIAAFQVTRDLIVAEA

SEQ ID NO: 47583 - protein, 1732 aa, Homo sapiens
MIYGRSPFAEGTSARTFNNIMNFQRFLKFPDDPKVSSDFLDLIQSLLCGQKERLKFEGLCCHPFFSKIDWNNIRNSPPPFVPTLKSDDDTSNFDEPEKNSWVSSSPCQLSPSGFSGEELPFVGFSYSKALGILGRSESVVSGLDSPAKTSSMEKKLLIKSKELQDSQDKCHKMEQEMTRLHRRVSEVEAVLSQKEVELKASETQRSLLEQDLATYITECSSLKRSLEQARMEVSQEDDKALQLLHDIREQSRKLQEIKEQEYQAQVEEMRLMMNQLEEDLVSARRRSDLYESELRESRLAAEEFKRKATECQHKLLKAKDQGKPEVGEYAKLEKINAEQQLKIQELQEKLEKAVKASTEATELLQNIRQAKERAERELEKLQNREDSSEGIRKKLVEAEELEEKHREAQVSAQHLEVHLKQKEQHYEEKIKVLDNQIKKDLADKETLENMMQRHEEEAHEKGKILSEQKAMINAMDSKIRSLEQRIVELSEANKLAANSSLFTQRNMKAQEEMISELRQQKFYLETQAGKLEAQNRKLEEQLEKISHQDHSDKNRLLELETRLREVSLEHEEQKLELKRQLTELQLSLQERESQLTALQAARAALESQLRQAKTELEETTAEAEEEIQALTAHRDEIQRKFDALRNSCTVITDLEEQLNQLTEDNAELNNQNFYLSKQLDEASGANDEIVQLRSEVDHLRREITEREMQLTSQKQTMEALKTTCTMLEEQVMDLEALNDELLEKERQWEAWRSVLGDEKSQFECRVRELQRMLDTEKQSRARADQRITESRQVVELAVKEHKAEILALQQALKEQKLKAESLSDKLNDLEKKHAMLEMNARSLQQKLETERELKQRLLEEQAKLQQQMDLQKNHIFRLTQGLQEALDRADLLKTERSDLEYQLENIQVLYSHEKVKMEGTISQQTKLIDFLQAKMDQPAKKKKGLFSRRKEDPALPTQVPLQYNELKLALEKEKARCAELEEALQKTRIELRSAREEAAHRKATDHPHPSTPATARQQIAMSAIVRSPEHQPSAMSLLAPPSSRRKESSTPEEFSRRLKERMHHNIPHRFNVGLNMRATKCAVCLDTVHFGRQASKCLECQVMCHPKCSTCLPATCGLPAEYATHFTEAFCRDKMNSPGLQTKEPSSSLHLEGWMKVPRNNKRGQQGWDRKYIVLEGSKVLIYDNEAREAGQRPVEEFELCLPDGDVSIHGAVGASELANTAKADVPYILKMESHPHTTCWPGRTLYLLAPSFPDKQRWVTALESVVAGGRVSREKAEADAKLLGNSLLKLEGDDRLDMNCTLPFSDQVVLVGTEEGLYALNVLKNSLTHVPGIGAVFQIYIIKDLEKLLMIAGEERALCLVDVKKVKQSLAQSHLPAQPDISPNIFEAVKGCHLFGAGKIENGLCICAAMPSKVVILRYNENLSKYCIRKEIETSEPCSCIHFTNYSILIGTNKFYEIDMKQYTLEEFLDKNDHSLAPAVFAASSNSFPVSIVQVNSAGQREEYLLCFHEFGVFVDSYGRRSRTDDLKWSRLPLAFAYREPYLFVTHFNSLEVIEIQARSSAGTPARAYLDIPNPRYLGPAISSGAIYLASSYQDKLRVICCKGNLVKESGTEHHRGPSTSRSSPNKRGPPTYNEHITKRVASSPAPPEGPSHPREPSTPHRYREGRTELRRDKSPGRPLEREKSPGRMLSTRRERSPGRLFEDSSRGRLPAGAVRTPLSQVNKVWDQSSV

SEQ ID NO: 47584 - protein, 60 aa, Homo sapiens
MGIQLFETSAKENVNVEEMFNCITELVLRAKKDNLAKQQQQQQNDVVKLTKNSKRKKRCC

SEQ ID NO: 47585 - protein, 273 aa, Homo sapiens [sequence omitted]

SEQ ID NO: 47586 - protein, 128 aa, Homo sapiens
MSLRGKAVVLMGKNTMMRKAIRGHLENNPALEKLLPHIRGNVGFVFTKEDLTEIRDMLLANKVPAAARAGAIAPCEVTVPAQNTGLGPEKTSFFQALGITTKISRGTIEILVSGPGLPVLTRQMGSCF

SEQ ID NO: 47587 - protein, 209 aa, Homo sapiens
MKLPILRSNPEDQILYQTERYNEETFGYEVPIKEEGDYVLVLKFAEVYFAQSQQKVFDVRLNGHVVVKDLDIFDRVGHSTAHDEIIPMSIRKGKLSVQGEVSTFTGKLYIEFVKGYYDNPKVCALYIMAGTVDDVPKLQPHPGLEKKEEEEEEEEYDEGSNLKKQTNKNRVQSGPRTPNPYASDNSSLMFPILVAFGVFIPTLFCLCRL

SEQ ID NO: 47588 - protein, 743 aa, Homo sapiens [sequence omitted]

SEQ ID NO: 47589 - protein, 730 aa, Homo sapiens [sequence omitted]

SEQ ID NO: 47590 - protein, 927 aa, Homo sapiens
MEEEACDQQPQEEEEKDEEGEGRDRAPKPPTDGSTSPTSTPSEDQEALGKKPKAPALRFLKRTLSNESEESVKSTTLAVDYPKTPTGSPATEVSAKWTHLTEFELKGLKALVEKLESLPENKKCVPEGIEDPQALLEGVKNVLKEHADDDPSLAITGVPVVTWPKKTPKNRAVGRPKGKLGPASAVKLAANRTTAGARRRRTRCRKCEACLRTECGECHFCKDMKKFGGPGRMKQSCIMRQCIAPVLPHTAVCLVCGEAGKEDTVEEEEGKFNLMLMECSICNEIIHPGCLKIKESEGVVNDELPNCWECPKCNHAGKTGKQKRGPGFKYASNLPGSLLKEQKMNRDNKEGQEPAKRRSECEEAPRRRSDEHSKKVPPDGLLRRKSDDVHLRKKRKYEKPQELSGRKRASSLQTSPGSSSHLSPRPPLGSSLSPWWRSSLTYFQQQLKPGKEDKLFRKKRRSWKNAEDRMALANKPLRRFKQEPEDELPEAPPKTRESDHSRSSSPTAGPSTEGAEGPEEKKKVKMRRKRRLPNKELSRELSKELNHEIQRTENSLANENQQPIKSEPESEGEEPKRPPGICERPHRFSKGLNGTPRELRHQLGPSLRSPPRVISRPPPSVSPPKCIQMERHVIRPPPISPPPDSLPLDDGAAHVMHREVWMAVFSYLSHQDLCVCMRVCRTWNRWCCDKRLWTRIDLNHCKSITPLMLSGIIRRQPVSLDLSWTNISKKQLSWLINRLPGLRDLVLSGCSWIAVSALCSSSCPLLRTLDVQWVEGLKDAQMRDLLSPPTDNRPGQMDNRSKLRNIVELRLAGLDITDASLRLIIRHMPLLSKLHLSYCNHVTDQSINLLTAVGTTTRDSLTEINLSDCNKVTDQCLSFFKRCGNICHIDLRYCKQVTKEGCEQFIAEMSVSVQFGQVEEKLLQKLS

SEQ ID NO: 47591 - protein, 1932 aa, Homo sapiens
MIDPALKKGHHKLYRYDGQHFSLAMSSNRPVEIVEDPRVVGIWTKNKELELSVPKFKIDEFYVGPVPPKQVTFAKLNDNIRENFLRDMCKKYGEVEEVEILYNPKTKKHLGIAKVVFATVRGAKDAVQHLHSTSVMGNIIHVELDTKGETRMRFYELLVTGRYTPQTLPVGELDAVSPIVNETLQLSDALKRLKDGGLSAGCGSGSSSVTPNSGGTPFSQDTAYSSCRLDTPNSYGQGTPLTPRLGTPFSQDSSYSSRQPTPSYLFSQDPAVTFKARRHESKFTDAYNRRHEHHYVHNSPAVTAVAGATAAFRGSSDLPFGAVGGTGGSSGPPFKAQPQDSATFAHTPPPAQATPAPGFKSAFSPYQTPVAHFPPPPEEPTATAAFGARDSGEFRRAPAPPPLPPAEPLAKEKPGTPPGPPPPDTNSMELGGRPTFGWSPEPCDSPGTPTLESSPAGPEKPHDSLDSRIEMLLKEQRTKLLFLREPDSDTELQMEGSPISSSSSQLSPLAPFGTNSQPGFRGPTPPSSRPSSTGLEDISPTPLPDSDEDEELDLGLGPRPPPEPGPPDPAGLLSQTAEVALDLVGDRTPTSEKMDEGQQSSGEDMEISDDEMPSAPITSADCPKPMVVTPGAAAVAAPSVLAPTLPLPPPPGFPPLPPPPPPPPPQPGFPMPPPLPPPPPPPPPAHPAVTVPPPPLPAPPGVPPPPILPPLPPFPPGLFPVMQVDMSHVLGGQWGGMPMSFQMQTQVLSRLMTGQGACPYPPFMAAAAAAASAGLQFVNLPPYRGPFSLSNSGPGRGQHWPPLPKFDPSVPPPGYMPRQEDPHKATVDGVLLVVLKELKAIMKRDLNRKMVEVVAFRAFDEWWDKKERMAKASLTPVKSGEHKDEDRPKPKDRIASCLLESWGKGEGLGYEGLGLGIGLRGAIRLPSFKVKRKEPPDTTSSGDQKRLRPSTSVDEEDEESERERDRDMADTPCELAKRDPKGVGVRRRPARPLELDSGGEEDEKESLSASSSSSASSSSGSSTTSPSSSASDKEEEQESTEEEEEAEEEEEEEVPRSQLSSSSTSSTSDKDDDDDDSDDRDESENDDEDTALSEASEKDEGDSDEEETVSIVTSKAEATSSSESSESSEFESSSESSPSSSEDEEEVVAREEEEEEEEEEMVAEESMASAGPEDFEQDGEEAALAPGAPAVDSLGMEEEVDIETEAVAPEERPSMLDEPPLPVGVEEPADSREPPEEPGLSQEGAMLLSPEPPAKEVEARPPLSPERAPEHDLEVEPEPPMMLPLPLQPPLPPPRPPRPPSPPPEPETTDASHPSVPPEPLAEDHPPHTPGLCGSLAKSQSTETVPATPGGEPPLSGGSSGLSLSSPQVPGSPFSYPAPSPSLSSGGLPRTPGRDFSFTPTFSEPSGPLLLPVCPLPTGRRDERSGPLASPVLLETGLPLPLPLPLPLPLALPAVLRAQARAPTPLPPLLPAPLASCPPPMKRKPGRPRRSPPSMLSLDGPLVRPPAGAALGRELLLLPGQPQTPVFPSTHDPRTVTLDFRNAGIPAPPPPLPPQPPPPPPPPPVEPTKLPFKELDNQWPSEAIPPGPRGRDEVTEEYMELAKSRGPWRRPPKKRHEDLVPPAGSPELSPPQPLFRPRSEFEEMTILYDIWNGGIDEEDIRFLCVTYERLLQQDNGMDWLNDTLWVYHPSTSLSSAKKKKRDDGIREHVTGCARSEGFYTIDKKDKLRYLNSSRASTDEPPADTQGMSIPAQPHASTRAGSERRSEQRRLLSSFTGSCDSDLLKFNQLKFRKKKLKFCKSHIHDWGLFAMEPIAADEMVIEYVGQNIRQVIADMREKRYEDEGIGSSYMFRVDHDTIIDATKCGNFARFINHSCNPNCYAKVITVESQKKIVIYSKQHINVNEEITYDYKFPIEDVKIPCLCGSENCRGTLN

SEQ ID NO: 47592 - protein, 178 aa, Homo sapiens [sequence omitted]

SEQ ID NO: 47593 - protein, 179 aa, Homo sapiens
MVEKQKQQEIAAAAAATGGSVLNVAALLASGTQVTPQIAMAAQMAALQAKALAETGIAVPSYYNPAAVNPMKFAEQEKKRKMLWQGKKEGDKSQSAEIWEKLNFGNKDQNVKFRKLMGIKSEDEAGCSSVDEESYKTLKQQEEVFRNLDAQYEMARSQTHTQRGMGLGFTSSMRGMDAV

SEQ ID NO: 47594 - protein, 1968 aa, Homo sapiens
MTVKNLIDAEIIKGAKKFQLIDNLLFVLDTDNVLSLWDIYTLTPVWNWPSLHVEEFLLTTEADSPSSVTWQGITNLKLIALTASANKKMKNLMVYSLPTMEILYSLEVSSVSSLVQTGISTDTIYLLEGVCKNDPKLSEDSVSVLVLRCLTEALPENRLSRLLHKHRFAEAESFAIQFGLDVELVYKVKSNHILEKLALSSVDASEQTEWQQLVDDAKENLHKIQDDEFVVNYCLKAQWITYETTQEMLNYAKTRLLKKEDKTALIYSDGLKEVLRAHAKLTTFYGAFGPEKFSGSSWIEFLNNEDDLKDIFLQLKEGNLVCAQYLWLRHRANFESRFDVKMLESLLNSMSASVSLQKLCPWFKNDVIPFVRRTVPEGQIILAKWLEQAARNLELTDKANWPENGLQLAEIFFTAEKTDELGLASSWHWISLKDYQNTEEVCQLRTLVNNLRELITLHRKYNCKLALSDFEKENTTTIVFRMFDKVLAPELIPSILEKFIRVYMREHDLQEEELLLLYIEDLLNRCSSKSTSLFETAWEAKAMAVIACLSDTDLIFDAVLKIMYAAVVPWSAAVEQLVKQHLEMDHPKVKLLQESYKLMEMKKLLRGYGIREVNLLNKEIMRVVRYILKQDVPSSLEDALKVAQAFMLSDDEIYSLRIIDLIDREQGEDCLLLLKSLPPAEAEKTAERVIIWARLALQEEPDHSKEGKAWRMSVAKTSVDILKILCDIQKDNLQKKDECEEMLKLFKEVASLQENFEVFLSFEDYSNSSLVADLREQHIKAHEVAQAKHKPGSTPEPIAAEVRSPSMESKLHRQALALQMSKQELEAELTLRALKDGNIKTALKKCSDLFKYHCNADTGKLLFLTCQKLCQMLADNVPVTVPVGLNLPSMIHDLASQAATICSPDFLLDALELCKHTLMAVELSRQCQMDDCGILMKASFGTHKDPYEEWSYSDFFSEDGIVLESQMVLPVIYELISSLVPLAESKRYPLESTSLPYCSLNEGDGLVLPVINSISALLQNLQESSQWELALRFVVGSFGTCLQHSVSNFMNATLSEKLFGETTLVKSRHVVMELKEKAVIFIRENATTLLHKVFNCRLVDLDLALGYCTLLPQKDVFENLWKLIDKAWQNYDKILAISLVGSELASLYQEIEMGLKFRELSTDAQWGIRLGKLGISFQPVFRQHFLTKKDLIKALVENIDMDTSLILEYCSTFQLDCDAVLQLFIETLLHNTNAGQGQGDASMDSAKRRHPKLLAKALEMVPLLTSTKDLVISLSGILHKLDPYDYEMIEVVLKVIERADEKITNININQALSILKHLKSYRRISPPVDLEYQYMLEHVITLPSAAQTRLPFHLIFFGTAQNFWKILSTELSEESFPTLLLISKLMKFSLDTLYVSTAKHVFEKKLKPKLLKLTQAKSSTLINKEITKITQTIESCLLSIVNPEWAVAIAISLAQDIPEGSFKISALKFCLYLAERWLQNIPSQDEKREKAEALLKKLHIQYRRSGTEAVLIAHKLNTEEYLRVIGKPAHLIVSLYEHPSINQRIQNSSGTDYPDIHAAAKEIAEVNEINLEKVWDMLLEKWLCPSTKPGEKPSELFELQEDEALRRVQYLLLSRPIDYSSRMLFVFATSTTTTLGMHQLTFAHRTRALQCLFYLADKETIESLFKKPIEEVKSYLRCITFLASFETLNIPITYELFCSSPKEGMIKGLWKNHSHESMAVRLVTELCLEYKIYDLQLWNGLLQKLLGFNMIPYLRKVLKAISSIHSLWQVPYFSKAWQRVIQIPLLSASCPLSPDQLSDCSESLIAVLECPVSGDLDLIGVARQYIQLELPAFALACLMLMPHSEKRHQQIKNFLGSCDPQVILKQLEEHMNTGQLAGFSHQIRSLILNNIINKKEFGILAKTKYFQMLKMHAMNTNNITELVNYLANDLSLDEASVLITEYSKHCGKPVPPDTAPCEILKMFLSGLS

SEQ ID NO: 47595 - protein, 149 aa, Homo sapiens
MALLYPDCGGGRLDSHRAFVVKYAPGQDLELGCHYDNAELTLNVALGKVFTGGALYFGGLFQAPTALTEPLEVEHVVGQGVLHRGGQLHGARPLGTGERWNLVVWLRASAVRNSLCPMCCREPDLVDDEGFGDGFTREEPATVDVCALT

SEQ ID NO: 47596 - protein, 557 aa, Homo sapiens
MRNKDVAAEAVTGSGKTLAFVIPILEILLRREEKLKKSQVGAIIITPTRELAIQIDEVLSHFTKHFPEFSQILWIGGRNPGEDVERFKQQGGNIIVATPGRLEDMFRRKAEGLDLASCVRSLDVLVLDEADRLLDMGFEASINTILEFLPKQRRTGLFSATQTQEVENLVRAGLRNPVRVSVKEKGVAASSAQKTPSRLENYYMVCKADEKFNQLVHFLRNHKQEKHLVFFSTCACVEYYGKALEVLVKGVKIMCIHGKMKYKRNKIFMEFRKLQSGILVCTDVMARGIDIPEVNWVLQYDPPSNASAFVHRCGRTARIGHGGSALVFLLPMEESYINFLAINQKCPLQEMKPQRNTADLLPKLKSMALADRAVFEKGMKAFVSYVQAYAKHECNLIFRLKDLDFASLARGFALLRMPKMPELRGKQFPDFVPVDVNTDTIPFKDKIREKQRQKLLEQQRREKTENEGRRKFIKNKAWSKQKAKKEKKKKMNEKRKREEGSDIEDEDMEELLNDTRLLKKLKKGKITEEEFEKGLLTTGKRTIKTVDLGISDLEDDC

SEQ ID NO: 47597 - protein, 305 aa, Homo sapiens
MFRRKAEGLDLASCVRSLDVLVLDEADRLLDMGFEASINTILEFLPKQRRTGLFSATQTQEVENLVRAGLRNPVRVSVKEKGVAASSAQKTPSRLENYYMVCKADEKFNQLVHFLRNHKQEKHLVFFSTCACVEYYGKALEVLVKGVKIMCIHGKMKYKRNKIFMEFRKLQSGILVCTDVMARGIDIPEVNWVLQYDPPSNASAFVHRCGRTARIGHGGSALVFLLPMEESYINFLAINQKCPLQEMKPQRNTADLLPKLKSMALADRAVFEKGMKAFVSYVQAYAKHECNLIFRLKALLEVLPC

SEQ ID NO: 47598 - protein, 292 aa, Homo sapiens
MKEDPDMASAVAAIRTLLEFLKRDKGETIQGLRANLTSAIETLCGVDSSVAVSSGGELFLRFISLASLEYSDYSKCKKIMIERGELFLRRISLSRNKIADLCHTFIKDGATILTHAYSRVVLRVLEAAVAAKKRFSVYVTESQPDLSGKKMAKALCHLNVPVTVVLDAAVGYIMEKADLVIVGAEGVVENGGIINKIGTNQMAVCAKAQNKPFYVVAESFKFVRLFPLNQQDVPDKFKYKADTLKVAQTGQDLKEEHPWVDYTAPSLITLLFTDLGVLTPSAVSDELIKLYL

SEQ ID NO: 47599 - protein, 661 aa, Homo sapiens [sequence omitted]

SEQ ID NO: 47600 - protein, 760 aa, Homo sapiens
MQEQLQKLEVELREVTKNKEKLRKNLLELIEYTHMLRVTKTFVKRNVEFEPTYEEFPSLESDSLLDYSCMQRLGAKLGFVSGLINQGKVEAFEKMLWRVCKGYTIVSYAELDESLEDPETGEVIKWYVFLISFWGEQIGHKVKKICDCYHCHVYPYPNTAEERREIQEGLNTRIQDLYTVLHKTEDYLRQVLCKAAESVYSRVIQVKKMKAIYHMLNMCSFDVTNKCLIAEVWCPEADLQDLRRALEEGSRESGATIPSFMNIIPTKETPPTRIRTNKFTEGFQNIVDAYGVGSYREVNPALFTIITFPFLFAVMFGDFGHGFVMFLFALLLVLNENHPRLNQSQEIMRMFFNGRYILLLMGLFSVYTGLIYNDCFSKSVNLFGSGWNVSAMYSSSHPPAEHKKMVLWNDSVVRHNSILQLDPSIPGVFRGPYPLGIDPIWNLATNRLTFLNSFKMKMSVILGIIHMTFGVILGIFNHLHFRKKFNIYLVSIPELLFMLCIFGYLIFMIFYKWLVFSAETSRVAPSILIEFINMFLFPASKTSGLYTGQEYVQRVLLVVTALSVPVLFLGKPLFLLWLHNGRSCFGVNRSGYTLIRKDSEEEVSLLGSQDIEEGNHQVEDGCREMACEEFNFGEILMTQVIHSIEYCLGCISNTASYLRLWALSLAHAQLSDVLWAMLMRVGLRVDTTYGVLLLLPVIALFAVLTIFILLIMEGLSAFLHAIRLHWVEFQNKFYVGAGTKFVPFSFSLLSSKFNNDDSVA

SEQ ID NO: 47601 - protein, 197 aa, Homo sapiens [sequence omitted]

SEQ ID NO: 47602 - protein, 513 aa, Homo sapiens
MEFTWDEWQLLDSTQKYLYRDVILENYHNLISVGYHGTKPDLIFKLEQGEDPWIINAKISRQSCPDGWEEWYQNNQDELESIERSYACSVLGRLNLSKTHDSSRQRLYNTRGKSLTQNSAPSRSYLRKNPDKFHGYEEPYFLKHQRAHSIEKNCVCSECGKAFRCKSQLIVHLRIHTGERPYECSKCERAFSAKSNLNAHQRVHTGEKPYSCSECEKVFSFRSQLIVHQEIHTGGKPYGCSECGKAYSWKSQLLLHQRSHTGVKPYECSECGKAFSLKSPFVVHQRTHTGVKPHKCSECGKAFRSKSYLLVHIRMHTGEKPYQCSDCGKAFNMKTQLIVHQGVHTGNNPYQCGECGKAFGRKEQLTAHLRAHAGEKPYGCSECGKAFSSKSYLVIHRRTHTGERPYECSLCERAFCGKSQLIIHQRTHSTEKPYECNECEKAYPRKASLQIHQKTHSGEKPFKCSECGKAFTQKSSLSEHQRVHTGEKPWKCSECGKSFCWNSGLRIHRKTHK

SEQ ID NO: 47603 - protein, 557 aa, Homo sapiens [sequence omitted]

SEQ ID NO: 47604 - protein, 1124 aa, Homo sapiens
MVNNEQRQHAEHIFLSFRKSKSPFAVCKHILETSKVDYVLFQAATAIMEAVVREWILLEKGSIESLRTFLLTYVLQRPNLQKYVREQILLAVAVIVKRGSLDKSIDCKSIFHEVSQLISSGNPTVQTLACSILTALLSEFSSSSKTSNIGLSMEFHGNCKRVFQEEDLRQIFMLTVEVLQEFSRRENLNAQMSSVFQRYLALANQVLSWNFLPPNLGRHYIAMFESSQNVLLKPTESWRETLLDSRVMELFFTVHRKIREDSDMAQDSLQCLAQLASLHGPIFPDEGSQVDYLAHFIEGLLNTINGIEIEDSEAVGISSIISNLITVFPRNVLTAIPSELFSSFVNCLTHLTCSFGRSAALEEVLDKDDMVYMEAYDKLLESWLTLVQDDKHFHKGFFTQHAVQVFNSYIQCHLAAPDGTRNLTANGVASREEEEISELQEDDRDQFSDQLASVGMLGRIAAEHCIPLLTSLLEERVTRLHGQLQRHQQQLLASPGSSTVDNKMLDDLYEDIHWLILVTGYLLADDTQGETPLIPPEIMEYSIKHSSEVDINTTLQILGSPGEKASSIPGYNRTDSVIRLLSAILRVSEVESRAIRADLTHLLSPQMGKDIVWFLKRWAKTYLLVDEKLYDQISLPFSTAFGADTEGSQWIIGYLLQKVISNLSVWSSEQDLANDTVQLLVTLVERRERANLVIQCENWWNLAKQFASRSPPLNFLSSPVQRTLMKALVLGGFAHMDTETKQQYWTEVLQPLQQRFLRVINQENFQQMCQQEEVKQEITATLEALCGIAEATQIDNVAILFNFLMDFLTNCIGLMEVYKNTPETVNLIIEVFVEVAHKQICYLGESKAMNLYEACLTLLQVYSKNNLGRQRIDVTAEEEQYQDLLLIMELLTNLLSKEFIDFSDTDEVFRGHEPGQAANRSVSAADVVLYGVNLILPLMSQDLLKFPTLCNQYYKLITFICEIFPEKIPQLPEDLFKSLMYSLELGMTSMSSEVCQLCLEALTPLAEQCAKAQETDSPLFLATRHFLKLVFDMLVLQKHNTEMTTAAGEAFYTLVCLHQAEYSELVETLLSSQQDPVIYQRLADAFNKLTASSTPPTLDRKQKMAFLKSLEEFMANVGGLLCVK

SEQ ID NO: 47605 - protein, 322 aa, Homo sapiens
MKIREYFQKYGYSPRVKKNSVHEQEAINSDPELSNCENFQKTDVKDDLSDPPVASSCISEKSPRSPQLSDFGLERYIVSQVLPNPPQAVNNYKEEPVIVTPPTKQSLVKVLKTPKCALKMDDFECVTPKLEHFGISEYTMCLNEDYTMGLKNARNNKSEEAIDTESRLNDNVFATPSPIIQQLEKSDAEYTNSPLVPTFCTPGLKIPSTKNSIALVSTNYPLSKTNSSSNDLEVEDRTSLVLNSDTCFENLTDPSSPTISSYENLLRTPTPPEVTKIPEDILQLLSKYNSNLATPIAIKAVPPSKRFLKHGQNIRDVSNKEN

SEQ ID NO: 47606 - protein, 527 aa, Homo sapiens
MFDFEISGIHLDKEKRKRAVDLNVKILDLSSTFLMGTNFPNKIEKHLLPEHIRRNFTSAGDHIIIDGLHAESPDDLVREAAYKIFLYPNAGQLKCLEELLSSRDLLAKLVGYSTFSHRALQGTIAKNPETVMQFLEKLSDKLSERTLKDFEMIRGMKMKLNPQNSEVMPWDPPYYSGVIRAERYNIEPSLYCPFFSLGACMEGLNILLNRLLGISLYAEQPAKGEVWSEDVRKLAVVHESEGLLGYIYCDFFQRADKPHQDCHFTIRGGRLKEDGDYQLPVVVLMLNLPRSSRSSPTLLTPSMMENLFHEMGHAMHSMLGRTRYQHVTGTRCPTDFAEVPSILMEYFANDYRVVNQFARHYQTGQPLPKNMVSRLCESKKVCAAADMQLQVFYATLDQIYHGKHPLRNSTTDILKETQEKFYGLPYVPNTAWQLRFSHLVGYGARYYSYLMSRAVASMVWKECFLQDPFNRAAGERYRREMLAHGGGREPMLMVEGMLQKCPSVDDFVSALVSDLDLDFETFLMDSE

SEQ ID NO: 47607 - protein, 458 aa, Homo sapiens [sequence omitted]

SEQ ID NO: 47608 - protein, 755 aa, Homo sapiens
MYMGEEHLFSVEQITAMLLTKLKETAENSLKKPVTDCVISVPSFFTDAERRSVLDAAQIVGLNCLRLMNDMTAVALNYGIYKQDLPSLDEKPRIVVFVDMGHSAFQVSACAFNKGKLKVLGTAFDPFLGGKNFDEKLVEHFCAEFKTKYKLDAKSKIRALLRLYQECEKLKKLMSSNSTDLPLNIECFMNDKDVSGKMNRSQFEELCAELLQKIEVPLYSLLEQTHLKVEDVSAVEIVGGATRIPAVKERIAKFFGKDISTTLNADEAVARGCALQCAILSPAFKVREFSVTDAVPFPISLIWNHDSEDTEGVHEVFSRNHAAPFSKVLTFLRRGPFELEAFYSDPQGVPYPEAKIGRFVVQNVSAQKDGEKSRVKVKVRVNTHGIFTISTASMVEKVPTEENEMSSEADMECLNQRPPENPDTDKNVQQDNSEAGTQPQVQTDAQQTSQSPPSPELTSEENKIPDADKANEKKVDQPPEAKKPKIKVVNVELPIEANLVWQLGKDLLNMYIETEGKMIMQDKLEKERNDAKNAVEEYVYEFRDKLCGPYEKFICEQDHQNFLRLLTETEDWLYEEGEDQAKQAYVDKLEELMKIGTPVKVRFQEAEERPKMFEELGQRLQHYAKIAADFRNKDEKYNHIDESEMKKVEKSVNEVMEWMNNVMNAQAKKSLDQDPVVRAQEIKTKIKELNNTCEPVVTQPKPKIESPKLERTPNGPNIDKKEEDLEDKNNFGAEPPHQNGECYPNEKNSVNMDLD

SEQ ID NO: 47609 - protein, 2679 aa, Homo sapiens
MDPLNNINVDKDKPYLYCFRTSKGVGYSAHFVGNCLIVTSLKSKGKGFQHCVKYDFQPRKWYMISIVHIYNRWRNSEIRCYVNGQLVSYGDMAWHVNTNDSYDKCFLGSSETADANRVFCGQLGAVYVFSEALNPAQIFAIHQLGPGYKSTFKFKSESDIHLAEHHKQVLYDGKLASSIAFTYNAKATDAQLCLESSPKENASIFVHSPHALMLQDVKAIVTHSIHSAIHSIGGIQVLFPLFAQLDNRQLNDSQVETTVCATLLAFLVELLKSSVAMQEQMLGGKGFLVIGYLLEKSSRVHITRAVLEQFLSFAKYLDGLSHGAPLLKQLCDHILFNPAIWIHTPAKVQLSLYTYLSAEFIGTATIYTTIRRVGTVLQLMHTLKYYYWVINPADSSGITPKGLDGPRPSQKEIISLRAFMLLFLKQLILKDRGVKEDELQSILNYLLTMHEDENIHDVLQLLVALMSEHPASMIPAFDQRNGIRVIYKLLASKSESIWVQALKVLGYFLKHLGHKRKVEIMHTHSLFTLLGERLMLHTNTVTVTTYNTLYEILTEQVCTQVVHKPHPEPDSTVKIQNPMILKVVATLLKNSTPSAELMEVRRLFLSDMIKLFSNSRENRRCLLQCSVWQDWMFSLGYINPKNSEEQKITEMVYNIFRILLYHAIKYEWGGWRVWVDTLSIAHSKVTYEAHKEYLAKMYEEYQRQEEENIKKGKKGNVSTISGLSSQTTGAKGGMEIREIEDLSQSQSPESETDYPVSTDTRDLLMSTKVSDDILGNSDRPGSGVHVEVHDLLVDIKAEKVEATEVKLDDMDLSPETLVGGENGALVEVESLLDNVYSAAVEKLQNNVHGSVGIIKKNEEKDNGPLITLADEKEDLPNSSTSFLFDKIPKQEEKLLPELSSNHIIPNIQDTQVHLGVSDDLGLLAHMTGSVDLTCTSSIIEEKEFKIHTTSDGMSSISERDLASSTKGLEYAEMTATTLETESSSSKIVPNIDAGSIISDTERSDDGKESGKEIRKIQTTTTTQAVQGRSITQQDRDLRVDLGFRGMPMTEEQRRQFSPGPRTTMFRIPEFKWSPMHQRLLTDLLFALETDVHVWRSHSTKSVMDFVNSNENIIFVHNTIHLISQMVDNIIIACGGILPLLSAATSPTTELENIEVTQGMSAETAVTFLSRLMAMVDVLVFASSLNFSEIEAEKNMSSGGLMRQCLRLVCCVAVRNCLECRQRQRDRGNKSSHGSSKPQEVPQSVTATAASKTPLENVPGNLSPIKDPDRLLQDVDINRLRAVVFRDVDDSKQAQFLALAVVYFISVLMVSKYRDILEPQRETTRTGSQPGRNIRQEINSPTSTVVVIPSIPHPSLNHGFLAKLIPEQSFGHSFYKETPAAFPDTIKEKETPTPGEDIQVESSIPHTDSGIGEEQVASILNGAELETSTGPDAMSELLSTLSSEVKKSQESLTENPSETLKPATSISSISQTKGINVKEILKSLVAAPVEIAECGPEPIPYPDPALKRETQAILPMQFHSFDRSVVVPVKKPPPGSLAVTTVGATTAGSGLPTGSTSNIFAATGATPKSMINTTGAVDSGSSSSSSSSSFVNGATSKNLPAVQTVAPMPEDSAENMSITAKLERALEKVAPLLREIFVDFAPFLSRTLLGSHGQELLIEGLVCMKSSTSVVELVMLLCSQEWQNSIQKNAGLAFIELINEGRLLCHAMKDHIVRVANEAEFILNRQRAEDVHKHAEFESQCAQYAADRREEEKMCDHLISAAKHRDHVTANQLKQKILNILTNKHGAWGAVSHSQLHDFWRLDYWEDDLRRRRRFVRNAFGSTHAEALLKAAIEYGTEEDVVKSKKTFRSQAIVNQNAETELMLEGDDDAVSLLQEKEIDNLAGPVVLSTPAQLIAPVVVAKGTLSITTTEIYFEVDEDDSAFKKIDTKVLAYTEGLHGKWMFSEIRAVFSRRYLLQNTALEVFMANRTSVMFNFPDQATVKKVVYSLPRVGVGTSYGLPQARRISLATPRQLYKSSNMTQRWQRREISNFEYLMFLNTIAGRTYNDLNQYPVFPWVLTNYESEELDLTLPGNFRDLSKPIGALNPKRAVFYAERYETWEDDQSPPYHYNTHYSTATSTLSWLVRIEPFTTFFLNANDGKFDHPDRTFSSVARSWRTSQRDTSDVKELIPEFYYLPEMFVNSNGYNLGVREDEVVVNDVDLPPWAKKPEDFVRINRMALESEFVSCQLHQWIDLIFGYKQRGPEAVRALNVFHYLTYEGSVNLDSITDPVLREAMEAQIQNFGQTPSQLLIEPHPPRSSAMHLCFLPQSPLMFKDQMQQDVIMVLKFPSNSPVTHVAANTLPHLTIPAVVTVTCSRLFAVNRWHNTVGLRGAPGYSLDQAHHLPIEMDPLIANNSGVNKRQITDLVDQSIQINAHCFVVTADNRYILICGFWDKSFRVYSTETGKLTQIVFGHWDVVTCLARSESYIGGDCYIVSGSRDATLLLWYWSGRHHIIGDNPNSSDYPAPRAVLTGHDHEVVCVSVCAELGLVISGAKEGPCLVHTITGDLLRALEGPENCLFPRLISVSSEGHCIIYYERGRFSNFSINGKLLAQMEINDSTRAILLSSDGQNLVTGGDNGVVEVWQACDFKQLYIYPGCDAGIRAMDLSHDQRTLITGMASGSIVAFNIDFNRWHYEHQNRY

SEQ ID NO: 47610 - protein, 256 aa, Homo sapiens
MVTSITPGTTATQVMANSAGLNFINVVGSVCGAQALMSGSNPMLGCNTGAITPAGINLSGLLPSGGLLPNALPSAMQAASQAGVPFGLKNTSSLRPLNLLQLPGGSLIFNTLQQQQQQLSQFTPQQPQQPTTCSPQQPGEQGSEQGSTSQEQALSAQQAAVINLTGVGSFMQSQAAVLSQLGSAENRPEQSLPQQRFQLSSAFQQQQQQIQQLRFLQHQMAMAAAAAQTAQLHHHRHTGSQSKSKMKRGTPTTPKF

SEQ ID NO: 47611 - protein, 648 aa, Homo sapiens
MVTCFIIGLLFPVFSVCYLIAPKSPLGLFIRKPFIKFICHTASYLTFLFLLLLASQHIDRSDLNRQGPPPTIVEWMILPWVLGFIWGEIKQMWDGGLQDYIHDWWNLMDFVMNSLYLATISLKIVAFVKYSALNPRESWDMWHPTLVAEALFAIANIFSSLRLISLFTANSHLGPLQISLGRMLLDILKFLFIYCLVLLAFANGLNQLYFYYEETKGLTCKGIRCEKQNNAFSTLFETLQSLFWSIFGLINLYVTNVKAQHEFTEFVGATMFGTYNVISLVVLLNMLIAMMNNSYQLIADHADIEWKFARTKLWMSYFEEGGTLPTPFNVIPSPKSLWYLIKWIWTHLCKKKMRRKPESFGTIGRRAADNLRRHHQYQEVMRNLVKRYVAAMIRDAKTEEGLTEENFKELKQDISSFRFEVLGLLRGSKLSTIQSANASKESSNSADSDEKSDSEGNSKDKKKNFSLFDLTTLIHPRSAAIASERHNISNGSALVVQEPPREKQRKVNFVTDIKNFGLFHRRSKQNAAEQNANQIFSVSEEVARQQAAGPLERNIQLESRGLASRGDLSIPGLSEQCVLVDHRERNTDTLGLQVGKRVCPFKSEKVVVEDTVPIIPKEKHAKEEDSSIDYDLNLPDTVTHEDYVTTRL

SEQ ID NO: 47612 - protein, 172 aa, Homo sapiens [sequence omitted]

SEQ ID NO: 47613 - protein, 364 aa, Homo sapiens
MLLTVRHGTVRYRSSALLARTKNNIQRYFGTNSVICSKKDKQSVRTEETSKETSESQDSEKENTKKDLLGIIKGMKVELSTVNVRTTKPPKRRPLKSLEATLGRLRRATEYAPKKRIEPLSPELVAAASAVADSLPFDKQTTKSELLSQLQQHEEESRAQRDAKRPKISFSNIISDMKVARSATARVRSRPELRIQFDEGYDNYPGQEKTDDLKKRKNIFTGKRLNIFDMMAVTKEAPETDTSPSLWDVEFAKQLATVNEQPLQNGFEELIQWTKEGKLWEFPINNEAGFDDDGSEFHEHIFLEKHLESFPKQGPIRHFMELVTCGLSKNPYLSVKQKVEHIEWFRNYFNEKKDILKESNIQFN

SEQ ID NO: 47614 - protein, 29 aa, Homo sapiens
MLVRPRSLREEKFQKNCLNLTRISMNQEN

SEQ ID NO: 47615 - protein, 587 aa, Homo sapiens
MVPVGLPGQQLVSDSICVPGFDPSLNMMTGITPINPMIPGLGLVPPPPPTEVAVVKEIIHCKSCTLFPQNPNLPPPSTRERPPGCKTVFVGGLPENATEEIIQEVFEQCGDITAIRKSKKNFCHIRFAEEFMVDKAIYLSGYRMRLGSSTDKKDSGRLHVDFAQARDDFYEWECKQRMRAREERHRRKLEEDRLRPPSPPAIMHYSEHEAALLAEKLKDDSKFSEAITVLLSWIERGEVNRRSANQFYSMVQSANSHVRRLMNEKATHEQEMEEAKENFKNALTGILTQFEQIVAVFNASTRQKAWDHFSKAQRKNIDIWRKHSEELRNAQSEQLMGIRREEEMEMSDDENCDSPTKKMRVDESALAAQAYALKEENDSLRWQLDAYRNEVELLKQEKEQLFRTEENLTKDQQLQFLQQTMQGMQQQLLTIQEELNNKKSELEQAKEEQSHTQALLKVLQEQLKGTKELVETNGHSHEDSNEINVLTVALVNQDRENNIEKRSQGLKSEKEALLIGIISTFLHVHPFGANIEYLWSYMQQLDSKISANEIEMLLMRLPRMFKQEFTGVGATLEKRWKLCAFEGIKTT

SEQ ID NO: 47616 - protein, 109 aa, Homo sapiens
MKEELMQDLQNPGGNRITQVQEDITNLKDKIITVKESIIEKTCFLEEEKKTHEKLRKEIEVQHKRYDAILKRLHCQVNKLQSNRRQWQWNIQQLEKTAAELRKCIGMQE

SEQ ID NO: 47617 - protein, 549 aa, Homo sapiens
MAHPAMFPRRGSGSGSASALNAAGTGVGSNATSSEDFPPPSLLQPPPPAASSTSGPQPPPPQSLNLLSQAQLQAQPLAPGGTQMKKKSGFQITSVTPAQISASISSNNSIAEDTESYDDLDESHTEDLSSSEILDVSLSRATDLGEPERSSSEETLNNFQEAETPGAVSPNQPHLPQPHLPHLPQQNVVINGNAHPHHLHHHHQIHHGHHLQHGHHHPSHVAVASASITGGPPSSPVSRKLSTTGSSDSITPVAPTSAVSSSGSPASVMTNMRAPSTTGGIGINSVTGTSTVNNVNITAVGSFNPNVTSSMLGNVNISTSNIPSAAGVSVGPGVTSGVNVNILSGMGNGTISSSAAVSSVPNAAAGMTGGSVSSQQQQPTVNTSRFRVVKLDSSSEPFKKGRWTCTEFYEKENAVPATEGVLINKVVETVKQNPIEVTSERESTSGSSVSSSVSTLSHYTESVGSGEMGAPTVVVQQQQQQQQQQQQQPALQGVTLQQMDFGSTGPQSIPAVSIPQSISQSQISQVQLQSQELSYLTMKVVLLIVYLCM

SEQ ID NO: 47618 - protein, 1052 aa, Homo sapiens
MAHPAMFPRRGSGSGSASALNAAGTGVGSNATSSEDFPPPSLLQPPPPAASSTSGPQPPPPQSLNLLSQAQLQAQPLAPGGTQMKKKSGFQITSVTPAQISASISSNNSIAEDTESYDDLDESHTEDLSSSEILDVSLSRATDLGEPERSSSEETLNNFQEAETPGAVSPNQPHLPQPHLPHLPQQNVVINGNAHPHHLHHHHQIHHGHHLQHGHHHPSHVAVASASITGGPPSSPVSRKLSTTGSSDSITPVAPTSAVSSSGSPASVMTNMRAPSTTGGIGINSVTGTSTVNNVNITAVGSFNPNVTSSMLGNVNISTSNIPSAAGVSVGPGVTSGVNVNILSGMGNGTISSSAAVSSVPNAAAGMTGGSVSSQQQQPTVNTSRFRVVKLDSSSEPFKKGRWTCTEFYEKENAVPATEGVLINKVVETVKQNPIEVTSERESTSGSSVSSSVSTLSHYTESVGSGEMGAPTVVVQQQQQQQQQQQQQPALQGVTLQQMDFGSTGPQSIPAVSIPQSISQSQISQVQLQSQELSYQQKQGLQPVPLQATMSAATGIQPSPVNVVGVTSALGQQPSISSLAQPQLPYSQAAPPVQTPLPGAPPPQQLQYGQQQPMVSTQMAPGHVKSVTQNPASEYVQQQPILQTAMSSGQPSSAGVGAGTTVIPVAQPQGIQLPVQPTAVPAQPAGASVQPVGQAPAAVSAVPTGSQIANIGQQANIPTAVQQPSTQVPPSVIQQGAPPSSQVVPPAQTGIIHQGVQTSAPSLPQQLVIASQSSLLTVPPQPQGVEPVAQGIVSQQLPAVSSLPSASSISVTSQVSSTGPSGMPSAPTNLVPPQNIAQTPATQNGNLVQSVSQPPLIATNTNLPLAQQIPLSSTQFSAQSLAQAIGSQIEDARRAAEPSLVGLPQTISGDSGGMSAVSDGSSSSLAASASLFPLKVLPLTTPLVDGEDESSSGASVVAIDNKIEQAMDLVKSHLMYAVREEVEVLKEQIKELIEKNSQLEQENNLLKTLASPEQLAQFQAQLQTGSPPATTQPQGTTQPPAQPASQGSGPTA

SEQ ID NO: 47619 - protein, 233 aa, Homo sapiens
MKFAVYLPPKAETGKCPALYWLSGLTCTEQNFISKSGYHQSASEHGLVVIAPDTSPRGCNIKGEDESWDFGTGAGFYVDATEDPWKTNYRMYSYVTEELPQLINANFPVDPQRMSIFGHSMGGHGALICALKNPGKYKSVSAFAPICNPVLCPWGKKAFSGYLGTDQSKWKAYDATHLVKSYPGSQLDILIDQGKDDQFLLDGQLLPDNFIAACTEKKIPVVFRLQEASIRKL

SEQ ID NO: 47620 - protein, 119 aa, Homo sapiens
MSEFSYPVYRAFLEYLYTDSISLSPEEAVGLLDLATFYRENRLKKLCQQTIKQGICEENAIALLSAAVKYDAQDLEEFCFRFCINHLTVVTQTSGFAEMDHDLLKNFISKASRVGAFKN

SEQ ID NO: 47621 - protein, 143 aa, Homo sapiens
MEKRTCALCPKDVEYNVLYFAQSENIAAHENCLLYSSGLVECEDQDPLNPDRSFDVESVKKEIQRGRKLKCKFCHKRGATVGCDLKNCNKNYHFFCAKKDDAVPQSDGVRGIYKLLCQQHAQFPIIAQSGKFLKFSTVGFKER

SEQ ID NO: 47622 - protein, 258 aa, Homo sapiens
MCLQQLFEVKVFKEKHHSWFINQSVQSGGLLHFATPVDPLFLLLHYLIKADKEGKFQPLDQVVVDNVFPNCILLLKLPGLEKLLHHVTEEKGNPEIDNKKYYKYSKEKTLKWLEKKVNQTVAALKTNNVNVSSRVQSTAFFSGDQASTDKEEDYIRYAHGLISDYIPKELSDDLSKYLKLPEPSASLPNPPSKKIKLSDEPVEAKEDYTKFNTKDLKTEKKNSKMTAAQKALAKVDKSGMKSIDTFFGVKNKKKIGKV

SEQ ID NO: 47623 - protein, 301 aa, Homo sapiens
MCLQQLFEVKVFKEKHHSWFINQSVQSGGLLHFATPVDPLFLLLHYLIKADKEGKFQPLDQVVVDNVFPNCILLLKLPGLEKLLHHVTEEKGNPEIDNKKYYKYSKEKTLKWLEKKVNQTVAALKTNNVNVSSRVQSTAFFSGDQASTDKEEDYIRYAHGLISDYIPKELSDDLSKYLKLPEPSASLPNPPSKKIKLSDEPVEAKEDYTKFNTKDLKTEKKNSKMTAAQKALAKVDKSGMKTRSTNWSFCDGSTKTEKGQVMVVAPRKAWRFSLQLQTLPEDSDFFFCTFLENRQVPKGAF

SEQ ID NO: 47624 - protein, 1399 aa, Homo sapiens
MTCQSCVKSIEDRISNLKGIISMKVSLEQGSATVKYVPSVVCLQQVCHQIGDMGFEASIAEGKAASWPSRSLPAQEAVVKLRVEGMTCQSCVSSIEGKVRKLQGVVRVKVSLSNQEAVITYQPYLIQPEDLRDHVNDMGFEAAIKSKVAPLSLGPIDIERLQSTNPKRPLSSANQNFNNSETLGHQGSHVVTLQLRIDGMHCKSCVLNIEENIGQLLGVQSIQVSLENKTAQVKYDPSCTSPVALQRAIEALPPGNFKVSLPDGAEGSGTDHRSSSSHSPGSPPRNQVQGTCSTTLIAIAGMTCASCVHSIEGMISQLEGVQQISVSLAEGTATVLYNPSVISPEELRAAIEDMGFEASVVSESCSTNPLGNHSAGNSMVQTTDGTPTSVQEVAPHTGRLPANHAPDILAKSPQSTRAVAPQKCFLQIKGMTCASCVSNIERNLQKEAGVLSVLVALMAGKAEIKYDPEVIQPLEIAQFIQDLGFEAAVMEDYAGSDGNIELTITGMTCASCVHNIESKLTRTNGITYASVALATSKALVKFDPEIIGPRDIIKIIEEIGFHASLAQRNPNAHHLDHKMEIKQWKKSFLCSLVFGIPVMALMIYMLIPSNEPHQSMVLDHNIIPGLSILNLIFFILCTFVQLLGGWYFYVQAYKSLRHRSANMDVLIVLATSIAYVYSLVILVVAVAEKAERSPVTFFDTPPMLFVFIALGRWLEHLAKSKTSEALAKLMSLQATEATVVTLGEDNLIIREEQVPMELVQRGDIVKVVPGGKFPVDGKVLEGNTMADESLITGEAMPVTKKPGSTVIAGSINAHGSVLIKATHVGNDTTLAQIVKLVEEAQMSKAPIQQLADRFSGYFVPFIIIMSTLTLVVWIVIGFIDFGVVQRYFPNPNKHISQTEVIIRFAFQTSITVLCIACPCSLGLATPTAVMVGTGVAAQNGILIKGGKPLEMAHKIKTVMFDKTGTITHGVPRVMRVLLLGDVATLPLRKVLAVVGTAEASSEHPLGVAVTKYCKEELGTETLGYCTDFQAVPGCGIGCKVSNVEGILAHSERPLSAPASHLNEAGSLPAEKDAVPQTFSVLIGNREWLRRNGLTISSDVSDAMTDHEMKGQTAILVAIDGVLCGMIAIADAVKQEAALAVHTLQSMGVDVVLITGDNRKTARAIATQVGINKVFAEVLPSHKVAKVQELQNKGKKVAMVGDGVNDSPALAQADMGVAIGTGTDVAIEAADVVLIRNDLLDVVASIHLSKRTVRRIRINLVLALIYNLVGIPIAAGVFMPIGIVLQPWMGSAAMAASSVSVVLSSLQLKCYKKPDLERYEAQAHGHMKPLTASQVSVHIGMDDRWRDSPRATPWDQVSYVSQVSLSSLTSDKPSRHSAAADDDGDKWSLLLNGRDEEQYI

SEQ ID NO: 47625 - protein, 697 aa, Homo sapiens
MTPEATDNSTPFPWWEKSAFLKVEWPVFHVDLNRSAKAAEGTFQVGLFTSQPLCPFPVDKPNIVVDVIFTNSLPEARRNSRQPLEIRTSKRTELAQGQWVEFGCAPLGPEAYVTVVLKLLGRDSVITSTGPIDLAQKFGYKLVMVPELTCESGVEVTVLPPPCTFVQGVVTVFKEAPRYPGKRTIHLAENSLPLGERRTIFNCTLFDMGKNKYCFDFGISSRSHFSAKEECMLIQRNTAFQPSSPSPLQPQGPVKSNNIVTVTGISLCLFIIIATVLITLWRRFGRPAKCSTPARHNSIHSPSFRKNSDEENICELSEQRGSFSDGGDGPTGSPGDTGIPLTYRRSGPVPPEDDASGSESFQSNAQKIIPPLFSYRLAQQQLKEMKKKGLTETTKVYHVSQSPLTDTAIDAAPSAPLDLESPEEAAANKFRIKSPFPEQPAVSAGERPPSRLDLNVTQASCAISPSQTLIRKSQARHVGSRGGPSERSHARNAHFRRTASFHEARQARPFRERSMSTLTPRQAPAYSSRTRTCEQAEDRFRPQSRGAHLFPEKLEHFQEASGTRGPLNPLPKSYTLGQPLRKPDLGDHQAGLVAGIERTEPHRARRGPSPSHKSVSRKQSSPISPKDNYQRVSSLSPSQCRKDKCQSFPTHPEFAFYDNTSFGLTEAEQRMLDLPGYFGSNEEDETTSTLSVEKLVI

SEQ ID NO: 47626 - protein, 1159 aa, Homo sapiens [sequence omitted]

SEQ ID NO: 47627 - protein, 1078 aa, Homo sapiens
MPRRKGPQHPPPPSGPEEPGEKRPKFHLNIRTLTDDMLDKFASIRIPGSKKERPPLPNLKTAFASSDCSAAPLEMMENFPKPLSENELLELFEKMMEDMNLNEDKKAPLREKDFSIKKEMVMQYINTASKTGSLKRSRQISPQEFIHELKMGSADERLVTCLESLRVSLTSNPVSWVESFGHEGLGLLLDILEKLISGKIQEKVVKKNQHKVIQCLKALMNTQYGLERIMSEERSLSLLAKAVDPRHPNMMTDVVKLLSAVCIVGEESILEEVLEALTSAGEEKKIDRFFCIVEGLRHNSVQLQVACMQLINALVTSPDDLDFRLHIRNEFMRCGLKEILPNLKCIKNDGLDIQLKVFDEHKEEDLFELSHRLEDIRAELDEAYDVYNMVWSTVKETRAEGYFISILQHLLLIRNDYFIRQQYFKLIDECVSQIVLHRDGMDPDFTYRKRLDLDLTQFVDICIDQAKLEEFEEKASELYKKFEKEFTDHQETQAELQKKEAKINELQAELQAFKSQFGALPADCNIPLPPSKEGGTGHSALPPPPPLPSGGGVPPPPPPPPPPPLPGMRMPFSGPVPPPPPLGFLGGQNSPPLPILPFGLKPKKEFKPEISMRRLNWLKIRPHEMTENCFWIKVNENKYENVDLLCKLENTFCCQQKERREEEDIEEKKSIKKKIKELKFLDSKIAQNLSIFLSSFRVPYEEIRMMILEVDETRLAESMIQNLIKHLPDQEQLNSLSQFKSEYSNLCEPEQFVVVMSNVKRLRPRLSAILFKLQFEEQVNNIKPDIMAVSTACEEIKKSKSFSKLLELVLLMGNYMNAGSRNAQTFGFNLSSLCKLKDTKSADQKTTLLHFLVEICEEKYPDILNFVDDLEPLDKASKVSVETLEKNLRQMGRQLQQLEKELETFPPPEDLHDKFVTKMSRFVISAKEQYETLSKLHENMEKLYQSIIGYYAIDVKKVSVEDFLTDLNNFRTTFMQAIKENIKKREAEEKEKRVRIAKELAERERLERQQKKKRLLEMKTEGDETGVMDNLLEALQSGAAFRDRRKRTPMPKDVRQSLSPMSQRPVLKVCNHGNKPYL

SEQ ID NO: 47628 - protein, 92 aa, Homo sapiens [sequence omitted]

SEQ ID NO: 47629 - protein, 15 aa, Homo sapiens
MGQQVLLLPLIKFHH

SEQ ID NO: 47630 - protein, 680 aa, Homo sapiens
MRGDMCPFDHGSDPVVVEDVNLPGMLPFPAQPPVVEGPPPPGLPPPPPILTPPPVNLRPPVPPPGPLPPSLPPVTGPPPPLPPLQPSGMDAPPNSATSSVPTVVTTGIHHQPPPAPPSLFTADTYDTDGYNPEAPSITNTSRPMYRHRVHAQRPNLIGLTSGDMDLPPREKPPNKSSMRIVVDSESRKRTIGSGEPGVPTKKTWFDKPNFNRTNSPGFQKKVQFGNENTKLELRKVPPELNNISKLNEHFSRFGTLVNLQVAYNGDPEGALIQFATYEEAKKAISSTEAVLNNRFIKVYWHREGSTQQLQTTSPKVMQPLVQQPILPVVKQSVKERLGPVPSSTIEPAEAQSASSDLPQVLSTSTGLTKTVYNPAALKAAQKTLLVSTSAVDNNEAQKKKQEALKLQQDVRKRKQEILEKHIETQKMLISKLEKNKTMKSEDKAEIMKTLEVLTKNITKLKDEVKAASPGRCLPKSIKTKTQMQKELLDTELDLYKKMQAGEEVTELRRKYTELQLEAAKRGILSSGRGRGIHSRGRGAVHGRGRGRGRGRGVPGHAVVDHRPRALEISAFTESDREDLLPHFAQYGEIEDCQIDDSSLHAVITFKTRAEAEAAAVHGARFKGQDLKLAWNKPVTNISAVETEEVEPDEEEFQEESLVDDSLLQDDDEEEEDNESRSWRR

SEQ ID NO: 47631 - protein, 704 aa, Homo sapiens
MRGDMCPFDHGSDPVVVEDVNLPGMLPFPAQPPVVEGPPPPGLPPPPPILTPPPVNLRPPVPPPGPLPPSLPPVTGPPPPLPPLQPSGMDAPPNSATSSVPTVVTTGIHHQPPPAPPSLFTADTYDTDGYNPEAPSITNTSRPMYRHRVHAQRPNLIGLTSGDMDLPPREKPPNKSSMRIVVDSESRKRTIGSGEPGVPTKKTWFDKPNFNRTNSPGFQKKVQFGNENTKLELRKVPPELNNISKLNEHFSRFGTLVNLQVAYNGDPEGALIQFATYEEAKKAISSTEAVLNNRFIKVYWHREGSTQQLQTTSPKVMQPLVQQPILPVVKQSVKERLGPVPSSTIEPAEAQSASSDLPQNVTKLSVKDRLGFVSKPSVSATEKVLSTSTGLTKTVYNPAALKAAQKTLLVSTSAVDNNEAQKKKQEALKLQQDVRKRKQEILEKHIETQKMLISKLEKNKTMKSEDKAEIMKTLEVLTKNITKLKDEVKAASPGRCLPKSIKTKTQMQKELLDTELDLYKKMQAGEEVTELRRKYTELQLEAAKRGILSSGRGRGIHSRGRGAVHGRGRGRGRGRGVPGHAVVDHRPRALEISAFTESDREDLLPHFAQYGEIEDCQIDDSSLHAVITFKTRAEAEAAAVHGARFKGQDLKLAWNKPVTNISAVETEEVEPDEEEFQEESLVDDSLLQDDDEEEEDNESRSWRR

SEQ ID NO: 47632 - protein, 856 aa, Homo sapiens
MPFQKHVYYPLASGPEGPDVAVAAAAAGAASMACAPPSAASGPLPFFQFRPRLESVDWRRLSAIDVDKVAGAVDVLTLQENIMNITFCKLEDEKCPHCQSGVDPVLLKLIRLAQFTIEYLLHSQEFLTSQLHTLEERLRLSHCDGEQSKKLLTKQAGEIKTLKEECKRRKKMISTQQLMIEAKANYYQCHFCDKAFMNQAFLQSHIQRRHTEENSHFEYQKNAQIEKLRSEIVVLKEELQLTRSELEAAHHASAVRFSKEYEMQKTKEEDFLKLFDRWKEEEKEKLVDEMEKVKEMFMKEFKELTSKNSALEYQLSEIQKSNMQIKSNIGTLKDAHEFKEDRSPYPQDFHNVMQLLDSQESKWTARVQAIHQEHKKEKGRLLSHIEKLRTSMIDDLNASNVFYKKRIEELGQRLQEQNELIITQRQQIKDFTCNPLNSISEPKGNPLAWQAFESQPAAPAVPMNAPALHTLETKSSLPMVHEQAFSSHILEPIEELSEEEKGRENEQKLNNNKMHLRKALKSNSSLTKGLRTMVEQNLMEKLETLGINADIRGISSDQLHRVLKSVESERHKQEREIPNFHQIREFLEHQVSCKIEEKALLSSDQCSVSQMDTLSTGEVPKMIQLPSKNRQLIRQKAVSTDRTSVPKIKKNVMEDPFPRKSSTITTPPFSSEEEQEDDDLIRAYASPGPLPVPPPQNKGSFGKNTVKSDADGTEGSEIEDTDDSPKPAGVAVKTPTEKVEKMFPHRKNVNKPVGGTNVPEMFIKKEELQELKCADVEDEDWDISSLEEEISLGKKSGKEQKEPPPAKNEPHFAHVLNAWGAFNPKGPKGEGLQENESSTLKSSLVTVTDWSDTSDV

SEQ ID NO: 47633 - protein, 213 aa, Homo sapiens
MSDFIMKVDALMSSVPKRASRYDVTFLRENHSVIKTNPQENDMFFNVIAIVDPLTREAQKMAQLLVVLGKIINMKIKLFMNCRGRLSEAPLESFYRFVLEPELMSGANDVSSLGPVAKFLDIPESPLLILNMITPEGWLVETVHSNCDLDNIHLKDTEKTVTAEYELEYLLLEGQCFDKVTEQPPRGLQFTLGTKNKPAVVDTIVMAHHVSII

SEQ ID NO: 47634 - protein, 1209 aa, Homo sapiens
MQVTTDGKPKIVDIIDTTGSGDVNTATEVEPKDGEIVGLSGRVLKIPASWTNPSGKYHIGIKNGYDFYPKALKERIQKERKEKIWDPVHRVALAEACRKQEEFDVANNGSSQANKLIKEELQSQVELLNSFEKKYSDPGPVYDCLVWHDGEVWRACIDSNEDGDLSKSTVLRNYKEAQEYGSFGTAEMLNYSVNIYDDGNLLSIVTSGGAHGTHVASIAAGHFPEEPERNGVAPGAQILSIKIGDTRLSTMETGTGLIRAMIEVINHKCDLVNYSYGEATHWPNSGRICEVINEAVWKHNIIYVSSAGNNGPCLSTVGCPGGTTSSVIGVGAYVSPDMMVAEYSLREKLPANQYTWSSRGPSADGALGVSISAPGGAIASVPNWTLRGTQLMNGTSMSSPNACGGIALILSGLKANNIDYTVHSVRRALENTAVKADNIEVFAQGHGIIQVDKAYDYLVQNTSFANKLGFTVTVGNNRGIYLRDPVQVAAPSDHGVGIEPVFPENTENSEKISLQLHLALTSNSSWVQCPSHLELMNQCRHINIRVDPRGLREGLHYTEVCGYDIASPNAGPLFRVPITAVIAAKVNESSHYDLAFTDVHFKPGQIRRHFIEVPEGATWAEVTVCSCSSEVSAKFVLHAVQLVKQRAYRSHEFYKFCSLPEKGTLTEAFPVLGGKAIEFCIARWWASLSDVNIDYTISFHGIVCTAPQLNIHASEGINRFDVQSSLKYEDLAPCITLKNWVQTLRPVSAKTKPLGSRDVLPNNRQLYEMVLTYNFHQPKSGEVTPSCPLLCELLYESEFDSQLWIIFDQNKRQMGSGDAYPHQYSLKLEKGDYTIRLQIRHEQISDLERLKDLPFIVSHRLSNTLSLDIHENHSFALLGKKKSSNLTLPPKYNQPFFVTSLPDDKIPKGAGPGCYLAGSLTLSKTELGKKAGQSAAKRQGKFKKDVIPVHYYLIPPPTKTKNGSKDKEKDSEKEKDLKEEFTEALRDLKIQWMTKLDSSDIYNELKETYPNYLPLYVARLHQLDAEKERMKRLNEIVDAANAVISHIDQTALAVYIAMKTDPRPDAATIKNDMDKQKSTLVDALCRKGCALADHLLHTQAQDGAISTDAEGKEEEGESPLDSLAETFWETTKWTDLFDNKVLTFAYKHALVNKMYGRGLKFATKLVEEKPTKENWKNCIQLMKLLGWTHCASFTENWLPIMYPPDYCVF

SEQ ID NO: 47635 - protein, 1196 aa, Homo sapiens [sequence omitted]

SEQ ID NO: 47636 - protein, 258 aa, Homo sapiens
MPTGIPHENIFIRTKDGIRLNLILIRYTGDNSPYSPTIIYFHGNAGNIGHRLPNALLMLVNLKVNLLLVDYRGYGKSEGEASEEGLYLDSEAVLDYVMTRPDLDKTKIFLFGRSLGGAVAIHLASENSHRISAIMVENTFLSIPHMASTLFSFFPMRYLPLWCYKNKFLSYRKISQCRMPSLFISGLSDQLIPPVMMKQLYELSPSRTKRLAIFPDGTHNDTWQCQGYFTALEQFIKEVVKSHSPEEMAKTSSNVTII

SEQ ID NO: 47637 - protein, 341 aa, Homo sapiens
MENTLQLVRNIIPPLSSTKHKGQDGRIGVVGGCQEYTGAPYFAAISALKVGADLSHVFCASAAAPVIKAYSPELIVHPVLDSPNAVHEVEKWLPRLHALVVGPGLGRDDALLRNVQGILEVSKARDIPVVIDADGLWLVAQQPALIHGYRKAVLTPNHVEFSRLYDAVLRGPMDSDDSHGSVLRLSQALGNVTVVQKGERDILSNGQQVLVCSQEGSSRRCGGQGDLLSGSLGVLVHWALLAGPQKTNGGISDLKLTIWGPEIETGVKTRAQGSCGPRTTTPTSPHLLLSPSPQVQPSPGGRVWRLLSHQAVQPPSLPEARSLHHHLRHDRRGGGRLQQAL

SEQ ID NO: 47638 - protein, 449 aa, Homo sapiens
MGITDVDDKIIKRANEMNISPASLASLYEEDFKQDMAALKVLPPTVYLRVTENIPQIISFIEGIIARGNAYSTAKGNVYFDLKSRGDKYGKLVGVVPGPVGEPADSDKRHASDFALWKAAKPQEVFWASPWGPGRPGWHIECSAIASMVFGSQLDIHSGGIDLAFPHHENEIAQCEVFHQCEQWGNYFLHSGHLHAKGKEEKMSKSLKNYITIKDFLKTFSPDVFRFFCLRSSYRSAIDYSDSAMLQAQQLLLGLGSFLEDARAYMKGQLACGSVREAMLWERLSSTKRAVKAALADDFDTPRVVDAILGLAHHGNGQLRASLKEPEGPRSPAVFGAIISYFEQFFETVGISLANQQYVSGDGSEATLHGVVDELVRFRQKVRQFALAMPEATGDARRQQLLERQPLLEACDTLRRGLTAHGINIKDRSSTTSTWELLDQRTKDQKSAG

SEQ ID NO: 47639 - protein, 497 aa, Homo sapiens [sequence omitted]

SEQ ID NO: 47640 - protein, 665 aa, Homo sapiens [sequence omitted]

SEQ ID NO: 47641 - protein, 582 aa, Homo sapiens
MEITEAALVRDILYVFQGIDGKNIKMNNTENCYKVEGKANLSRSLRDTAVRLSELGWLHNKIRRYTDQRSLDRSFGLVGQSFCAALHQELREYYRLLSVLHSQLQLEDDQGVNLGLESSLTLRRLLVWTYDPKIRLKTLAALVDHCQGRKGGELASAVHAYTKTGDPYMRSLVQHILSLVSHPVLSFLYRWIYDGELEDTYHEFFVASDPTVKTDRLWHDKYTLRKSMIPSFMTMDQSRKVLLIGKSINFLHQVCHDQTPTTKMIAVTKSAESPQDAADLFTDLENAFQGKIDAAYFETSKYLLDVLNKKYSLLDHMQAMRRYLLLGQGDFIRHLMDLLKPELVRPATTLYQHNLTGILETAVRATNAQFDSPEILRRLDVRLLEVSPGDTGWDVFSLDYHVDGPIATVFTRECMSHYLRVFNFLWRAKRMEYILTDIRKGHMCNAKLLRNMPEFSGVLHQCHILASEMVHFIHQMQYYITFEVLECSWDELWNKVQQAQDLDHIIAAHEVFLDTIISRCLLDSDSRALLNQLRAVFDQIIELQNAQDAIYRAALEELQRRLQFEEKKKQREIEVEMCLYCV

SEQ ID NO: 47642 - protein, 854 aa, Homo sapiens
MVKQTAQMLQSFGTELAETELPNDVQSTSSVLCAHTEKKDKAKEDLRLALKEGHSVLESLRELQAEGSEPSVNQDQLDNQATVQRLLAQLNETEAAFDEFWAKHQQKLEQCLQLRHFEQGFREVKAILDAASQKIATFTDIGNSLAHVEHLLRDLASFEEKSGVAVERARALSLDGEQLIGNKHYAVDSIRPKCQELRHLCDQFSAEIARRRGLLSKSLELHRRLETSMKWCDEGIYLLASQPVDKCQSQDGAEAALQEIEKFLETGAENKIQELNAIYKEYESILNQDLMEHVRKVFQKQASMEEVFHRRQASLKKLAARQTRPVQPVAPRPEALAKSPCPSPGIRRGSENSSSEGGALRRGPYRRAKSEMSESRQGRGSAGEEEESLAILRRHVMSELLDTERAYVEELLCVLEGYAAEMDNPLMAHLLSTGLHNKKDVLFGNMEEIYHFHNRIFLRELENYTDCPELVGRCFLERMEDFQIYEKYCQNKPRSESLWRQCSDCPFFQECQRKLDHKLSLDSYLLKPVQRITKYQLLLKEMLKYSRNCEGAEDLQEALSSILGILKAVNDSMHLIAITGYDGNLGDLGKLLMQGSFSVWTDHKRGHTKVKELARFKPMQRHLFLHEKAVLFCKKREENGEGYEKAPSYSYKQSLNMAAVGITENVKGDAKKFEIWYNAREEVYIVQAPTPEIKAAWVNEIRKVLTSQLQACREASQHRALEQSQSLPLPAPTSTSPSRGNSRNIKKLEERKTDPLSLEGYVSSAPLTKPPEKGKGWSKTSHSLEAPEDDGGWSSAEEQINSSDAEEDGGLGPKKLVPGKYTVVADHEKGGPDALRVRSGDVVELVQEGDEGLW

SEQ ID NO: 47643 - protein, 339 aa, Homo sapiens
MFAAHLRCTYAVGNHDFIEAYKCQTVIVQSFLRAFQAHKEENWALPVMYAVALDLRVFANNADQQLVKKGKSKVGDMLEKAAELLMSCFRVCASDTRAGIEDSKKWGMLFLVNQLFKIYFKINKLHLCKPLIRAIDSSNLKDDYSTAQRVTYKYYVGRKAMFDSDFKQAEEYLSFAFEHCHRSSQKNKRMILIYLLPVKMLLGHMPTVELLKKYHLMQFAEVTRAVSEGNLLLLHEALAKHEAFFIRCGIFLILEKLKIITYRNLFKKVYLLLKTHQLSLDAFLVALKFMQVEDVDIDEVQCILANLIYMGHVKGYISHQHQKLVVSKQNPFPPLSTVC

SEQ ID NO: 47644 - protein, 393 aa, Homo sapiens
MFAAHLRCTYAVGNHDFIEAYKCQTVIVQYPLSFMAAVPHRTHAVDYLGLETRKHWASCSFLQLERNDSVLEQKLVSALSLGTSFLRAFQAHKEENWALPVMYAVALDLRVFANNADQQLVKKGKSKVGDMLEKAAELLMSCFRVCASDTRAGIEDSKKWGMLFLVNQLFKIYFKINKLHLCKPLIRAIDSSNLKDDYSTAQRVTYKYYVGRKAMFDSDFKQAEEYLSFAFEHCHRSSQKNKRMILIYLLPVKMLLGHMPTVELLKKYHLMQFAEVTRAVSEGNLLLLHEALAKHEAFFIRCGIFLILEKLKIITYRNLFKKVYLLLKTHQLSLDAFLVALKFMQVEDVDIDEVQCILANLIYMGHVKGYISHQHQKLVVSKQNPFPPLSTVC

SEQ ID NO: 47645 - protein, 232 aa, Homo sapiens
MNIISKEKKEIKWIGLPTNSAQECQNLEVERQRRLERIKQKQSQLQELILQQIAFKNLVQRNRHAEQQASRPPPPNSVIHLPFIIVNTSKKTVIDCSISNDKFEYLFNFDNTFEIHDDIEVLKRMGMACGLESGSCSAEDLKMARSLVPKALEPYVTEMAQGTVGGVFITTAGSTSNGTRFSASDLTNGADGMLATSSNGSQYSGSRVETPVSYVGEDDEEDDDFNENDEDD

SEQ ID NO: 47646 - protein, 298 aa, Homo sapiens
MNIISKEKKEIKWIGLPTNSAQECQNLEVERQRRLERIKQKQSQLQELILQQIAFKNLVQRNRHAEQQASRPPPPNSVIHLPFIIVNTSKKTVIDCSISNDKFEYLFNFDNTFEIHDDIEVLKRMGMACGLESGSCSAEDLKMARSLVPKALEPYVTEKTGLCDCTAGCPAPWRSVENTGQAKDIRKLLQPSVLWNCASFCWLPVRLVLFLFHDHSLIFFPFSEMAQGTVGGVFITTAGSTSNGTRFSASDLTNGADGMLATSSNGSQYSGSRVETPVSYVGEDDEEDDDFNENDEDD

SEQ ID NO: 47647 - protein, 445 aa, Homo sapiens
MEEPINKRLFEKYLKDESGFKDPSSDWEMSQSSIKSSICLLRGKIYDALDNRTLATYSYKEALKLDVYCFEAFDLLTSHHMLTAQEEKELLESLPLSKLCNEEQELLRFLFENKLKKYNKPSETVIPESVDGLQENLDVVVSLAERHYYNCDFKMCYKLTSVVMEKDPFHASCLPVHIGTLVELNKANELFYLSHKLVDLYPSNPVSWFAVGCYYLMVGHKNEHARRYLSKATTLEKTYGPAWIAYGHSFAVESEHDQAMAAYFTAAQLMKGCHLPMLYIGLEYGLTNNSKLAERFFSQALSIAPEDPFVMHEVGVVAFQNGEWKTAEKWFLDALEKIKAIGNEVTVDKWEPLLNNLGHVCRKLKKYAEALDYHRQALVLIPQNASTYSAIGYIHSLMGNFENAVDYFHTALGLRRDDTFSVTMLGHCIEMYIGDSEAYIAPNWK

SEQ ID NO: 47648 - protein, 73 aa, Homo sapiens
MVYNIVQSWGVLIGDSVAIPEPNLRLHRIQHKGKDYSFSSVRVETPLLLVVNGKPQGSSSQAVATVASRPQCE

SEQ ID NO: 47649 - protein, 534 aa, Homo sapiens [sequence omitted]

SEQ ID NO: 47650 - protein, 318 aa, Homo sapiens
MSQLKNVEARILQCLQNKFLARYVSLPNQNKIWTVTVSPEQNDRTPLVMVHGFGGGVGLWILNMDSLSARRTLHTFDLLGFGRSSRPAFPRDPEGAEDEFVTSIETWRETMGIPSMILLGHSLGGFLATSYSIKYPDRVKHLILVDPWGFPLRPTNPSEIRAPPAWVKAVASVLGRSNPLAVLRVAGPWGPGLVQRFRPDFKRKFADFFEDDTISEYIYHCNAQNPSGETAFKAMMESFGWARRPMLERIHLIRKDVPITMIYGSDTWIDTSTGKKVKMQRPDSYVRDMEIKGASHHVYADQPHIFNAVVEEICDSVD

SEQ ID NO: 47651 - protein, 40 aa, Homo sapiens
MDAGLQAWQLRQQKLQEEQRKQENALKPKGASLKSPLPSQ

SEQ ID NO: 47652 - protein, 140 aa, Homo sapiens
MLLLEKKSAAYSQVLLRCLTLLQRLLQEHRLKTQSELDRINAQYLEVKCGAMILKLRMEELKILSDTYTVEKVEVHRLIRDRLEGAIHLQEQDMENSRQVLNSYEVLGEEFDRLVKEYTVLKQATENKRWALQEFSKVYR

SEQ ID NO: 47653 - protein, 1243 aa, Homo sapiens
MAELEEVTLDGKPLQALRVTDLKAALEQRGLAKSGQKSALVKRLKGALMLENLQKHSTPHAAFQPNSQIGEEMSQNSFIKQYLEKQQELLRQRLEREAREAAELEGKSSSISEEKGDSDDEKPRKGERRSSRVRQARAAKLSEGSQPAEEEEDQETPSRNLRVRADRNLKTEEEEEEEEEEEEDDEEEEGDDEGQKSREAPILKEFKEEGEEIPRVKPEEMMDERPKTRSQEQEVLERGGRFTRSQEEARKSHLARQQQEKEMKTTSPLEEEEREIKSSQGLKEKSKSPSPPRLTEDRKKASLVALPEQTASEEETPPPLLTKEASSPPPHPQLHSEEEIEPMEGPAPAVLIQLSPPNTDADTRELLVSQHTVQLVGGLSPLSSPSDTKAESPAEKVPEESVLPLVQKSTLADYSAQKDLEPESDRSAQPLPLKIEELALAKGITEECLKQPSLEQKEGRRASHTLLPSHRLKQSADSSSSRSSSSSSSSSRSRSRSPDSSGSRSHSPLRSKQRDVAQARTHANPRGRPKMGSRSTSESRSRSRSRSRSASSNSRKSLSPGVSRDSSTSYTETKDPSSGQEVATPPVPQLQVCEPKERTSTSSSSVQARRLSQPESAEKHVTQRLQPERGSPKKCEAEEAEPPAATQPQTSETQTSHLPESERIHHTVEEKEEVTMDTSENRPENDVPEPPMPIADQVSNDDRPEGSVEDEEKKESSLPKSFKRKISVVSATKGVPAGNSDTEGGQPGRKRRWGASTATTQKKPSISITTESLKSLIPDIKPLAGQEAVVDLHADDSRISEDETERNGDDGTHDKGLKICRTVTQVVPAEGQENGQREEEEEEKEPEAEPPVPPQVSVEVALPPPAEHEVKKVTLGDTLTRRSISQQKSGVSITIDDPVRTAQVPSPPRGKISNIVHISNLVRPFTLGQLKELLGRTGTLVEEAFWIDKIKSHCFVTYSTVEEAVATRTALHGVKWPQSNPKFLCADYAEQDELDYHRGLLVDRPSETKTEEQGIPRPLHPPPPPPVQPPQHPRAEQREQERAVREQWAEREREMERRERTRSEREWDRDKVREGPRSRSRSRDRRRKERAKSKEKKSEKKEKAQEEPPAKLLDDLFRKTKAAPCIYWLPLTDSQIVQKEAERAERAKEREKRRKEQEEEEQKEREKEAERERNRQLEREKRREHSRERDRERERERERDRGDRDRDRERDRERGRERDRRDTKRHSRSRSRSTPVRDRGGRR

SEQ ID NO: 47654 - protein, 567 aa, Homo sapiens
MDTSENRPENDVPEPPMPIADQVSNDDRPEGSVEDEEKKESSLPKSFKRKISVVSTKGVPAGNSDTEGGQPGRKRRWGASTATTQKKPSISITTESLKSLIPDIKPLAGQEAVVDLHADDSRISEDETERNGDDGTHDKGLKICRTVTQVVPAEGQENGQREEEEEEKEPEAEPPVPPQVSVEVALPPPAEHEVKKVTLGDTLTRRSISQQKSGVSITIDDPVRTAQVPSPPRGKISNIVHISNLVRPFTLGQLKELLGRTGTLVEEAFWIDKIKSHCFVTYSTVEEAVATRTALHGVKWPQSNPKFLCADYAEQDELDYHRGLLVDRPSETKTEEQGIPRPLHPPPPPPVQPPQHPRAEQREQERAVREQWAEREREMERRERTRSEREWDRDKVREGPRSRSRSRDRRRKERAKSKEKKSEKKEKAQEEPPAKLLDDLFRKTKAAPCIYWLPLTDSQIVQKEAERAERAKEREKRRKEQEEEEQKEREKEAERERNRQLEREKRREHSRERDRERERERERDRGDRDRDRERDRERGRERDRRDTKRHSRSRSRSTPVRDRGGRR

SEQ ID NO: 47655 - protein, 218 aa, Homo sapiens [sequence omitted]

SEQ ID NO: 47656 - protein, 520 aa, Homo sapiens
MASDPIFTLAPPLHCHYGAFPPNASGWEQPPNASGVSVASAALAASAASRVATSTDPSCSGFAPPDFNHCLKDWDYNGLPVLTTNAIGQWDLVCDLGWQVILEQILFILGFASGYLFLGYPADRFGRRGIVLLTLGLVGPCGVGGAAAGSSTGVMALRFLLGFLLAGVDLGVYLMRLELCDPTQRLRVALAGELVGVGGHFLFLGLALVSKDWRFLQRMITAPCILFLFYGWPGLFLESARWLIVKRQIEEAQSVLRILAERNRPHGQMLGEEAQEALQDLENTCPLPATSSFSFASLLNYRNIWKNLLILGFTNFIAHAIRHCYQPVGGGGSPSDFYLCSLLASGTAALACVFLGVTVDRFGRRGILLLSMTLTGIASLVLLGLWDYLNEAAITTFSVLGLFSSQAAAILSTLLAAEVIPTTVRGRGLGLIMALGALGGLSGPAQRLHMGHGAFLQHVVLAACALLCILSIMLLPETKRKLLPEVLRDGELCRRPSLLRQPPPTRCDHVPLLATPNPAL

SEQ ID NO: 47657 - protein, 290 aa, Homo sapiens
MAVTAQVKSLTQKVQAGAYPTEKGLSFLEVKDQLLLMYLMDLTHLILDKASGGSLQGHDAVLRLVEIRTVLEKLRPLDQKLKYQIDKLIKTAVTGSLSENDPLRFKPHPSNMMSKLSSEDEEEDEAEDDQSEASGKKSVKGVSKKYVPPRLVPVHYDETEAEREKKRLERAKRRALSSSVIRELKEQYSDAPEEIRDARHPHVTRQSQEDQHRINYEESMMVRLSVSKREKGRRKRANVMSSQLHSLTHFSDISALTGGTVHLDEDQNPIKKRKKIPQKGRKKKGFRRRR

SEQ ID NO: 47658 - protein, 487 aa, Homo sapiens
MGEGLAPHLEQITTLMLLSLRSTEGIVPQYDGSSSFLLFDDESDGEEEEELMDEDVEEEDDSEISGYSVENAFFDEKEDTCAAVGEISVNTSVAFLPYMESVFEEVFKLLECPHLNVRKAAHEALGQFCCALHKACQSCPSEPNTAALQAALARVVPSYMQAVNRERERQVVMAVLEALTGVLRSCGTLTLKPPGRLAELCGVLKAVLQRKTACQDTDEEEEEEDDDQAEYDAMLLEHAGEAIPALAAAAGGDSFAPFFAGFLPLLVCKTKQGCTVAEKSFAVGTLAETIQGLGAASAQFVSRLLPVLLSTAQEADPEVRSNAIFGMGVLAEHGGHPAQEHFPKLLGLLFPLLARERHDRVRDNICGALARLLMASPTRKPEPQVLAALLHALPLKEDLEEWVTIGRLFSFLYQSSPDQVIDVAPELLRICSLILADNKIPPGEDTKAALLLLLTFLAKQHTDSFQAALGSLPVDKAQELQAVLGLS

SEQ ID NO: 47659 - protein, 309 aa, Homo sapiens [sequence omitted]

SEQ ID NO: 47660 - protein, 547 aa, Homo sapiens
MKEVETQALALSTNRTGSEMLQELLGFSPLKPLCRVWAALRSNLRTVACHRCGVHVLQSALLQLPRLLGSAAEEEEEEEEDGKDGPTETLEELVLGLAAEVCDDFLVYCGDTHGSFVVRTLLQVLGGTILESERARPRGSQSSEAQKTPAQECKPADFEVPETFLNRLQDLSSSFLKDIAVFITDKISSFCLQVALQVLHRKLPQFCAHLCNAVIGYLSTRGSSVDGSPLLLFLRDQTSSRLLEQVLLVLEPPRLQSLFEEHLQGQLQTLAAHPIANFPLQRLLDAVTTPELLSPVFEELSPVLEAVLAQGHPGVVIALVGACRRVGAYQAKVLQLLLEAFHCAEPSSRQVACVPLFATLMAYEVYYGLTEEEGAVPAEHQVAMAAARALGDVTVLGSLLLQHLLHFSTPGLVLRSLGALTGPQLLSLAQSPAGSHVLDAILTSPSVTRKLRRRVLQNLKGQYVALACSRHGSRVLDAIWSGAALRARKEIAAELGEQNQELIRDPFGHHVARNVALTTFLKRREAWEQQQGAVAKRRRALNSILED

SEQ ID NO: 47661 - protein, 455 aa, Homo sapiens
MASLDNEFVLRLEGVIEKVNWDQDPKPALVTKFMENGSLSGLLQSQCPRPWPLLCRLLKEVVLGMFYLHDQNPVLLHRDLKPSNVLLDPELHVKLADFGLSTFQGGSQSGTGSGEPGGTLGYLAPELFVNVNRKASTASDVYSFGILMWAVLAGREVELPTEPSLVYEAVCNRQNRPSLAELPQAGPETPGLEGLKELMQLCWSSEPKDRPSFQECLPKTDEVFQMVENNMNAAVSTVKDFLSQLRSSNRRFSIPESGQGGTEMDGFRRTIENQHSRNDVMVSEWLNKLNLEEPPSSVPKKCPSLTKRSRAQEEQVPQAWTAGTSSDSMAQPPQTPETSTFRNQMPSPTSTGTPSPGPRGNQGAERQGMNWSCRTPEPNPVTGRPLVNIYNCSGVQVGDNNYLTMQQTTALPTWGLAPSGKGRGLQHPPPVGSQEGPKDPEAWSRPQGWYNHSGK

SEQ ID NO: 47662 - protein, 816 aa, Homo sapiens [sequence omitted]

SEQ ID NO: 47663 - protein, 824 aa, Homo sapiens
MYDKILLFRHDPTSENILQLVKAASDIQEGDLIEVVLSASATFEDFQIRPHALFVHSYRAPAFCDHCGEMLWGLVRQGLKCEGCGLNYHKRCAFKIPNNCSGVRRRRLSNVSLTGVSTIRTSSAELSTSAPDEPLLSPVSPGFEQKSPSESFIGREKRSNSQSYIGRPIHLDKILMSKVKVPHTFVIHSYTRPTVCQYCKKLLKGLFRQGLQCKDCRFNCHKRCAPKVPNNCLGEVTINGDLLSPGAESDVVMEEGSDDNDSERNSGLMDDMEEAMVQDAEMAMAECQNDSGEMQDPDPDHEDANRTISPSTSNNIPLMRVVQSVKHTKRKSSTVMKEGWMVHYTSKDTLRKRHYWRLDSKCITLFQNDTGSRYYKEIPLSEILSLEPVKTSALIPNGANPHCFEITTANVVYYVGENVVNPSSPSPNNSVLTSGVGADVARMWEIAIQHALMPVIPKGSSVGTGTNLHRDISVSISVSNCQIQENVDISTVYQIFPDEVLGSGQFGIVYGGKHRKTGRDVAIKIIDKLRFPTKQESQLRNEVAILQNLHHPGVVNLECMFETPERVFVVMEKLHGDMLEMILSSEKGRLPEHITKFLITQILVALRHLHFKNIVHCDLKPENVLLASADPFPQVKLCDFGFARIIGEKSFRRSVVGTPAYLAPEVLRNKGYNRSLDMWSVGVIIYVSLSGTFPFNEDEDIHDQIQNAAFMYPPNPWKEISHEAIDLINNLLQVKMRKRYSVDKTLSHPWLQDYQTWLDLRELECKIGERYITHESDDLRWEKYAGEQGLQYPTHLINPSASHSDTPETEETEMKALGERVSIL

SEQ ID NO: 47664 - protein, 1497 aa, Homo sapiens
MAKNKEPRPPSYTISIVGLSGTEKDKGNCGVGKSCLCNRFVRSKADEYYPEHTSVLSTIDFGGRVVNNDHFLYWGDIIQNSEDGVECKIHVIEQTEFIDDQTFLPHRSTNLQPYIKRAAASKLQSAEKLMYICTDQLGLEQDFEQKQMPEGKLNVDGFLLCIDVSQGCNRKFDDQLKFVNNLFVQLSKSKKPVIIAATKCDECVDHYLREVQAFASNKKNLLVVETSARFNVNIETCFTALVQMLDKTRSKPKIIPYLDAYKTQRQLVVTATDKFEKLVQTVRDYHATWKTVSNKLKNHPDYEEYINLEGTRKARNTFSKHIEQLKQEHIRKRREEYINTLPRAFNTLLPNLEEIEHLNWSEALKLMEKRADFQLCFVVLEKTPWDETDHIDKINDRRIPFDLLSTLEAEKVYQNHVQHLISEKRRVEMKEKFKKTLEKIQFISPGQPWEEVMCFVMEDEAYKYITEADSKEVYGRHQREIVEKAKEEFQEMLFEHSELFYDLDLNATPSSDKMSEIHTVLSEEPRYKALQKLAPDRESLLLKHIGFVYHPTKETCLSGQNCTDIKVEQLLASSLLQLDHGRLRLYHDSTNIDKVNLFILGKDGLAQELANEIRTQSTDDEYALDGKIYELDLRPVDAKSPYFLSQLWTAAFKPHGCFCVFNSIESLSFIGEFIGKIRTEASQIRKDKYMANLPFTLILANQRDSISKNLPILRHQGQQLANKLQCPFVDVPAGTYPRKFNETQIKQALRGVLESVKHNLDVVSPIPANKDLSEADLRIVMCAMCGDPFSVDLILSPFLDSHSCSAAQAGQNNSLMLDKIIGEKRRRIQITILSYHSSIGVRKDELVHGYILVYSAKRKASMGMLRAFLSEVQDTIPVQLVAVTDSQADFFENEAIKELMTEGEHIATEITAKFTALYSLSQYHRQTEVFTLFFSDVLEKKNMIENSYLSDNTRESTHQSEDVFLPSPRDCFPYNNYPDSDDDTEAPPPYSPIGDDVQLLPTPSDRSRYRLDLEGNEYPIHSTPNCHDHERNHKVPPPIKPKPVVPKTNVKKLDPNLLKTIEAGIGKNPRKQTSRVPLAHPEDMDPSDNYAEPIDTIFKQKGYSDEIYVVPDDSQNRIKIRNSFVNNTQGDEENGFSDRPQKVMGNGGLQNTNINLKPCLVKPSHTIEEHIQMPVMMRLSPLLKQRKGRHRGSEEDPLLSPVETWKGGIDNPAITSDQELDDKKMKKKTHKVKEDKKKKTKNFNPPTRRNWESNYFGMPLQDLVTAEKPIPLFVEKCVEFIEDTGLCTEGLYRVSGNKTDQDNIQKQFDQDHNINLVSMEVTVNAVAGALKAFFADLPDPLIPYSLHPELLEAAKIPDKTERLHALKEIVKKFHPVNYDVFRYVITHLNRVSQQHKINLMTADNLSICFWPTLMRPDLKIEFLSTTKIHQSVVETFIQQCQFFFYNGEIVETTNIVAPPPPSNPGQLVEPMVPLQLPPPLQPQLIQPQLQTDPLGII

SEQ ID NO: 47665 - protein, 68 aa, Homo sapiens
MALARAWKQMSWFYYQYLLVTALYMLEPWERTVFNSMLVSIVGMALYTGYVFMPQHIMAILHYFEIVQ

SEQ ID NO: 47666 - protein, 422 aa, Homo sapiens
MDLFTKYYSEWKGGRKNTNEFYKTIPRFYYRLPAEDEVLLQKLREESRAVFLQRKSRELLDNEELQNLWFLLDKHQTPPMIGEEAMINYENFLKVGEKAGAKCKQFFTAKVFAKLLHTDSYGRISIMQFFNYVMRKVWLHQTRIGLSLYDVAGQGYLRESDLENYILELIPTLPQLDGLEKSFYSFYVCTAVRKFFFFLDPLRTGKIKIQDILACSFLDDLLELRDEELSKESQETNWFSAPSALRVYGQYLNLDKDHNGMLSKEELSRYGTATMTNVFLDRVFQECLTYDGEMDYKTYLDFVLALENRKEPAALQYIFKLLDIENKGYLNVFSLNYFFRAIQELMKIHGQDPVSFQDVKDEIFDMVKPKDPLKISLQDLINSNQGDTVTTILIDLNGFWTYENREALVANDSENSADLDDT

SEQ ID NO: 47667 - protein, 129 aa, Homo sapiens
MDYKTYLDFVLALENRKEPAALQYIFKLLDIENKGYLNVFSLNYFFRAIQELMKIHGQDPVSFQDVKDEIFDMVKPKDPLKISLQDLINSNQGDTVTTILIDLNGFWTYENREALVANDSENSADLDDT

SEQ ID NO: 47668 - protein, 281 aa, Homo sapiens [sequence omitted]

SEQ ID NO: 47669 - protein, 161 aa, Homo sapiens
MKDEEYEQMVKELQEIRLEPQEVPRGSEPWKQQLTEDGDSFLHLAIIHEEKALTMEVIRQVKGDLAFLNFQNNLQQTPLHLAVITNQPEIAEALLGAGCDPELRDFRGNTPLHLACEQGCLASVGVLTQSCTTPHLHSILKATNYNGMSASLPCPTPSEGR

SEQ ID NO: 47670 - protein, 314 aa, Homo sapiens
MVIYVILRYAKMKTATNIYILNLAIADELLMLSVPFLVTSTLLRHWPFGALLCRLVLSVDAVNMFTSIYCLTVLSVDRYVAVVHPIKAARYRRPTVAKVVNLGVWVLSLLVILPIVVFSRTAANSDGTVACNMLMPEPAQRWLVGFVLYTFLMGFLLPVGAICLCYVLIIAKMRMVALKAGWQQRKRSERKITLMVMMVVMVFVICWMPFYVVQLVNVFAEQDDATVSQLSVILGYANSCANPILYGFLSDNFKRSFQRILCLSWMDNAAEEPVDYYATALKSRAYSVEDFQPENLESGGVFRNGTCTSRITTL

SEQ ID NO: 47671 - protein, 944 aa, Homo sapiens
MLDDRKNEEDGGADEHEHPLTSELDPEKEQEIETIKIIETEDQIDKKPVSEKTDESDTIPYLKKFLYNFDNPWNFQNIPKETELPFPKQILDQNNVIENEETGEFSIDNYPTDNTKVMIFKSSYSLSEDASEFQILKYLFQIDVYDFMNSAFSPIVILTERVVAALPEGMRPDSNLYGFPWELVICAAVVGFFAVLFFLWRSFRSVRSRLYVGREKKLALMLSGLIEEKSKLLEKFSLVQKEYEGYEVESSLKDASFEKEATEAQSLEATCEKLNRSNSELEDEILCLEKELKEEKSKHSEQDELMADISKRIQSLEDESKSLKSQVAEAKMTFKIFQMNEERLKIAIKDALNENSQLQESQKQLLQEAEVWKEQVSELNKQKVTFEDSKVHAEQVLNDKESHIKTLTERLLKMKDWAAMLGEDITDDDNLELEMNSESENGAYLDNPPKGALKKLIHAAKLNASLKTLEGERNQIYIQLSEVDKTKEELTEHIKNLQTEQASLQSENTHFENENQKLQQKLKVMTELYQENEMKLHRKLTVEENYRLEKEEKLSKVDEKISHATEELETYRKRAKDLEEELERTIHSYQGQIISHEKKAHDNWLAARNAERNLNDLRKENAHNRQKLTETELKFELLEKDPYALDVPNTAFGREHSPYGPSPLGWPSSETRAFLSPPTLLEGPLRLSPLLPGGGGRGSRGPGNPLDHQITNERGESSCDRLTDPHRAPSDTGSLSPPWDQDRRMMFPPPGQSYPDSALPPQRQDRFCSNSGRLSGPAELRSFNMPSLDKMDGSMPSEMESSRNDTKDDLGNLNVPDSSLPAENEATGPGFVPPPLAPIRGPLFPVDARGPFLRRGPPFPPPPPGAMFGASRDYFPPGDFPGPPPAPFAMRNVYPPRGFPPYLPPRPGFFPPPPHSEGRSEFPSGLIPPSNEPATEHPEPQQET

SEQ ID NO: 47672 - protein, 168 aa, Homo sapiens
MEKQQYKSEVHKASLIIDLFGNEHDNFTKNLENLMSTIQESYCSNWRCPTRVQEDQQRTINIKCGGLREFSQRIFCHGAPPFVVLNMQHWKSEDLAYVPYYLDLSDHKYLLEGATLFNKEEHHYSAAFQIGGHWMHYDGLRNVNLILLNKPPEFLLLSSLVYIRATEK

SEQ ID NO: 47673 - protein, 309 aa, Homo sapiens [sequence omitted]

SEQ ID NO: 47674 - protein, 1701 aa, Homo sapiens
MPSEAVSSSWSESGGGLSGGDEEDTRLLQLLRTARDPSEAFQALQAALPRRGGRLGFPRRKEALYRALGRVLVEGGSDEKRLCLQLLSDVLRGQGEAGQLEEAFSLALLPQLVVSLREENPALRKDALQILHICLKRSPGEVLRTLIQQGLESTDARLRASTALLLPILLTTEDLLLGLDLTEVIISLARKLGDQETEEESETAFSALQQIGERLGQDRFQSYISRLPSALRRHYNRRLESQFGSQVPYYLELEASGFPEDPLPCAVTLSNSNLKFGIIPQELHSRLLDQEDYKNRTQAVEELKQVLGKFNPSSTPHSSLVGFISLLYNLLDDSNFKVVHGTLEVLHLLVIRLGEQVQQFLGPVIAASVKVLADNKLVIKQEYMKIFLKLMKEVGPQQVLCLLLEHLKHKHSRVREEVVNICICSLLTYPSEDFDLPKLSFDLAPALVDSKRRVRQAALEAFAVLASSMGSGKTSILFKAVDTVELQDNGDGVMNAVQARLARKTLPRLTEQGFVEYAVLMPSSAGGRSNHLAHGADTDWLLAGNRTQSAHCHCGDHVRDSMHIYGSYSPTICTRRVLSAGKGKNKLPWENEQPGIMGENQTSTSKDIEQFSTYDFIPSAKLKLSQGMPVNDDLCFSRKRVSRNLFQNSRDFNPDCLPLCAAGTTGTHQTNLSGKCAQLGFSQICGKTGSVGSDLQFLGTTSSHQEKVYASLNFGSKTQQTFGSQTECTSSNGQNPSPGAYILPSYPVSSPRTSPKHTSPLIISPKKSQDNSVNFSNSWPLKSFEGLSKPSPQKKLVSQKSSDPTGRNHGENSQEKPPVQLTPALVRSPSSRRGLNGTKPVPPIPRGISLLPDKADLSTVGHKKKEPDDIWKCEKDSLPIDLSELNFKDKDLDQEEMHSSLRSLRNSAAKKRAKLSGSTSDLESPDSAMKLDLTMDSPSLSSSPNINSYSESGVYSQESLTSSLSTTPQGKRIMSDIFPTFGSKPCPTRLSSAKKKISHIAEQSPSAGSSSNPQQISSFDFTTTKALSEDSVVVVGKGVFGSLSSAPATCSQSVISSVENGDTFSIKQSIEPPSGIYGRSVQQNISSYLDVENEKDAKVSISKSTYNKMRQKRKEEKELFHNKDCEKKEKNSWERMRHTGTEKMASESETPTGAISQYKERMPSVTHSPEIMDLSELRPFSKPEIALTEALRLLADEDWEKKIEGLNFIRCLAAFHSEILNTKLHETNFAVVQEVKNLRSGVSRAAVVCLSDLFTYLKKSMDQELDTTVKVLLHKAGESNTFIREDVDKALRAMVNNVTPARAVVSLINGGQSHLHIAVRRCTAQHLSDVLEFMEPERILSAAKDMAERILPAAAKFAQDSSQETRYYGRKMLFFMMCHPNFEKMLEKYVPSKDLPYIKDSVRNLQQKGLGEIPLDTPSAKGRRSHTGSVGNTRSSSVSRDAFNSAERAVTEVREVTRKSVPRNSLESAEYLKLITGLLNAKDFRDRINGIKQLLSDTENNQDLVVGNIVKIFDAFKSRLHDSNSKVNLVALETMHKMIPLLRDHLSPIINMLIPAIVDNNLNSKNPGIYAAATNVVQALSQHVDNYLLLQPFCTKAQFLNGKAKQDMTEKLADIVTELYQRKPHATEQKVLVVLWHLLGNMTNSGSLPGAGGNIRTATAKLSKALFAQMGQNLLNQAASQPPHIKKSLEELLDMTILNEL

SEQ ID NO: 47675 - protein, 1727 aa, Homo sapiens
MRRDIPNLTKYQIILARDQFRKNPSPNIVGIQQGIIEGEFAICISLYHGYELLQQMGMRSLYFFLCGIMDGTKGMTRSKNELGRNEDFMKLYNHLECMFARTRSTSANGISAIQQGDKNKKFVYSHPKLKKLEEVVIEHFKSWNAENTTEKKRDETRVMIFSSFRDSVQEIAEMLSQHQPIIRVMTFVGHASGKSTKGFTQKEQLEVVKQFRDGGYNTLVSTCVGEEGLDIGEVDLIICFDSQKSPIRLVQRMGRTGRKRQGRIVIILSEGREERIYNQSQSNKRSIYKAISSNRQVLHFYQRSPRMVPDGINPKLHKMFITHGVYEPEKPSRNLQRKSSIFSYRDGMRQSSLKKDWFLSEEEFKLWNRLYRLRDSDEIKEITLPQVQFSSLQNEENKPAQESTTGIHQLSLSEWRLWQDHPLPTHQVDHSDRCRHFIGLMQMIEGMRHEEGECSYELEVESYLQMEDVTSTFIAPRNESNNLASDTFITHKKSSFIKNINQGSSSSVIESDEECAEIVKQTHIKPTKIVSLKKKVSKEIKKDQLKKENNHGIIDSVDNDRNSTVENIFQEDLPNDKRTSDTDEIAATCTINENVIKEPCVLLTECQFTNKSTSSLAGNVLDSGYNSFNDEKSVSSNLFLPFEEELYIVRTDDQFYNCHSLTKEVLANVERFLSYSPPPLSGLSDLEYEIAKGTALENLLFLPCAEHLRSDKCTCLLSHSAVNSQQNLELNSLKCINYPSEKSCLYDIPNDNISDEPSLCDCDVHKHNQNENLVPNNRVQIHRSPAQNLVGENNHDVDNSDLPVLSTDQDESLLLFEDVNTEFDDVSLSPLNSKSESLPVSDKTAISETPLVSQFLISDELLLDNNSELQDQITRDANSFKSRDQRGVQEEKVKNHEDIFDCSRDLFSVTFDLGFCSPDSDDEILEHTSDSNRPLDDLYGRYLEIKEISDANYVSNQALIPRDHSKNFTSGTVIIPSNEDMQNPNYVHLPLSAAKNEELLSPGYSQFSLPVQKKVMSTPLSKSNTLNSFSKIRKEILKTPDSSKEKVNLQRFKEALNSTFDYSEFSLEKSKSSGPMYLHKSCHSVEDGQLLTSNESEDDEIFRRKVKRAKGNVLNSPEDQKNSEVDSPLHAVKKRRFPINRSELSSSDESENFPKPCSQLEDFKVCNGNARRGIKVPKRQSHLKHVARKFLDDEAELSEEDAEYVSSDENDESENEQDSSLLDFLNDETQLSQAINDSEMRAIYMKSLRSPMMNNKYKMIHKTHKNINIFSQIPEQDETYLEDSFCVDEEESCKGQSSEEEVCVDFNLITDDCFANSKKYKTRRAVMLKEMMEQNCAHSKKKLSRIILPDDSSEEENNVNDKRESNIAVNPSTVKKNKQQDHCLNSVPSGSSAQSKVRSTPRVNPLAKQSKQTSLNLKDTISEVSDFKPQNHNEVQSTTPPFTTVDSQKDCRKFPVPQKDGSALEDSSTSGASCSKSRPHLAGTHTSLRLPQEGKGTCILVGGHEITSGLEVISSLRAIHGLQVEVCPLNGCDYIVSNRMVVERRSQSEMLNSVNKNKFIEQIQHLQSMFERICVIVEKDREKTGDTSRMFRRTKSYDSLLTTLIGAGIRILFSSCQEETADLLKELSLVEQRKNVGIHVPTVVNSNKSEALQFYLSIPNISYITALNMCHQFSSVKRMANSSLQEISMYAQVTHQKAEEIYRYIHYVFDIQMLPNDLNQDRLKSDI

SEQ ID NO: 47676 - protein, 803 aa, Homo sapiens
MFSQYAEELTDPENRRRYEAEITALERERGVEVRFVHPEPGHVLRTSLDGARRCFVNVCSNALVGAPSSRPGSGGDRGAAPGSHWSLPYSLAPGREYAGRSSSRYMVYDVVFHPDALALARRHEGFRQMLDATALEAVEKQFGVKLDRRNAKTLKAKYKGTPEAAVLRTPLPGVIPARPDGEPKGPLPDFPYPYQYPAAPGPRAPSPPEAALQPAPTEPRYSVVQRHHVDLQDYRCSRDSAPSPVPHELVITIELPLLRSAEQAALEVTRKLLCLDSRKPDYRLRLSLPYPVDDGRGKAQFNKARRQLVVTLPVVLPAARREPAVAVAAAAPEESADRSGTDGQACASAREGEAGPARSRAEDGGHDTCVAGAAGSGVTTLGDPEVAPPPAAAGEERVPKPGEQDLSRHAGSPPGSVEEPSPGGENSPGGGGSPCLSSRSLAWGSSAGRESARGDSSVETREESEGTGGQRSACAMGGPGTKSGEPLCPPLLCNQDKETLTLLIQVPRIQPQSLQGDLNPLWYKLRFSAQDLVYSFFLQFAPENKLSTTEPVISISSNNAVIELAKSPESHGHWREWYYGVNNDSLEERLFVNEENVNEFLEEVLSSPFKQSMSLTPPLIEVLQVTDNKIQINAKLQECSNSDQLQGKEERVNEESHLTEKEYIEHCNTPTTDSDSSIAVKALQIDSFGLVTCFQQESLDVSQMILGKSQQPESKMQSEFIKEKSATCSNEEKDNLNESVITEEKETDGDHLSSLLNKTTVHNIPGFDSIKETNMQDGSVQVIKDHVTNCAFSFQNSLLYDLD

SEQ ID NO: 47677 - protein, 755 aa, Homo sapiens
MFSQYAEELTDPENRRRYEAEITALERERGVEVRFVHPEPGHVLRTSLDGARRCFVNVCSNALVGAPSSRPGSGGDRGAAPGSHWSLPYSLAPGREYAGRSSSRYMVYDVVFHPDALALARRHEGFRQMLDATALEAVEKQFGVKLDRRNAKTLKAKYKGTPEAAVLRTPLPGVIPARPDGEPKGPLPDFPYPYQYPAAPGPRAPSPPEAALQPAPTEPRYSVVQRHHVDLQDYRCSRDSAPSPVPHELVITIELPLLRSAEQAALEVTRKLLCLDSRKPDYRLRLSLPYPVDDGRGKAQFNKARRQLVVTLPVVLPAARREPAVAVAAAAPEESADRSGTDGQACASAREGEAGPARSRAEDGGHDTCVAGAAGSGVTTLGDPEVAPPPAAAGEERVPKPGEQDLSRHAGSPPGSVEEPSPGGENSPGGGGSPCLSSRSLAWGSSAGRESARGDSSVETREESEGTGGQRSACAMGGPGTKSGEPLCPPLLCNQDKETLTLLIQVPRIQPQSLQGDLNPLWYKLRFSAQDLVYSFFLQFAPENKLSTTEPVISISSNNAVIELAKSPESHGHWREWYYGVNNDSLELQECSNSDQLQGKEERVNEESHLTEKEYIEHCNTPTTDSDSSIAVKALQIDSFGLVTCFQQESLDVSQMILGKSQQPESKMQSEFIKEKSATCSNEEKDNLNESVITEEKETDGDHLSSLLNKTTVHNIPGFDSIKETNMQDGSVQVIKDHVTNCAFSFQNSLLYDLD

SEQ ID NO: 47678 - protein, 275 aa, Homo sapiens
MEKYEKIGKIGEGSYGVVFKCRNRDTGQIVAIKKFLESEDDPVIKKIALREIRMLKQLKHPNLVNLLEVFRRKRRLHLVFEYCDHTVLHELDRYQRGVPEHLVKSITWQTLQAVNFCHKHNCIHRDVKPENILITKHSVIKLCDFGFARLLTGPSDYYTDYVATRWYRSPELLVGDTQYGPPVDVWAIGCVFAELLSGVPLWPGKSDVDQLYLIRKTLGDLIPRHQQVFSTNQYFSGVKIPDPEDMEPLELKFPNISYPALGLLKGRVPIASRTE

SEQ ID NO: 47679 - protein, 470 aa, Homo sapiens
MDFMLRYMYNQESVDWVGDYNEPLTGFSWRGGSERETTGIQIWSEIFLINKPDGKKVAVLLMDTQGTFDSQSTLRDSATVFALSTMISSIQVYNLSQNVQEDDLQHLQLFTEYGRLAMEETFLKPFQSLIFLVRDWSFPYEFSYGADGGAKFLEKRLKVSGNQHEELQNVRKHIHSCFTNISCFLLPHPGLKVATNPNFDGKLKEIDDEFIKNLKILIPWLLSPESLDIKEINGNKITCRGLVEYFKAYIKIYQGEELPHPKSMLQATAEANNLAAVATAKDTYNKKMEEICGGDKPFLAPNDLQTKHLQLKEESVKLFRGVKKMGGEEFSRRYLQQLESEIDELYIQYIKHNDSKNIFHAARTPATLFVVIFITYVIAGVTGFIGLDIIASLCNMIMGLTLITLCTWAYIRYSGEYRELGAVIDQVAAALWDQALYKLYSAAATHRHLYHQAFPTPKSESTEQSEKKKM

SEQ ID NO: 47680 - protein, 2008 aa, Homo sapiens
MLSLEEVAPVLQQTLLQDNLLGRVHFDQFKEALILILSRTLSNEEHFQEPDCSLEAQPKYVRGGKRYGRRSLPEFQESVEEFPEVTVIEPLDEEARPSHIPAGDCSEHWKTQRSEEYEAEGQLRFWNPDDLNASQSGSSPPQDWIEEKLQEVCEDLGITRDGHLNRKKLVSICEQYGLQNVDGEMLEEVFHNLDPDGTMSVEDFFYGLFKNGKSLTPSASTPYRQLKRHLSMQSFDESGRRTTTSSAMTSTIGFRVFSCLDDGMGHASVERILDTWQEEGIENSQEILKALDFSLDGNINLTELTLALENELLVTKNSIHQAALASFKAEIRHLLERVDQVVREKEKLRSDLDKAEKLKSLMASEVDDHHAAIERRNEYNLRKLDEEYKERIAALKNELRKEREQILQQAGKQRLELEQEIEKAKTEENYIRDRLALSLKENSRLENELLENAEKLAEYENLTNKLQRNLENVLAEKFGDLDPSSAEFFLQEERLTQMRNEYERQCRVLQDQVDELQSELEEYRAQGRVLRLPLKNSPSEEVEANSGGIEPEHGLGSEECNPLNMSIEAELVIEQMKEQHHRDICCLRLELEDKVRHYEKQLDETVVSCKKAQENMKQRHENETHTLEKQISDLKNEIAELQGQAAVLKEAHHEATCRHEEEKKQLQVKLEEEKTHLQEKLRLQHEMELKARLTQAQASFEREREGLQSSAWTEEKVRGLTQELEQFHQEQLTSLVEKHTLEKEELRKELLEKHQRELQEGREKMETECNRRTSQIEAQFQSDCQKVTERCESALQSLEGRYRQELKDLQEQQREEKSQWEFEKDELTQECAEAQELLKETLKREKTTSLVLTQEREMLEKTYKEHLNSMVVERQQLLQDLEDLRNVSETQQSLLSDQILELKSSHKRELREREEVLCQAGASEQLASQRLERLEMEHDQERQEMMSKLLAMENIHKATCETADRERAEMSTEISRLQSKIKEMQQATSPLSMLQSGCQVIGEEEVEGDGALSLLQQGEQLLEENGDVLLSLQRAHEQAVKENVKMATEISRLQQRLQKLEPGLVMSSCLDEPATEFFGNTAEQTEQFLQQNRTKQVEGVTRRHVLSDLEDDEVRDLGSTGTSSVQRQEVKIEESEASVEGFSELENSEETRTESWELKNQISQLQEQLMMLCADCDRASEKKQDLLFDVSVLKKKLKMLERIPEASPKYKLLYEDVSRENDCLQEELRMMETRYDEALENNKELTAEVFRLQDELKKMEEVTETFLSLEKSYDEVKIENEGLNVLVLRLQGKIEKLQESVVQRCDCCLWEASLENLEIEPDGNILQLNQTLEECVPRVRSVHHVIEECKQENQYLEGNTQLLEKVKAHEIAWLHGTIQTHQERPRVQNQVILEENTTLLGFQDKHFQHQATIAELELEKTKLQELTRKLKERVTILVKQKDVLSHGEKEEELKAMMHDLQITCSEMQQKVELLRYESEKLQQENSILRNEITTLNEEDSISNLKLGTLNGSQEEMWQKTETVKQENAAVQKMVENLKKQISELKIKNQQLDLENTELSQKNSQNQEKLQELNQRLTEMLCQKEKEPGNSALEEREQEKFNLKEELERCKVQSSTLVSSLEAELSEVKIQTHIVQQENHLLKDELEKMKQLHRCPDLSDFQQKISSVLSYNEKLLKEKEALSEELNSCVDKLAKSSLLEHRIATMKQEQKSWEHQSASLKSQLVASQEKVQNLEDTVQNVNLQMSRMKSDLRVTQQEKEALKQEVMSLHKQLQNAGGKSWAPEIATHPSGLHNQQKRLSWDKLDHLMNEEQQLLWQENERLQTMVQNTKAELTHSREKVRQLESNLLPKHQKHLNPSGTMNPTEQEKLSLKRECDQFQKEQSPANRKVSQMNSLEQELETIHLENEGLKKKQVKLDEQLMEMQHLRSTATPSPSPHAWDLQLLQQQACPMVPREQFLQLQRQLLQAERINQHLQEELENRTSETNTPQALLPEQRAVHADSYRRIGHL

SEQ ID NO: 47681 - protein, 559 aa, Homo sapiens
MCDTTARCHPGTGVDYTCECASGYQGDGRNCVDENECATGFHRCGPNSVCINLPGSYRCECRSGYEFADDRHTCIYVDECSENRCHPAATCYNTPGSFSCRCQPGYYGDGFQCIPDSTSSLTPCEQQQRHAQAQYAYPGARFHIPQCDEQGNFLPLQCHGSTGFCWCVDPDGHEVPGTQTPPGSTPPHCGPSPEPTQRPPTICERWRENLLEHYGGTPRDDQYVPQCDDLGHFIPLQCHGKSDFCWCVDKDGREVQGTRSQPGTTPACIPTVAPPMVRPTPRPDVTPPSVGTFLLYTQGQQIGYLPLNGTRLQKDAAKTLLSLHGSIIVGIDYDCRERMVYWTDVAGRTISRAGLELGAEPETIVNSGLISPEGLAIDHIRRTMYWTDSVLDKIESALLDGSERKVLFYTDLVNPRAIAVDPIRGNLYWTDWNREAPKIETSSLDGENRRILINTDIGLPNGLTFDPFSKLLCWADAGTKKLECTLPDGTGRRVIQNNLKYPFSIVSYADHFYHTDWRRDGVVSVNKHSGQFTDEYLPEQRSHLYGITAVYPYCPTGRK

SEQ ID NO: 47682 - protein, 140 aa, Homo sapiens
MVSVIHIPDRTYKLSCRILYQYLLLAQGQFHDLKQLFMSANNNFTPSNNSSSEEKNTDRSLLEKVGLSESEVEPSEENSKDCVVCQNGTVNWVLLPCRHTCLCDGCVKYFQQCPMCRQFVQESFALCSQKEQDKDKPKTL

SEQ ID NO: 47683 - protein, 175 aa, Homo sapiens
MYPSVPPTGPPPGPPAPFPPSGPSCPPPGGPYPAPTVPGPGPTGPYPTPNMPFPELPRPYGAPTDPAAAGPLGPWGSMSSGPWAPGMGGQYPTPNMPYPSPGPYPAPPPPQAPGAAPPVPWGTVPPGAWGPPAPYPAPTGSYPTPGLYPTPSNPFQVPSGPSGAPPMPGGPHSYH

SEQ ID NO: 47684 - protein, 121 aa, Homo sapiens
MLITILGTVKPNANRIALDFQRGNDVAFHFNPRFNENNRRVIVCNTKLDNNWGREERQSVFPFESGKPFKIQVLVEPDHFKVAVNDAHLLQYNHRVKKLNEISKLGISGDIDLTSASYTMI

SEQ ID NO: 47685 - protein, 140 aa, Homo sapiens
MSEILLSQVTNMRTELSFNIQALAVCANICLATKDRQNPSLVWLFTGMFCIYSLFFAWRANLDISKPLFMGVVERFWMQSNAVVAVLAGIGLAAVVSETNRVLNSNGLQCLEWLSATLFVVYQIYSNYRDKVSLCCLGWS

SEQ ID NO: 47686 - protein, 653 aa, Homo sapiens
MDERIQRKVEKLEQQCQKEAKEFAKKVQELQKSNQVAFQHFQELDEHISYVATKVCHLGDQLEGVNTPRQRAVEAQKLMKYFNEFLDGELKSDVFTNSEKIKEAADIIQKLHLIAQELPFDRFSEVKSKIASKYHDLECQLIQEFTSAQRRGEISRMREVAAVLLHFKGYSHCVDVYIKQCQEGAYLRNDIFEDAGILCQRVNKQVGDIFSNPETVLAKLIQNVFEIKLQSFVKEQLEECRKSDAEQYLKNLYDLYTRTTNLSSKLMEFNLGTDKQTFLSKLIKSIFISYLENYIEVETGYLKSRSAMILQRYYDSKNHQKRSIGTGGIQDLKERIRQRTNLPLGPSIDTHGETFLSQEVVVNLLQETKQAFERCHRLSDPSDLPRNAFRIFTILVEFLCIEHIDYALETGLAGIPSSDSRNANLYFLDVVQQANTIFHLFDKQFNDHLMPLISSSPKLSECLQKKKEIIEQMEMKLDTGIDRTLNCMIGQMKHILAAEQKKTDFKPEDENNVLIQYTNACVKVCAYVRKQVEKIKNSMDGKNVDTVLMELGVRFHRLIYEHLQQYSYSCMGGMLAICDVAEYRKCAKDFKIPMVLHLFDTLHALCNLLVVAPDNLKQVCSGEQLANLDKNILHSFVQLRADYRSARLARHFS

SEQ ID NO: 47687 - protein, 387 aa, Homo sapiens
MIYACVPLVEQTLSPRPPLISVSGVSQGFEFLFGIQDFLYSGQKNDSELNTKLSQLPDLLLQACPFGTLLDANLQNSLDNTNFASVTQPQKQPAWKTGTYKGKPQVSISITEKVKSMQYDKQGIADTWQVVGTVTCKCDLEGIMPNVTISLSLPTNGSPLQDILVHPCVTSLDSAILTSSSIDAMDDSAFSGPYKFPFTPPLESFNLCFYTSQVPVPPILGFYQMKEEEVQLRITINLKLHESVKNNFEFCEAHIPFYNRGPITHLEYKTSFGQLEVFREKSLLIWIIGQKFPKSMEISLSGTVTFGAKSHEKQPFDPICTGETAYLKLHFRILDYTLTGCYADQHSVQVFASGKPKISAHRKLISSDYYIWNSKAPAPVTYGSLLL

SEQ ID NO: 47688 - protein, 181 aa, Homo sapiens
MIYACVPLVEQTLSPRPPLISVSGVSQGFEFLFGIQDFLYSGQKNDSELNTKLSQLPDLLLQACPFGTLLDANLQNSLDNTNFASVTQPQKQPAWKTGTYKGKPQVSISITEKVKSMQYDKQGIADTWQVVGTVTCKVRFFSGTCFIVLFNIWRKVKFASCILNNIFYFHLKQQFLNGRVM

SEQ ID NO: 47689 - protein, 992 aa, Homo sapiens
MDISEILESSSSDDEDGPAEENDEEKEKEAKKTEEEVPEEELDPEERDNFLQQLYKFMEDRGTPINKPPVLGYKDLNLFKLFRLVYHQGGCDNIDSGAVWKQIYMDLGIPILNSAASYNVKTAYRKYLYGFEEYCRSANIQFRTVHHHEPKVKEEKKDLEESMEEALKLDQEMPLTEVKSEPEENIDSNSESEREEIELKSPRGRRRIARDVNSIKKEIEEEKTEDKLKDNDTENKDVDDDYETAEKKENELLLGRKNTPKQKEKKIKKQEDSDKDSDEEEEKSQEREETESKCDSEGEEDEEDMEPCLTGTKVKVKYGRGKTQKIYEASIKSTEIDDGEVLYLVHYYGWNVRYDEWVKADRIIWPLDKGGPKKKQKKKAKNKEDSEKDEKRDEERQKSKRGRPPLKSTLSSNMPYGLSKTANSEGKSDSCSSDSETEDALEKNLINEELSLKDELEKNENLNDDKLDEENPKISAHILKENDRTQMQPLETLKLEVGENEQIVQIFGNKMEKTEEVKKEAEKSPKGKGRRSKTKDLSLEIIKISSFGQNEAGSEPHIEAHSLELSSLDNKNFSSATEDEIDQCVKEKKLKRKILGQSSPEKKIRIENGMEMTNTVSQERTSDCIGSEGMKNLNFEQHFERENEGMPSLIAESNQCIQQLTSERFDSPAEETVNIPLKEDEDAMPLIGPETLVCHEVDLDDLDEKDKTSIEDVAVESSESNSLVSIPPALPPVVQHNFSVASPLTLSQDESRSVKSESDITIEVDSIAEESQEGLCERESANGFETNVASGTCSIIVQERESREKGQKRPSDGNSGLMAKKQKRTPKRTSAAAKNEKNGTGQSSDSEDLPVLDNSSKCTPVKHLNVSKPQKLARSPARISPHIKDGEKDKHREKHPNSSPRTYKWSFQLNELDNMNSTERISFLQEKLQEIRKYYMSLKSEVATIDRRRKRLKKKDREVSHAGASMSSASSDTGMSPSSSSPPQNVLAVECR

SEQ ID NO: 47690 - protein, 938 aa, Homo sapiens
MDISEILESSSSDDEDGPAEENDEEKEKEAKKTEEEVPEEELDPEERDNFLQQLYKFMEDRGTPINKPPVLGYKDLNLFKLFRLVYHQGGCDNIDSGAVWKQIYMDLGIPILNSAASYNVKTAYRKYLYGFEEYCRSANIQFRTVHHHEPKVKEEKKDLEESMEEALKLDQEMPLTEVKSEPEENIDSNSESEREEIELKSPRGRRRIARDVNSIKKEIEEEKTEDKLKDNDTENKDVDDDYETAEKKENELLLGRKNTPKQKEKKIKKQEDSDKDSDEEEEKSQEREETESKCDSEGEEDEEDMEPCLTGTKVKVKYGRGKTQKIYEASIKSTEIDDGEVLYLVHYYGWNVRYDEWVKADRIIWPLDKGGPKKKQKKKAKNKEDSEKDEKRDEERQKSKRGRPPLKSTLSSNMPYGLSKTANSEGKSDSCSSDSETEDALEKNLINEELSLKDELEKNENLNDDKLDEENPKISAHILKENDRTQMQPLETLKLEVGENEQIVQIFGNKMEKTEEVKKEAEKSPKGKGRRSKTKDLSLEIIKISSFGQNEAGSEPHIEAHSLELSSLDNKNFSSATEDEIDQCVKEKKLKRKILGQSSPEKKIRIENGMEMTNTVSQERTSDCIGSEGMKNLNFEQHFERENEGMPSLIAESNQCIQQLTSERFDSPAEETVNIPLKEDEDAMPLIGPETLVCHEVDLDDLDEKDKTSIEDVAVESSESNSLVSIPPALPPVVQHNFSVASPLTLSQDESRSVKSESDITIEVDSIAEESQEGLCERESANGFETNVASGTCSIIVQERESREKGQKRPSDGNSGLMAKKQKRTPKRTSAAAKNEKNGTGQSSDSEDLPVLDNSNELDNMNSTERISFLQEKLQEIRKYYMSLKSEVATIDRRRKRLKKKDREVSHAGASMSSASSDTGMSPSSSSPPQNVLAVECR

SEQ ID NO: 47691 - protein, 959 aa, Homo sapiens
MRPLYIFFFVSVDLAHRFVVNMPALEHMNQILHILFVFLPFLWALGTLPPPDALLLWAMEQVLEFGLGGSSMSTHLRLLVMFIMSAGTAIASYFIPSTVGVVLFMTGFGFLLSLNLSDMGHKIGTKSKDLPSGPEKHFSWKECLFYIIILVLALLETSLLHHFAGFSQISKSNSQAIVGYGLMILLIILWILREIQSVYIIGIFRNPFYPKDVQTVTVFFEKQTRLMKIGIVRRILLTLVSPFAMIAFLSLDSSLQGLHSVSVCIGFTRAFRMVWQNTENALLETVIVSTVHLISSTDIWWNRSLDTGLRLLLVGIIRDRLIQFISKLQFAVTVLLTSWTEKKQRRKTTATLCILNIVFSPFVLVIIVFSTLLSSPLLPLFTLPVFLVGFPRPIQSWPGAAGTTACVCADTVYYYQMVPRLTAVLQTAMAAGSLGLLLPGSHYLGRFQDRLMWIMILECGYTYCSINIKGLELQETSCHTAEARRVDEVFEDAFEQEYTRVCSLNEHFGNVLTPCTVLPVKLYSDARNVLSGIIDSHENLKEFKGDLIKVLVWILVQYCSKRPGMKENVHNTENKGKAPLMLPALNTLPPPKSPEDIDSLNSETFNDWSDDNIFDDEPTIKKVIEEKHQLKDLPGTNLFIPGSVESQRVGDHSTGTVPENDLYKAVLLGYPAVDKGKQEDMPYIPLMEFSCSHSHLVCLPAEWRTSCMPSSKMKEMSSLFPEDWYQFVLRQLECYHSEEKASNVLEEIAKDKVLKDFYVHTVMTCYFSLFGIDNMAPSPGHILRVYGGVLPWSVALDWLTEKPELFQLALKAFRYTLKLMIDKASLGPIEDFRELIKYLEEYERDWYIGLVSDEKWKEAILQEKPYLFSLGYDSNMGIYTGRVLSLQELLIQVGKLNPEAVRGQWANLSWELLYATNDDEERYSIQAHPLLLRNLTVQAAEPPLGYPIYSSKPLHIHLY

SEQ ID NO: 47692 - protein, 449 aa, Homo sapiens [sequence omitted]

SEQ ID NO: 47693 - protein, 481 aa, Homo sapiens
MYSLLLELHRQRSPGVSFGLSVFNLMNAIMGSGILGLAYVLANTGVFGFSFLLLTVALLASYSVHLLLSMCIQTAVTSYEDLGLFAFGLPGKLVVAGTIIIQNIGAMSSYLLIIKTELPAAIAEFLTGDYSRYWYLDGQTLLIIICVGIVFPLALLPKIGFLGYTSSLSFFFMMFFALVVIIKKWSIPCPLTLNYVEKGFQISNVTDDCKPKLFHFSKESAYALPTMAFSFLCHTSILPIYCELQSPSKKRMQNVTNTAIALSFLIYFISALFGYLTFYDKVESELLKGYSKYLSHDVVVMTVKLCILFAVLLTVPLIHFPARKAVTMMFFSNFPFSWIRHFLITLALNIIIVLLAIYVPDIRNVFGVVGASTSTCLIFIFPGLFYLKLSREDFLSWKKLGGLILSHRLACSGVISAHCNLCLPDSSNPPTSASRVAETTEKEEIPWRCAPRGKATQGHSKKATVYKPREEASGEPNVSTP

SEQ ID NO: 47694 - protein, 130 aa, Homo sapiens
MTVKLCILFAVLLTVPLIHFPARKAVTMMFFSNFPFSWIRHFLITLALNIIIVLLAIYVPDIRNVFGVVGASTSTCLIFIFPGLFYLKLSREDFLSWKKLGVGVQWCDLSSLQPLPPGLKQSSHLSLQSS

SEQ ID NO: 47695 - protein, 594 aa, Homo sapiens
MFFMNHQHSTAQLNLSNMKISAECFDLILQFMYLGKIMTAPSSFEQFKVAMNYLQLYNVPDCLEDIQDADCSSSKCSSSASSKQNSKMIFGVRMYEDTVARNGNEANRWCAEPSSTVNTPHNREADEESLQLGNFPEPLFDVCKKSSVSKLSTPKERVSRRFGRSFTCDSCGFGFSCEKLLDEHVLTCTNRHLYQNTRSYHRIVDIRDGKDSNIKAEFGEKDSSKTFSAQTDKYRGDTSQAADDSASTTGSRKSSTVESEIASEEKSRAAERKRIIIKMEPEDIPTDELKDFNIIKVTDKDCNESTDNDELEDEPEEPFYRYYVEEDVSIKKSGRKTLKPRMSVSADERGGLENMRPPNNSSPVQEDAENASCELCGLTITEEDLSSHYLAKHIENICACGKCGQILVKGRQLQEHAQRCGEPQDLTMNGLGNTEEKMDLEENPDEQSEIRDMFVEMLDDFRDNHYQINSIQKKQLFKHSACPFRCPNCGQRFETENLVVEHMSSCLDQDMFKSAIMEENERDHRRKHFCNLCGKGFYQRCHLREHYTVHTKEKQFVCQTCGKQFLRERQLRLHNDMHKGMASGEIGPSKPVEK

SEQ ID NO: 47696 - protein, 663 aa, Homo sapiens [sequence omitted]

SEQ ID NO: 47697 - protein, 399 aa, Homo sapiens
MESSGGSPGKGPGQGQANGFDLHEPLFILEEHELGAITEESATASPESSSPTEGRSPAHLARELKELVKELSSSTQGELVAPLHPRIVQLSHVMDSHVSERVKNKVYQLARQYSLRIKSNKPVMARPPLQWEKVAPERDGKSPTVPCLQEEAGEPLGGKGKRKPVLSLFDYEQLMAQEHSPPKPSSAGEMSPQRFFFNPSAVSQRTTSPGGRPSARSPLSPTETFSWPDVRELCSKYASRDEARRAGGGRPRGPPVNRSHSVPENMVEPPLSGRVGRCRSLSTKRGRGGGEAAQSPGPLPQSKPDGGETLYVTADLTLEDNRRVIVMEKGPLPSPTAGLEESSGQGPSSPVALLGQVQDFQQSAECQPKEEGSRDPADPSQQGRVRNLREKFQALNSVG

SEQ ID NO: 47698 - protein, 40 aa, Homo sapiens
MLITNKSLKEEDGEEIVTYDRVYHAVSVMRQSRRYYQYSP

SEQ ID NO: 47699 - protein, 74 aa, Homo sapiens
MLITNKSLKEEDGEEIVTYDHLCKNCHHVIARHEYTFSIMDEFQEYTMLCLLCGKAEDTISILPDDPRQMTLLF

SEQ ID NO: 47700 - protein, 75 aa, Homo sapiens
MLITNKSLKEEDGEEIVTYDPDLCKNCHHVIARHEYTFSIMDEFQEYTMLCLLCGKAEDTISILPDDPRQMTLLF

SEQ ID NO: 47701 - protein, 171 aa, Homo sapiens
MEEELRYAPLSFRNPMMSKLRNYRKDLAKLHREVRSTPLTATPGGRGDMKYGIYAVENEHMNRLQSQRAMLLQGTESLNRATQSIERSHRIATETDQIGSEIIEELGEQRDQLERTKSRLVNTSENLSKSRKILRSMSRKVTTNKLLLSIIILLELAILGGLVYYKFFRSH

SEQ ID NO: 47702 - protein, 880 aa, Homo sapiens
MQPEEDWDRDLLLDPAWEKQQRKTFTAWCNSHLRKAGTQIENIEEDFRDGLKLMLLLEVISGERLAKPERGKMRVHKISNVNKALDFIASKGVKLVSIGAEEIVDGNVKMTLGMIWTIILRFAIQDISVEETSAKEGLLLWCQRKTAPYKNVNIQNFHISWKDGLGFCALIHRHRPELIDYGKLRKDDPLTNLNTAFDVAEKYLDIPKMLDAEDIVGTARPDEKAIMTYVSSFYHAFSGAQKAETAANRICKVLAVNQENEQLMEDYEKLASDLLEWIRRTIPWLENRVPENTMHAMQQKLEDFRDYRRLHKPPKVQEKCQLEINFNTLQTKLRLSNRPAFMPSEGRMVSDINNAWGCLEQVEKGYEEWLLNEIRRLERLDHLAEKFRQKASIHEAWTDGKEAMLRQKDYETATLSEIKALLKKHEAFESDLAAHQDRVEQIAAIAQELNELDYYDSPSVNARCQKICDQWDNLGALTQKRREALERTEKLLETIDQLYLEYAKRAAPFNNWMEGAMEDLQDTFIVHTIEEIQGLTTAHEQFKATLPDADKERLAILGIHNEVSKIVQTYHVNMAGTNPYTTITPQEINGKWDHVRQLVPRRDQALTEEHARQQHNERLRKQFGAQANVIGPWIQTKMEEIGRISIEMHGTLEDQLSHLRQYEKSIVNYKPKIDQLEGDHQLIQEALIFDNKHTNYTMEHIRVGWEQLLTTIARTINEVENQILTRDAKGISQEQMNEFRASFNHFDRDHSGTLGPEEFKACLISLGYDIGNDPQGEAEFARIMSIVDPNRLGVVTFQAFIDFMSRETADTDTADQVMASFKILAGDKNYITMDELRRELPPDQAEYCIARMAPYTGPDSVPGALDYMSFSTALYGESDL

SEQ ID NO: 47703 - protein, 875 aa, Homo sapiens
MQPEEDWDRDLLLDPAWEKQQRKTFTAWCNSHLRKAGTQIENIEEDFRDGLKLMLLLEVISGERLAKPERGKMRVHKISNVNKALDFIASKGVKLVSIGAEEIVDGNVKMTLGMIWTIILRFAIQDISVEETSAKEGLLLWCQRKTAPYKNVNIQNFHISWKDGLGFCALIHRHRPELIDYGKLRKDDPLTNLNTAFDVAEKYLDIPKMLDAEDIVGTARPDEKAIMTYVSSFYHAFSGAQKAETAANRICKVLAVNQENEQLMEDYEKLASDLLEWIRRTIPWLENRVPENTMHAMQQKLEDFRDYRRLHKPPKVQEKCQLEINFNTLQTKLRLSNRPAFMPSEGRMVSDINNAWGCLEQVEKGYEEWLLNEIRRLERLDHLAEKFRQKASIHEAWTDGKEAMLRQKDYETATLSEIKALLKKHEAFESDLAAHQDRVEQIAAIAQELNELDYYDSPSVNARCQKICDQWDNLGALTQKRREALERTEKLLETIDQLYLEYAKRAAPFNNWMEGAMEDLQDTFIVHTIEEIQGLTTAHEQFKATLPDADKERLAILGIHNEVSKIVQTYHVNMAGTNPYTTITPQEINGKWDHVRQLVPRRDQALTEEHARQQHNERLRKQFGAQANVIGPWIQTKMEEIGRISIEMHGTLEDQLSHLRQYEKSIVNYKPKIDQLEGDHQLIQEALIFDNKHTNYTMEHIRVGWEQLLTTIARTINEVENQILTRDAKGISQEQMNEFRASFNHFDRKKTGMMDTDDFRACLISMGYNMGEAEFARIMSIVDPNRLGVVTFQAFIDFMSRETADTDTADQVMASFKILAGDKNYITMDELRRELPPDQAEYCIARMAPYTGPDSVPGALDYMSFSTALYGESDL

SEQ ID NO: 47704 - skipped

SEQ ID NO: 47705 - protein, 225 aa, Homo sapiens [sequence omitted]

SEQ ID NO: 47706 - protein, 14 aa, Homo sapiens
MVAAWAFMRYRQQL

SEQ ID NO: 47707 - protein, 2291 aa, Homo sapiens [sequence omitted]

SEQ ID NO: 47708 - protein, 2180 aa, Homo sapiens
MALPSTMIIVAVYCPVIAAVFIVLKMVNYRLHRALDAGEVVDRTANEFTDQRTKAEQGNCSTRRKDSNGPSDPGGGIEMSEFIREATPPVGCSSRNSYAGLDPSNQIGSGSSRLGTAATIKGDTDTAKTSDDISLSLGQSSSLCKEGSEEQDLAADRKLFRLVSNDSFISIQPSLSSCGQDLPRDFSDKVNLPSHNHHHHVDQSLSSACDTEVASLVPLHSHSYRKDHRPRGVPRTSSSAVAFPDTSLNDFPLYQQRRGLDPVSELESSKPLSGSKESLVENSGLSGEFQLAGDLKINTSQPPTKSGKSKPLKAEKSMDSLRSLSTRSSGSTESYCSGTDRDTNSTVSSYKSEQTSSTHIESILSEHEESPKAGTKSGRKKECCAGPEEKNSCASDKRTSSEKIAMEASTNSGVHEAKDPTPSDEMHNQRGLSTSASEEANKNPHANEFTSQGDRPPGNTAENKEEKSDKSAVSVDSKVRKDVGGKQKEGDVRPKSSSVIHRTASAHKSGRRRTGKKRASSFDSSRHRDYVCFRGVSGTKPHSAIFCHDEDSSDQSDLSRASSVQSAHQFSSDSSSSTTSHSCQSPEGRYSALKTKHTHKERGTDSEHTHKAHLVPEGTSKKRATRRTSSTNSAKTRARVLSLDSGTVACLNDSNRLMAPESIKPLTTSKSDLEAKEGEVLDELSLLGRASQLETVTRSRNSLPNQVAFPEGEEQDAVSGGKFSSTLYETGGCDMSLVNFEPAARRASNICDTDSHVSSSTSVRFYPHDVIRLNRLLTIDTDLLEQQDIDLSPDLAATYGPTEEAAQKVKHYYRFWILPQLWIGINFDRLTLLALFDRNREILENVLAVILAILVAFLGSILLIQGFFRDIWVFQFCLVIASCQYSLLKSVQPDSSSPRHGHNRIIAYSRPVYFCICCGLIWLLDYGSRNLTATKFKLYGITFTNPLVFISARDLVIVFTLCFPIVFFIGLLPQVNTFVMYLCEQLDIHIFGGNATTSLLAALYSFICSIVAVALLYGLCYGALKDSWDGQHIPVLFSIFCGLLVAVSYHLSRQSSDPSVLFSLVQSKIFPKTEEKNPEDPLSEVKDPLPEKLRNSVSERLQSDLVVCIVIGVLYFAIHVSTVFTVLQPALKYVLYTLVGFVGFVTHYVLPQVRKQLPWHCFSHPLLKTLEYNQYEVRNAATMMWFEKLHVWLLFVEKNIIYPLIVLNELSSSAETIASPKKLNTELGALMITVAGLKLLRSSFSSPTYQYVTVIFTVLFFKFDYEAFSETMLLDLFFMSILFNKLWELLYKLQFVYTYIAPWQITWGSAFHAFAQPFAVPHSAMLFIQAAVSAFFSTPLNPFLGSAIFITSYVRPVKFWERDYNTKRVDHSNTRLASQLDRNPGSDDNNLNSIFYEHLTRSLQHSLCGDLLLGRWGNYSTGDCFILASDYLNALVHLIEIGNGLVTFQLRGLEFRGTYCQQREVEAITEGVEEDEGFCCCEPGHIPHMLSFNAAFSQRWLAWEVIVTKYILEGYSITDNSAASMLQVFDLRKVLTTYYVKGIIYYVTTSSKLEEWLANETMQEGLRLCADRNYVDVDPTFNPNIDEDYDHRLAGISRESFCVIYLNWIEYCSSRRAKPVDVDKDSSLVTLCYGLCVLGRRALGTASHHMSSNLESFLYGLHALFKGDFRISSIRDEWIFADMELLRKVVVPGIRMSIKLHQDHFTSPDEYDDPTVLYEAIVSHEKNLVIAHEGDPAWRSAVLANSPSLLALRHVMDDGTNEYKIIMLNRRYLSFRVIKVNKECVRGLWAGQQQELVFLRNRNPERGSIQNAKQALRNMINSSCDQPIGYPIFVSPLTTSYSDSHEQLKDILGGPISLGNIRNFIVSTWHRLRKGCGAGCNSGGNIEDSDTGGGTSCTGNNATTANNPHSNVTQGSIGNPGQGSGTGLHPPVTSYPPTLGTSHSSHSVQSGLVRQSPARASVASQSSYCYSSRHSSLRMSTTGFVPCRRSSTSQISLRNLPSSIQSRLSMVNQMEPSGQSGLACVQHGLPSSSSSSQSIPACKHHTLVGFLATEGGQSSATDAQPGNTLSPANNSHSRKAEVIYRVQIVDPSQILEGINLSKRKELQWPDEGIRLKAGRNSWKDWSPQEGMEGHVIHRWVPCSRDPGTRSHIDKAVLLVQIDDKYVTVIETGVLELGAEV

SEQ ID NO: 47709 - protein, 152 aa, Homo sapiens
MEYKMNEGVSYEFKFPFRNNNKWQRNASKGPHSPQVPSQVQSPMTSRLNAGKGDGKMPPPERAANIPRSISSDGRPLERRFGVSRRSPASIDRQNTQSDIGGSGKSTPSWQRSEDSIADQMAYSYRGPQDFNSFVLEQHEYTGKIFPKCHGK

SEQ ID NO: 47710 - protein, 130 aa, Homo sapiens
MTSLRQPRLAQLGPPLCQKRYFRLLPGHNNCNPLTKESIRQKEMESKRLRLLQEEDRRKKIARMGFNASSMLRKSQLGFLNVTNYCHLAHELRLSCMERKKVQIRSMDPSALASDRFNLILIPTVTGSSQ

SEQ ID NO: 47711 - protein, 419 aa, Homo sapiens
MACALGYDIHFHDKKILLLEAGPKKVLEKLSETYSNRVSSISPGSATLLSSFGAWDHICNMRYRAFRRMQVWDACSEALIMFDKDNLDDMGYIVENDVIMHALTKQLEAVSDRVTVLYRSKAIRYTWPCPFPMADSSPWVHITLGDGSTFQTKLLIGADGHNSGVRQAVGIQNVSWNYDQSAVVATLHLSEATENNVAWQRFLPSGPIALLPLSDTLSSLVWSTSHEHAAELVSMDEEKFVDAVNSAFWSDADHTDFIDTAGAMLQYAVSLLKPTKVSARQLPPSVARVDAKSRVLFPLGLGHAAEYVRPRVALIGDAAHRVHPLAGQGVNMGFGDISSLAHHLSTAAFNGKDLGSVSHLTGYETERQRHNTALLAATDLLKRLYSTSASPLVLLRTWGLQATNAVSPLKEQIMAFASK

SEQ ID NO: 47712 - protein, 397 aa, Homo sapiens
MLVVSCVCSAVSHRNQQTWFEGIFLSSMCPINVSASTLYGIMFDAGSTGTRIHVYTFVQKMPGQLPILEGEVFDSVKPGLSAFVDQPKQGAETVQGLLEVAKDSIPRSHWKKTPVVLKATAGLRLLPEHKAKALLFEVKEIFRKSPFLVPKGSVSIMDGSDEGILAWVTVNFLTGQLHGHRQETVGTLDLGGASTQITFLPQFEKTLEQTPRGYLTSFEMFNSTYKLYTHSYLGFGLKAARLATLGALETEGTDGHTFRSACLPRWLEAEWIFGGVKYQYGGNQEGEVGFEPCYAEVLRVVRGKLHQPEEVQRGSFYAFSYYYDRAVDTDMIDYEKGGILKVEDFERKAREVCDNLENFTSGSPFLCMDLSYITALLKDGFGFADSTVLQHIISWVN

SEQ ID NO: 47713 - protein, 418 aa, Homo sapiens [sequence omitted]

SEQ ID NO: 47714 - protein, 457 aa, Homo sapiens
MDAAIASCKRAFPAWADTSVLSRQQVLLRYQQLIKENLKEIAKLITLEQGKTLADAEGDVFRGLQVVEHACSVTSLMMGETMPSITKDMDLYSYRLPLGVCAGIAPFNFPAMIPLWMFPMAMVCGNTFLMKPSERVPGATMLLAKLLQDSGAPDGTLNIIHGQHEAVNFICDHPDIKAISFVGSNKAGEYIFERGSRHGKRVQANMGAKNHGVVMPDANKENTLNQLVGAAFGAAGQRCMALSTAVLVGEAKKWLPELVEHAKNLRVNAGDQPGADLGPLITPQAKERVCNLIDSGTKEGASILLDGRKIKVKGYENGNFVGPTIISNVKPNMTCYKEEIFGPVLVVLETETLDEAIQIVNNNPYGNGTAIFTTNGATARKYAHLVDVGQVGVNVPIPVPLPMFSFTGSRSSFRGDTNFYGKQGIQFYTQLKTITSQWKEEDATLSSPAVVMPTMGR

SEQ ID NO: 47715 - protein, 565 aa, Homo sapiens [sequence omitted]

SEQ ID NO: 47716 - protein, 73 aa, Homo sapiens
MGVPVPFPIPEPDGCKSGINCPIQKDKTYSYLNKLPVKSEYPSIKLVVEWQLQDDKNQSLFCWEIPVQIVSHL

SEQ ID NO: 47717 - protein, 431 aa, Homo sapiens
MPPMSKPPPVQQTVDYGHGRDISTNKVEQIPYGERITLRPDPLPERSTFETEHAGQRDRYDRERDREPYFDRQSNVIADHRDFKRDRETHRDRDRDRGVIDYDRDRFDRERRPRDDRAQSYRDKKDHSSSRRGGFDRPSYDRKSDRPVYEGPSMFGGERRTYPEERMPLPAPSLSHQPPPAPRVEKKPESKNVDDILKPPGRESRPERIVVIMRGLPGSGKTHVAKLIRDKEVEFGGPAPRVLSLDDYFITEVEKEEKDPDSGKKVKKKVMEYEYEAEMEETYRTSMFKTFKKTLDDGFFPFIILDAINDRVRHFDQFWSAAKTKGFEVYLAEMSADNQTCGKRNIHGRKLKEINKMADHWETAPRHMMRLDIRSLLQDAAIEEVEMEDFDANIEEQKEEKKDAEEEESELVGDRPTTLNSVSLLKFLKKV

SEQ ID NO: 47718 - protein, 1277 aa, Homo sapiens [sequence omitted]

SEQ ID NO: 47719 - protein, 330 aa, Homo sapiens
MHGEREEGCTQENTESEYYAKEIHKFDMIQGLAEHNELAVCPKGITSKVFRFNVSSVEKNRTNLFRAEFRVLRVPNPSSKRNEQRIELFQILRPDEHIAKQRYIGGKNLPTRGTAEWLSFDVTDTVREWLLRRESNLGLEISIHCPCHTFQPNGDILENIHEVMEIKFKGVDNEDDHGRGDLGRLKKQKDHHNPHLILMMIPPHRLDNPGQGGQRKKRALDTNYCFRNLEENCCVRPLYIDFRQDLGWKWVHEPKGYYANFCSGPCPYLRSADTTHSTVLGLYNTLNPEASASPCCVPQDLEPLTILYYVGRTPKVEQLSNMVVKSCKCS

SEQ ID NO: 47720 - protein, 397 aa, Homo sapiens
MQEIRQVIREDLGKEIHDLFQSFDDTPLGTASLAQVHKAVLHDGRTVAVKVQHPKVRAQSSKDILLMEVLVLAVKQLFPEFEFMWLVDEAKKNLPLELDFLNEGRNAEKVSQMLRHFDFLKVPRIHWDLSTERVLLMEFVDGGQVNDRDYMERNKIDVNEISRHLGKMYSEMIFVNGFVHCDPHPGNVLVRKHPGTGKAEIVLLDHGLYQMLTEEFRLNYCHLWQSLIWTDMKRVKEYSQRLGAGDLYPLFACMLTARSWDSVNRGISQAPVTATEDLEIRNNAANYLPQISHLLNHVPRQMLLILKTNDLLRGIEAALGTRASASSFLNMSRCCIRALAEHKKKNTCSFFRRTQISFSEAFNLWQINLHELILRVKGLKLADRVLALICWLFPAPL

SEQ ID NO: 47721 - protein, 460 aa, Homo sapiens [sequence omitted]

SEQ ID NO: 47722 - protein, 961 aa, Homo sapiens
MDGYGEESYPAKDSQGSDISIGACLEGIFVKHKNGRHPVVFRWHDIANMSHNKSFFALELANKEETIQFQTEDMETAKYIWRLCVARHKFYRLNQCNLQTQTVTVNPIRRRSSSRMSLPKPQPYVMPPPPQLHYNGHYTEPYASSQDNLFVPNQNGYYCHSQTSLDRAQIDLNGRIRNGSVYSAHSTNSLNNPQPYLQPSPMSSNPSITGSDVMRPDYLPSHRHSAVIPPSYRPTPDYETVMKQLNRGLVHAERQSHSLRNLNIGSSYAYSRPAALVYSQPEIREHAQLPSPAAAHCPFSLSYSFHSPSPYPYPAERRPVVGAVSVPELTNAQLQAQDYPSPNIMRTQVYRPPPPYPPPRPANSTPDLSRHLYISSSNPDLITRRVHHSVQTFQEDSLPVAHSLQEVSEPLTAARHAQLHKRNSIEVAGLSHGLEGLRLKERTLSASAAEVAPRAVSVGSQPSVFTERTQREGPEEAEGLRYGHKKSLSDATMLIHSSEEEEDEDFEEESGARAPPARAREPRPGLAQDPPGCPRVLLAGPLHILEPKAHVPDAEKRMMDSSPVRTTAEAQRPWRDGLLMPSMSESDLTTSGRYRARRDSLKKRPVSDLLSGKKNIVEGLPPLGGMKKTRVDAKKIGPLKLAALNGLSLSRVPLPDEGKEVATRATNDERCKILEQRLEQGMVFTEYERILKKRLVDGECSTARLPENAERNRFQDVLPYDDVRVELVPTKENNTGYINASHIKVSVSGIEWDYIATQGPLQNTCQDFWQMVWEQGIAIIAMVTAEEEGGREKSFRYWPRLGSRHNTVTYGRFKITTRFRTDSGCYATTGLKMKHLLTGQERTVWHLQYTDWPEHGCPEDLKGFLSYLEEIQSVRRHTNSTSDPQSPNPPLLVHCSAGVGRTGVVILSEIMIACLEHNEVLDIPRVLDMLRQQRMMLVQTLCQYTFVYRVLIQFLKSSRLI

SEQ ID NO: 47723 - protein, 700 aa, Homo sapiens
MVANKKSQDQMTEDLSLFLGNNTIRFTVWLHGVLDKLRSVTTEPSSLKSSDTNIFDSNVPSNKSNFSRGDERRHEAAVPPLAIPSARPEKRDSRVSTSSQESKTTNVRQTYDDGAATRLMSTVKPLREPAPSEDVIDIKPEPDDLIDEDLNFVQENPLSQKKPTVTLTYGSSRPSIEIYRPPASRNADSGVHLNRLQFQQQQNSIHAAKQLDMQSSWVYETGRLCEPEVLNSLEETYSPFFRNNSEKMSMEDENFRKRKLPVVSSVVKVKKFNHDGEEEEEDDDYGSRTGSISSSVSVPAKPERRPSLPPSKQANKNLILKAISEAQESVTKTTNYSTVPQKQTLPVAPRTRTSQEELLAEVVQGQSRTPRISPPIKEEETKGDSVEKNQGTQQRQLLSRLQIDPVMAETLQMSQDYYDMESMVHADTRSFILKKPKLSEEVVVAPNQESGMKTADSLRVLSGHLMQTRDLVQPDKPASPKFIVTLDGVPSPPGYMSDQEEDMCFEGMKPVNQTAASNKGLRGLLHPQQLHLLSRQLEDPNGSFSNAEMSELSVAQKPEKLLERCKYWPACKNGDECAYHHPISPCKAFPNCKFAEKCLFVHPNCKYDAKCTKPDCPFTHVSRRIPVLSPKPAVAPPAPPSSSQLCRYFPACKKMECPFYHPKHCRFNTQCTRPDCTFYHPTINVPPRHALKWIRPQTSE

SEQ ID NO: 47724 - protein, 543 aa, Homo sapiens
MVANKKSQDQMTEDLSLFLGNNTIRFTVWLHGVLDKLRSVTTEPSSLKSSDTNIFDSNVPSNKSNFSRGDERRHEAAVPPLAIPSARPEKRDSRVSTSSQESKTTNVRQTYDDGAATRLMSTVKPLREPAPSEDVIDIKPEPDDLIDEDLNFVQENPLSQKKPTVTLTYGSSRPSIEIYRPPASRNADSGVHLNRLQFQQQQNSIHAAKQLDMQSSWVYETGRLCEPEVLNSLEETYSPFFRNNSEKMSMEDENFRKRKLPVVSSVVKVKKFNHDGEEEEEDDDYGSRTGSISSSVSVPAKPERRPSLPPSKQANKNLILKAISEAQESVTKTTNYSTVPQKQTLPVAPRTRTSQEELLAEVVQGQSRTPRISPPIKEEETKGDSVEKNQAEMSELSVAQKPEKLLERCKYWPACKNGDECAYHHPISPCKAFPNCKFAEKCLFVHPNCKYDAKCTKPDCPFTHVSRRIPVLSPKPVAPPAPPSSSQLCRYFPACKKMECPFYHPKHCRFNTQCTRPDCTFYHPTINVPPRHALKWIRPQTSE

SEQ ID NO: 47725 - protein, 675 aa, Homo sapiens
MVANKKSQDQMTEDLSLFLGNNTIRFTVWLHGVLDKLRSVTTEPSSLKSSDTNIFDSNVPSNKSNFSRGDERRHEAAVPPLAIPSARPEKRDSRVSTSSQESKTTNVRQTYDDGAATRLMSTVKPLREPAPSEDVIDIKPEPDDLIDEDLNFVQENPLSQKKPTVTLTYGSSRPSIEIYRPPASRNADSGVHLNRLQFQQQQNSIHAAKQLDMQSSWVYETGRLCEPEVLNSLEETYSPFFRNNSEKMSMEDENFRKRKLPVVSSVVKVKKFNHDGEEEEEDDDYGSRTGSISSSVSVPAKPERRPSLPPSKQANKNLILKAISEAQESVTKTTNYSTVPQKQTLPVAPRTRTSQEELLAEVVQGQSRTPRISPPIKEEETKGDSVEKNQDYYDMESMVHADTRSFILKKPKLSEEVVVAPNQESGMKTADSLRVLSGHLMQTRDLVQPDKPASPKFIVTLDGVPSPPGYMSDQEEDMCFEGMKPVNQTAASNKGLRGLLHPQQLHLLSRQLEDPNGSFSNAEMSELSVAQKPEKLLERCKYWPACKNGDECAYHHPISPCKAFPNCKFAEKCLFVHPNCKYDAKCTKPDCPFTHVSRRIPVLSPKPAVAPPAPPSSSQLCRYFPACKKMECPFYHPKHCRFNTQCTRPDCTFYHPTINVPPRHALKWIRPQTSE

SEQ ID NO: 47726 - protein, 569 aa, Homo sapiens
MVANKKSQDQMTEDLSLFLGNNTIRFTVWLHGVLDKLRSVTTEPSSLKSSDTNIFDSNVPSNKSNFSRGDERRHEAAVPPLAIPSARPEKRDSRVSTSSQESKTTNVRQTYDDGAATRLMSTVKPLREPAPSEDVIDIKPEPDDLIDEDLNFVQENPLSQKKPTVTLTYGSSRPSIEIYRPPASRNADSGVHLNRLQFQQQQNSIHAAKQLDMQSSWVYETGRLCEPEVLNSLEETYSPFFRNNSEKMSMEDENFRKRKLPVVSSVVKVKKFNHDGEEEEEDDDYGSRTGSISSSVSVPAKPERRPSLPPSKQANKNLILKAISEAQESVTKTTNYSTVPQKQTLPVAPRTRTSQEELLAEVVQGQSRTPRISPPIKEEETKGDSVEKNQGTQQRQLLSRLQIDPVMAETLQMSQAEMSELSVAQKPEKLLERCKYWPACKNGDECAYHHPISPCKAFPNCKFAEKCLFVHPNCKYDAKCTKPDCPFTHVSRRIPVLSPKPAVAPPAPPSSSQLCRYFPACKKMECPFYHPKHCRFNTQCTRPDCTFYHPTINVPPRHALKWIRPQTSE

SEQ ID NO: 47727 - protein, 801 aa, Homo sapiens [sequence omitted]

SEQ ID NO: 47728 - protein, 741 aa, Homo sapiens
MDIIDSLRKHVHQIDAVLLSHPDPLHLGALPYAVGKLGLNCAIYATIPVYKMGQMFMYDLYQSRHNTEDFTLFTLDDVDAAFDKIQQLKFSQIVNLKGKGHGLSITPLPAGHMIGGTIWKIVKDGEEEIVYAVDFNHKREIHLNGCSLEMLSRPSLLITDSFNATYVQPRRKQRDEQLLTNVLETLRGDGNVLIAVDTAGRVLELAQLLDQIWRTKDAGLGVYSLALLNNVSYNVVEFSKSQVEWMSDKLMRCFEDKRNNPFQFRHLSLCHGLSDLARVPSPKVVLASQPDLECGFSRDLFIQWCQDPKNSIILTYRTTPGTLARFLIDNPSEKITEIELRKRVKLEGKELEEYLEKEKLKKEAAKKLEQSKEADIDSSDESDIEEDIDQPSAHKTKHDLMMKGEGSRKGSFFKQAKKSYPMFPAPEERIKWDEYGEIIKPEDFLVPELQATEEEKSKLESGLTNGDEPMDQDLSDVPTKCISTTESIEIKARVTYIDYEGRSDGDSIKKIINQMKPRQLIIVHGPPEASQDLAECCRAFGGKDIKVYMPKLHETVDATSETHIYQVRLKDSLVSSLQFCKAKDAELAWIDGVLDMRVSKVDTGVILEEGELKDDGEDSEMQVEAPSDSSVIAQQKAMKSLFGDDEKETGEESEIIPTLEPLPPHEVPGHQSVFMNEPRLSDFKQVLLREGIQAEFVGGVLVCNNQVAVRRTETGRIGLEGCLCQDFYRIRDLLYEQYAIV

SEQ ID NO: 47729 - protein, 279 aa, Homo sapiens
MADLYEYKYCTDVDLIFQETCFPVHRAILAARCPFFKTLLSSSPEYGAEIIMDINTAGIDMPMFSALLHYLYTGEFGMEDSRFQNVDILVQLSEEFGTPNSLDVDMRGLFDYMCYYDVVLSFSSDSELVEAFGGNQNCLDEELKAHKAVISARSPFFRNLLQRRIRTGEEITDRTLRTPTRIILDESIIPKKYATVILHCMYTDVVDLSVLHCSPSVGSLSEVQALVAGKPNMTRAEEAMELYHIALFLEFNMLAQEETTVIRPACAAELSNSCLLPQS

SEQ ID NO: 47730 - protein, 1912 aa, Homo sapiens
MAGLQLMTPASSPMGPFFGLPWQQEAIHDNIYTPRKYQVELLEAALDHNTIVCLNTGSGKTFIAVLLTKELSYQIRGDFSRNGKRTVFLVNSANQVAQQVSAVRTHSDLKVGEYSNLEVNASWTKERWNQEFTKHQVLIMTCYVALNVLKNGYLSLSDINLLVFDECHLAILDHPYREIMKLCENCPSCPRILGLTASILNGKCDPEELEEKIQKLEKILKSNAETATDLVVLDRYTSQPCEIVVDCGPFTDRSGLYERLLMELEEALNFINDCNISVHSKERDSTLISKQILSDCRAVLVVLGPWCADKVAGMMVRELQKYIKHEQEELHRKFLLFTDTFLRKIHALCEEHFSPASLDLKFVTPKVIKLLEILRKYKPYERQQFESVEWYNNRNQDNYVSWSDSEDDDEDEEIEEKEKPETNFPSPFTNILCGIIFVERRYTAVVLNRLIKEAGKQDPELAYISSNFITGHGIGKNQPRNKQMEAEFRKQEEVLRKFRAHETNLLIATSIVEEGVDIPKCNLVVRFDLPTEYRSYVQSKGRARAPISNYIMLADTDKIKSFEEDLKTYKAIEKILRNKCSKSVDTGETDIDPVMDDDDVFPPYVLRPDDGGPRVTINTAIGHINRYCARLPSDPFTHLAPKCRTRELPDGTFYSTLYLPINSPLRASIVGPPMSCVRLAERVVALICCEKLHKIGELDDHLMPVGKETVKYEEELDLHDEEETSVPGRPGSTKRRQCYPKAIPECLRDSYPRPDQPCYLYVIGMVLTTPLPDELNFRRRKLYPPEDTTRCFGILTAKPIPQIPHFPVYTRSGEVTISIELKKSGFMLSLQMLELITRLHQYIFSHILRLEKPALEFKPTDADSAYCVLPLNVVNDSSTLDIDFKFMEDIEKSEARIGIPSTKYTKETPFVFKLEDYQDAVIIPRYRNFDQPHRFYVADVYTDLTPLSKFPSPEYETFAEYYKTKYNLDLTNLNQPLLDVDHTSSRLNLLTPRHLNQKGKALPLSSAEKRKAKWESLQNKQILVPELCAIHPIPASLWRKAVCLPSILYRLHCLLTAEELRAQTASDAGVGVRSLPADFRYPNLDFGWKKSIDSKSFISISNSSSAENDNYCKHSTIVPENAAHQGANRTSSLENHDQMSVNCRTLLSESPGKLHVEVSADLTAINGLSYNQNLANGSYDLANRDFCQGNQLNYYKQEIPVQPTTSYSIQNLYSYENQPQPSDECTLLSNKYLDGNANKSTSDGSPVMAVMPGTTDTIQVLKGRMDSEQSPSIGYSSRTLGPNPGLILQALTLSNASDGFNLERLEMLGDSFLKHAITTYLFCTYPDAHEGRLSYMRSKKVSNCNLYRLGKKKGLPSRMVVSIFDPPVNWLPPGYVVNQDKSNTDKWEKDEMTKDCMLANGKLDEDYEEEDEEEESLMWRAPKEEADYEDDFLEYDQEHIRFIDNMLMGSGAFVKKISLSPFSTTDSAYEWKMPKKSSLGSMPFSSDFEDFDYSSWDAMCYLDPSKAVEEDDFVVGFWNPSEENCGVDTGKQSISYDLHTEQCIADKSIADCVEALLGCYLTSCGERAAQLFLCSLGLKVLPVIKRTDREKALCPTRENFNSQQKNLSVSCAAASVASSRSSVLKDSEYGCLKIPPRCMFDHPDADKTLNHLISGFENFEKKINYRFKNKAYLLQAFTHASYHYNTITDCYQRLEFLGDAILDYLITKHLYEDPRQHSPGVLTDLRSALVNNTIFASLAVKYDYHKYFKAVSPELFHVIDDFVQFQLEKNEMQGMDSELRRSEEDEEKEEDIEVPKAMGDIFESLAGAIYMDSGMSLETVWQVYYPMMRPLIEKFSANVPRSPVRELLEMEPETAKFSPAERTYDGKVRVTVEVVGKGKFKGVGRSYRIAKSAAARRALRSLKANQPQVPNS

SEQ ID NO: 47731 - protein, 167 aa, Homo sapiens
MSVPSPTSATKTSPLNSSGSSQGRNSPAPAVTAASVTNIQATEVSVPQVNSSESSGGTSSESIPQTATQPAISPPPKPTVSRVVSSTRLVNPPPRSSGNAATSGNAATKIPTPIVGVKRTSSPHKEESPKKTKTEEKTSSTDLSDIPALPANPIPVIKNSIKLRLNR

SEQ ID NO: 47732 - protein, 365 aa, Homo sapiens [sequence omitted]

SEQ ID NO: 47733 - protein, 721 aa, Homo sapiens [sequence omitted]

SEQ ID NO: 47734 - protein, 572 aa, Homo sapiens [sequence omitted]

SEQ ID NO: 47735 - protein, 560 aa, Homo sapiens [sequence omitted]

SEQ ID NO: 47736 - protein, 381 aa, Homo sapiens [sequence omitted]

SEQ ID NO: 47737 - protein, 61 aa, Homo sapiens
MSETENSCSRLCHPFFSRQKIPKSCNQRSLHLIDKATNKPKCLSMSTAACQTSSIATRCPV

SEQ ID NO: 47738 - protein, 545 aa, Homo sapiens
MSTMVYIKEDKLEKLTQDEIISKTKQVIQGLEALKNEHNSILQSLLETLKCLKKDDESNLVEEKSNMIRKSLEMLELGLSEAQVMMALSNHLNAVESEKQKLRAQVRRLCQENQWLRDELANTQQKLQKSEQSVAQLEEEKKHLEFMNQLKKYDDDISPSEDKDTDSTKEPLDDLFPNDEDDPGQGIQQQHSSAAAAAQQGGYEIPARLRTLHNLVIQYASQGRYEVAVPLCKQALEDLEKTSGHDHPDVATMLNILALVDQNKYKDAANLLNDALAIREKTLGKDHPAVAATLNNLAVLYGKRGKYKEAEPLCKRALEIREKVLGKDHPDVAKQLNNLALLCQNQGKYEEVEYYYQRALEIYQTKLGPDDPNVAKTKNNLASCYLKQGKFKQAETLYKEILTRAHEREFGSVDDENKPIWMHAEEREECKGKQKDGTSFGEYGGWYKACKVDSPTVTTTLKNLGALYRRQGKFEAAETLEEAAMRSRKQGLDNVHKQRVAEVLNDPENMEKRRSRESLNVDVVKYESGPDGGEEMRKMKLGLVN

SEQ ID NO: 47739 - protein, 614 aa, Homo sapiens
MSTMVYIKEDKLEKLTQDEIISKTKQVIQGLEALKNEHNSILQSLLETLKCLKKDDESNLVEEKSNMIRKSLEMLELGLSEAQVMMALSNHLNAVESEKQKLRAQVRRLCQENQWLRDELANTQQKLQKSEQSVAQLEEEKKHLEFMNQLKKYDDDISPSEDKDTDSTKEPLDDLFPNDEDDPGQGIQQQHSSAAAAAQQGGYEIPARLRTLHNLVIQYASQGRYEVAVPLCKQALEDLEKTSGHDHPDVATMLNILALVYRDQNKYKDAANLLNDALAIREKTLGKDHPAVAATLNNLAVLYGKRGKYKEAEPLCKRALEIREKVLGKDHPDVAKQLNNLALLCQNQGKYEEVEYYYQRALEIYQTKLGPDDPNVAKTKNNLASCYLKQGKFKQAETLYKEILTRAHEREFGSVDDENKPIWMHAEEREECKGKQKDGTSFGEYGGWYKACKVDSPTVTTTLKNLGALYRRQGKFEAAETLEEAAMRSRKQGLDNVHKQRVAEVLNDPENMEKRRSRESLNVDVVKYESGPDGGEEVSMSVEWNGDGTGSLKRSGSFSKLRASIRRSSEKLVRKLKGGSSRESEPKNPGASLAEPLFVENDSSSSGLEDATAN

SEQ ID NO: 47740 - protein, 235 aa, Homo sapiens
MHAEEREECKGKQKDGTSFGEYGGWYKACKVDSPTVTTTLKNLGALYRRQGKFEAAETLEEAAMRSRKQRSISEIPKKILSANGSNHFPLPGSQGLDNVHKQRVAEVLNDPENMEKRRSRESLNVDVVKYESGPDGGEEVSMSVEWNGDGTGSLKRSGSFSKLRASIRRSSEKLVRKLKGGSSRESEPKNPGMKRASSLNVLNVGGKAAEDRFQERNNCLADSRALSASHTDLAH

SEQ ID NO: 47741 - protein, 111 aa, Homo sapiens
MLQSIIKNIWIPMKPYYTKVYQEIWIGMGLMGFIVYKIRAAEMGFCHVTQAGLELLGSSSPPILASQSAGINKREPQHLAQLGNFEQDFNIRIVSFLRCESGITFVLRDEG

SEQ ID NO: 47742 - protein, 5581 aa, Homo sapiens
MFQDTDVADGCRETPTKTLEGDGDQERLISKPRVGRGRQSQRERLSWPKFQSIKSKRGPGPQRSHSSSEAYEPRDAHDVSPTSTDTEAQLTVERQEQKAGPGSQRRRKFLNLRFRTGSGQGPSSTGQPGRGFQSGVGRAGVLEELGPWGDSLEETGAATGSRREERAEQDREVMPAQSMPLPTELGDPRLCEGTPQEGGLRAARLHGKTLEGQAQETAVAQRKPRAQPTPGMSREGEGEGLQSLEIGIARLSLRDTTEGGTQIGPPEIRVRVHDLKTPKFAFSTEKEPERERRLSTPQRGKRQDASSKAGTGLKGEEVEGAGWMPGREPTTHAEAQGDEGDGEEGLQRTRITEEQDKGREDTEGQIRMPKFKIPSLGWSPSKHTKTGREKATEDTEQGREGEATATADRREQRRTEEGLKDKEDSDSMTNTTKIQLIHDEKRLKKEQILTEKEVATKDSKFKMPKFKMPLFGASAPGKSMEASVDVSAPKVEADVSLLSMQGDLKTTDLSVQTPSADLEVQDGQVDVKLPEGPLPEGASLKGHLPKVQRPSLKMPKVDLKGPKLDLKGPKAEVTAPDVKMSLSSMEVDVQAPRAKLDGARLEGDLSLADKEVTAKDSKFKMPKFKMPSFGVSAPGKSMEDSVDVSAPKVEADVSLSSMQGDLKATDLSIQPPSADLEVQAGQVDVKLPEGPVPEGAGPKVHLPKVEMPSFKMPKVDLKGPQIDVKGPKLDLKGPKAEVTAPDGEVSLPSMEVDVQAQKAKLDGAWLEGDLSLADKDVTAKDSKFKMPKFKMPSFGVSAPGKSIKALVDVSAPKVEADLSLPSMQGDLKTTDLSIQPASTDLKVQADQVDVKLPEGHLPEGAGLKGHLPKVEMPSFKMPKVALKGPQVDVKGPKLDLKSPKAEVTAPDVEVSLPSVEVDVEAPGAKLDSARLEGELSLADKDVTAKDSRFKMPKFKMPSFGASAPGKSIEASVDVSAPKVEADVSLPSMQGDLKTTDLSIQPPSADLEVHAGQVDVKLLEGHVPEGAGFKGHLPKVQMPSLKMPKVDLKGPQVEVRGPKLDLKGHKAEVTAHEVAVSLPSVEVDMQAPGAKLDGAQLDGDLSLADKDVTAKDSKFKMPKFKMPSFGVSAPGKSIEASVDLSAPKVEADMSLPSMQGDLKTTDLSIQPPSTDLELQAGQLDVKLPEGPVPEGAGLKGHLPKLQMPSFKVPKVDLKGPEIDIKGPKLDLKDPKVEVTAPDVEVSLPSVEVDVEAPGAKLDGGRLEEDMSLADKDLTTKDSKFKMPKFKMPSFGVSAPGKSIEASVDVSAPKVEADVSLPSMQGDLKATDLSIQPPSADLEVQAGQVDVKLPEGPVSEGAGLKGHLPKVQMPSFKMPKVDLKGPQIDVKGPKLDLKGPKVEVTAPDVKMSLSSMEVDVQAPRAKLDGAQLEGDLSLADKAVTAKDSKFKMPKFKMPSFGVSAPGKSIEASVDVSEPKVEADVSLPSMQGDLKTTDLSIQSPSADLEVQAGQVNVKLPEGPLPEGAGFKGHLPKVQMPSLKMPKVALKGPQMDVKGPKLDLKGPKAEVMAPDVEVSLPSVEVDVEAPGAKLDSVRLEGDLSLADKDVTAKDSKFKMPKFKMPSFGVSAPGKSIEASVDVSAPKVEAEVSLPSMQGDLKTTDLCIPLPSADLVVQAGQVDMKLPEGQVPEGAGLKGHLPKVDMPSFKMPKVDLKGPQTDVKGAKLDLKGPKAEVTAPDVEVSLPSMEVDVQAQKAKLDGARLEGDLSLADKDMTAKDSKFKMPKFKMPSFGVSAPGRSIEASVDVPAPKVEADVSLPSMQGDLKTTDLSIQPPSADLKVQTGQVDVKLPEGHVPEGAGLKGHLPKVEMPSLKMPKVDLKGPQVDIKGPKLDLKDPKVEMRVPDVEVSLPSMEVDVQAPRAKLDSAHLQGDLTLANKDLTTKDSKFKMPKFKMPSFGVSAPGKSIEASVDVSPPKVEADMSLPSMQGDLKTTDLSIQPLSADVKVQAGQVDVKLLEGPVPEEVGLKGHLPKLQMPSFKVPKVDLKGPEIDIKGPKLDLKDPKVEVTAPDVEVSLPSVEVDVKAPGAKLDGARLEGDMSLADKDVTAKDSKFKMPKFKMLSFGVSALGKSIEASADVSALKVEADVSLPSMQGDLKTTDLSVQPPSADLEVQAGQVDVKLPEGPVPEGAGLKGHLPKLQMPSFKMPKVDLKGPQIDVKGPKLDLKGPKTDVMAPDVEVSQPSVEVDVEAPGAKLDGAWLEGDLSVADKDVTTKDSRFKIPKFKMPSFGVSAPGKSIEASVDVSAPKVEADGSLSSMQGDLKATDLSIQPPSADLEVQAGQVDVKLPEGPVPEGAGLKGHLPKVQMPSFKMPEMDLKGPQLDVKGPKLDLKGPKAEVTAPDVEMSLSSMEVDVQAPRAKLDGARLEGDLSLADKGVTAKDSKFKMPKFKMPSFRVSAPGESIEALVDVSELKVEADMSLPSMQGDLKTTDISIQPPSAQLEVQAGQVDVKLPEGHVPEGAGLKGHLPKLQMPSFKMPEVDLKGPQIDVKGPNVDLKGPKAEVTAPDVKMSLSSMEVDVQAPRAKLDGARLEGDLSLADKGMTAKDSKFKMPKFKMPSFGVSAPGKSIEASVDVSELKVEADGSFPSMQGDLKTTDIRIQPPSAQLEVQAGQVDVKLPEGHVPEGAGLKGHLPKVQMPSFKMPKVDLKGPQIDVKGPKLDLKGPKAEVTAPDVEVSLPSVEVDVEAPRAKLDGARLEGDLSLADKDVTAKDSKFKMPKFKMPSFGVSAPGKSIEVSVDVSAPKVEAEVSLPSMQGDLKTTDISIEPPSAQLEVQAGQVDLKLPEGHVPEGAGLKGHLPKLQMPSFKMPKVDRKGPQIDVKGPKLDLKGPKTDVTAPDVEVSQPGMEVDVEAPGAKLDGARLEGDLSLADKDVTAKDSKFKMPKFKMPSFGVSAPGKSIEVLVDVSAPKVEADLSLPSMQGDLKNTDISIEPPSAQLEVQAGQVDVKLPEGHVLEGAGLKGHLPKLQMPSFKMPKVDRKGPQIDIKGPKLDLKGPKMDVTAPDVEVSQPSMEVDVEAPGAKLDGARLEGDLSLADKDVTAKDSKFKMPKFKMPSYRASAPGKSIQASVDVSAPKAEADVSLPSMQGDLKTTDLSIQLPSVDLEVQAGQVDVKLPEGHVPEGAGLKGHLPKVEMPSFKMPKVDLKSPQVDIKGPKLDLKVPKAEVTVPDVEVSLPSVEVDVQAPRAKLDGARLEGDLSLAEKDVTAKDSKFKMPKFKMPSFGVSAPGRSIEASLDVSAPKVEADVSLSSMQGDLKATDLSIQPPSADLEVQAVQVDVELLEGPVPEGAGLKGHLPKVEMPSLKTPKVDLKGPQIDVKGPKLDLKGPKAEVRVPDVEVSLPSVEVDVQAPKAKLDAGRLEGDLSLADKDVTAKDSKFKMPKFKMPSFRVSAPGKSMEASVDVSAPKVEADVSLPSMQGDLKTTDLSIQPPSADLKVQAGQMDVKLPEGQVPEGAGLKEHLPKVEMPSLKMPKVDLKGPQVDIKGPKLDLKVSKAEVTAPDVEVSLPSVEVDVQAPRAKLDSAQLEGDLSLADKDVTAKDSKFKMPKFKMPSFGVSAPGKSIEASVHVSAPKVEADVSLPSMQGDLKTTDLSIQPHSADLTVQARQVDMKLLEGHVPEEAGLKGHLPKVQMPSFKMPKVDLKGPEIDIKGPKLDLKDPKVEVTAPDVEVSLPSVEVDVEAPGAKLDGARLEGDLSLADKDMTAKDSKFKMPKFKMPSFGVSAPGKSMEASVDVTAPKVEADVSLPSMQGDLKATDLSVQPPSADLEVQAGQVDVKLPEGPVPEGASLKGHLPKVQMPSFKMPKVDLKGPQIDVKGPKLDLKGPKAEVTAPDVKMSLSSMEVDVQAPRAKLDGVQLEGDLSLADKDVTAKDSKFKMPKFKMPSFGVSAPGKSMEASVDVSELKAKADVSLPSMQGDLKTTDLSIQSPSADLEVQAGQVDVKLPEGPLPKGAGLKGHLPKVQMPCLKMPKVALKGPQVDVKGPKLDLKGPKADVMTPVVEVSLPSMEVDVEAPGAKLDSVRLEGDLSLADKDMTAKDSKFKMPKFKMPSFGVSAPGKSIEASLDVSALKVEADVSLPSMQGDLKTTHLSIQPPSADLEVQAGQEDVKLPEGPVHEGAGLKGHLPKLQMPSFKVPKVDLKGPQIDVNVPKLDLKGPKVEVTSPNLDVSLPSMEVDIQAPGAKLDSTRLEGDLSLADKDVTAKDSKFKMPKFKMPSFGMLSPGKSIEVSVDVSAPKMEADMSIPSMQGDLKTTDLRIQAPSADLEVQAGQVDLKLPEGHMPEVAGLKGHLPKVEMPSFKMPKVDLKGPQVDVKGPKLDLKGPKAEVMAPDVEVSLPSVETDVQAPGSMLDGARLEGDLSLAHEDVAGKDSKFQGPKLSTSGFEWSSKKVSMSSSEIEGNVTFHEKTSTFPIVESVVHEGDLHDPSRDGNLGLAVGEVGMDSKFKKLHFKVPKVSFSSTKTPKDSLVPGAKSSIGLSTIPLSSSECSSFELQQVSACSEPSMQMPKVGFAGFPSSRLDLTGPHFESSILSPCEDVTLTKYQVTVPRAALAPELALEIPSGSQADIPLPKTECSTDLQPPEGVPTSQAESHSGPLNSMIPVSLGQVSFPKFYKPKFVFSVPQMAVPEGDLHAAVGAPVMSPLSPGERVQCPLPSTQLPSPGTCVSQGPEELVASLQTSVVAPGEAPSEDADHEGKGSPLKMPKIKLPSFRWSPKKETGPKVDPECSVEDSKLSLVLDKDEVAPQSAIHMDLPPERDGEKGRSTKPGFAMPKLALPKMKASKSGVSLPQRDVDPSLSSATAGGSFQDTEKASSDGGRGGLGATASATGSEGVNLHRPQVHIPSLGFAKPDLRSSKAKVEVSQPEADLPLPKHDLSTEGDSRGCGLGDVPVSQPCGEGIAPTPEDPLQPSCRKPDAEVLTVESPEEEAMTKYSQESWFKMPKFRMPSLRRSFRDRGGAGKLEVAQTQAPAATGGEAAAKVKEFLVSGSNVEAAMSLQLPEADAEVTASESKSSTDILRCDLDSTGLKLHLSTAGMTGDELSTSEVRIHPSKGPLPFQMPGMRLPETQVLPGEIDETPLSKPGHDLASMEDKTEKWSSQPEGPLKLKASSTDMPSQISVVNVDQLWEDSVLTVKFPKLMVPRFSFPAPSSEDDVFIPTVREVQCPEANIDTALCKESPGLWGASILKAGAGVPGEQPVDLNLPLEAPPISKVRVHIQGAQVESQEVTIHSIVTPEFVDLSVPRTFSTQIVRESEIPTSEIQTPSYGFSLLKVKIPEPHTQARVYTTMTQHSRTQEGTEEAPIQATPGVDSISGDLQPDTGEPFEMISSSVNVLGQQTLTFEVPSGHQLADSCSDEEPAEILEFPPDDSQEATTPLADEGRAPKDKPESKKSGLLWFWLPNIGFSSSVDETGVDSKNDVQRSAPIQTQPEARPEAELPKKQEKAGWFRFPKLGFSSSPTKKSKSTEDGAELEEQKLQEETITFFDARESFSPEEKEEGELIGPVGTGLDSRVMVTSAARTELILPEQDRKADDESKGSGLGPNEG

SEQ ID NO: 47743 - protein, 141 aa, Homo sapiens
MSRPEAVQEATEVTLKTEVEAGASGYSVTGGGDQGIFVKQVLKDSSAAKLFNLREGDQLLSTTVFFENIKYEDALKILQYSEPYKVQFKIRRQLPAPQDEEWASSDAQHGPQGKEKEVRPLCPGGRAPAGFTTLLAEPGRG

SEQ ID NO: 47744 - protein, 883 aa, Homo sapiens
MNLFATWEVDGSSPSCVPRLCSLTLKKLVVFKELEKELISVVIAVKMQGSKRILRSHEIVLPPSGQVETDLALTFSLQYPHFLKREGNKLQIMLQRRKRYKNRTILGYKTLAAGSISMAEVMQHPSEGGQVLSLCSSIKEAPVKAAEIWIASLSSQPIDHEDSTMQAGPKAKSTDNYSEEEYESFSSEQEASDDAVQGQDLDEDDFDVGKPKKQRRSIVRTTSMTRQQNFKQKVVALLRRFKVSDEVLDSEQDPAEHIPEAEEDLDLLYDTLDMEHPSDSGPDMEDDDSVLSTPKPKLRPYFEGLSHSSSQTEIGSIHSARSHKEPPSPADVPEKTRSLGGRQPSDSVSDTVALGVPGPREHPGQPEDSPEAEASTLDVFTERLPPSGRITKTESLVIPSTRSEGKQAGRRGRSTSLKERQAARPQNERANSLDNERCPDARSQLQVQLQIPRKTVYDQLNHILISDDQLPENIILVNTSDWQGQFLSDVLQRHTLPVVCTCSPADVQAAFSTIVSRIQRYCNCNSQPPTPVKIAVAGAQHYLSAILRLFVEQLSHKTPDWLGYMRFLVIPLGSHPVARYLGSVDYRYNNFFQDLAWRDLFNKLEAQSAVQDTPDIVSRITQYIAGANCAHQLPIAEAMLTYKQKRKKHFHFDFTLSPDEESSQKFIPFVGVVKVGIVEPSSATSGDSDDAAPSGSGTLSSTPPSASPAAKEASPTPPSSPSVSGGLSSPSQGVGAELMGLQVDYWTAAQPADRKRDAEKKDLPVTKNTLKCTFRSLQVSRLPSSGEAAATPTMSMTVVTKEKNKKVMFLPKKAKDKDVESKSQCIEGISRLICTARQQQNMLRVLIDGVECSDVKFFQLAAQWSSHVKHFPICIFGHSKATF

SEQ ID NO: 47745 - protein, 301 aa, Homo sapiens
MGSMAVMDAYLVEQNQGPRKIGVCIIVLVGDVCFLLVLRYVAVWVGAEVRTAKRGYAMILWFLYIFVLEIKLYFIFQNYKAARRGAADPVARKALTLLLSVCVPGLFLLLVALDRMEYVRTFRKREDLRGRLFWVALDLLDLLDMQASLWEPPRSGLPLWAEGLTFFYCYMLLLVLPCVALSEVSMQGEHIAPQKMMLYPVLSLATVNVVAVLARAANMALFRDSRVSAIFVGKNVVALATKACTFLEYRRQVRDFPPPALSLELQPPPPQRNSVPPPPPPLHGPPGRPHMSSPTRDPLDT

SEQ ID NO: 47746 - protein, 1692 aa, Homo sapiens
MVNGVSMDNVEHAFAVQQLRKSGKNAKITIRRKKKVQIPVSRPDPEPVSDNEEDSYDEEIHDPRSGRSGVVNRRSEKIWPRDRSASRERSLSPRSDRRSVASSQPAKPTKVTLVKSRKNEEYGLRLASHIFVKEISQDSLAARDGNIQEGDVVLKINGTVTENMSLTDAKTLIERSKGKLKMVVQRDERATLLNVPDLSDSIHSANASERDDISEIQSLASDHSGRSHDRPPRRSRSRSPDQRSEPSDHSRHSPQQPSNGSLRSRDEERISKPGAVSTPVKHADDHTPKTVEEVTVERNEKQTPSLPEPKPVYAQVGQPDVDLPVSPSDGVLPNSTHEDGILRPSMKLVKFRKGDSVGLRLAGGNDVGIFVAGVLEDSPAAKEGLEEGDQILRVNNVDFTNIIREEAVLFLLDLPKGEEVTILAQKKKDVYRRIVESDVGDSFYIRTHFEYEKESPYGLSFNKGEVFRVVDTLYNGKLGSWLAIRIGKNHKEVERGIIPNKNRAEQLASVQYTLPKTAGGDRADFWRFRGLRSSKRNLRKSREDLSAQPVQTKFPAYERVVLREAGFLRPVTIFGPIADVAREKLAREEPDIYQIAKSEPRDAGTDQRSSGIIRLHTIKQIIDQDKHALLDVTPNAVDRLNYAQWYPIVVFLNPDSKQGVKTMRMRLCPESRKSARKLYERSHKLRKNNHHLFTTTINLNSMNDGWYGALKEAIQQQQNQLVWVSEGKADGATSDDLDLHDDRLSYLSAPGSEYSMYSTDSRHTSDYEDTDTEGGAYTDQELDETLNDEVGTPPESAITRSSEPVREDSSGMHHENQTYPPYSPQAQPQPIHRIDSPGFKPASQQKAEASSPVPYLSPETNPASSTSAVNHNVNLTNVRLEEPTPAPSTSYSPQADSLRTPSTEAAHIMLRDQEPSLSSHVDPTKVYRKDPYPEEMMRQNHVLKQPAVSHPGHRPDKEPNLTYEPQLPYVEKQASRDLEQPTYRYESSSYTDQFSRNYEHRLRYEDRVPMYEEQWSYYDDKQPYPSRPPFDNQHSQDLDSRQHPEESSERGYFPRFEEPAPLSYDSRPRYEQAPRASALRHEEQPAPGYDTHGRLRPEAQPHPSAGPKPAESKQYFEQYSRSYEQVPPQGFTSRAGHFEPLHGAAAVPPLIPSSQHKPEALPSNTKPLPPPPTQTEEEEDPAMKPQSVLTRVKMFENKRSASLETKKDVNDTGSFKPPEVASKPSGAPIIGPKPTSQNQFSEHDKTLYRIPEPQKPQLKPPEDIVRSNHYDPEEDEEYYRKQLSYFDRRSFENKPPAHIAASHLSEPAKPAHSQNQSNFSSYSSKGKPPEADGVDRSFGEKRYEPIQATPPPPPLPSQYAQPSQPVTSASLHIHSKGAHGEGNSVSLDFQNSLVSKPDPPPSQNKPATFRPPNREDTAQAAFYPQKSFPDKAPVNGTEQTQKTVTPAYNRFTPKPYTSSARPFERKFESPKFNHNLLPSETAHKPDLSSKTPTSPKTLVKSHSLAQPPEFDSGVETFSIHAEKPKYQINNISTVPKAIPVSPSAVEEDEDEDGHTVVATARGIFNSNGGVLSSIETGVSIIIPQGAIPEGVEQEIYFKVCRDNSILPPLDKEKGETLLSPLVMCGPHGLKFLKPVELRLPHCASMTPDGWSFALKSSDSSSGDPKTWQNKCLPGDPNYLVGANCVSVLIDHF

SEQ ID NO: 47747 - protein, 1612 aa, Homo sapiens
MVNGVSMDNVEHAFAVQQLRKSGKNAKITIRRKKKVQIPVSRPDPEPVSDNEEDSYDEEIHDPRSGRSGVVNRRSEKIWPRDRSASRERSLSPRSDRRSVASSQPAKPTKVTLVKSRKNEEYGLRLASHIFVKEISQDSLAARDGNIQEGDVVLKINGTVTENMSLTDAKTLIERSKGKLKMVVQRDERATLLNVPDLSDSIHSANASERDDISEIQSLASDHSGRSHDRPPRRSRSRSPDQRSEPSDHSRHSPQQPSNGSLRSRDEERISKPGAVSTPVKHADDHTPKTVEEVTVERNEKQTPSLPEPKPVYAQVGQPDVDLPVSPSDGVLPNSTHEDGILRPSMKLVKFRKGDSVGLRLAGGNDVGIFVAGVLEDSPAAKEGLEEGDQILRVNNVDFTNIIREEAVLFLLDLPKGEEVTILAQKKKDVYRRIVESDVGDSFYIRTHFEYEKESPYGLSFNKGEVFRVVDTLYNGKLGSWLAIRIGKNHKEVERGIIPNKNRAEQLASVQYTLPKTAGGDRADFWRFRGLRSSKRNLRKSREDLSAQPVQTKFPAYERVVLREAGFLRPVTIFGPIADVAREKLAREEPDIYQIAKSEPRDAGTDQRSSGIIRLHTIKQIIDQDKHALLDVTPNAVDRLNYAQWYPIVVFLNPDSKQGVKTMRMRLCPESRKSARKLYERSHKLRKNNHHLFTTTINLNSMNDGWYGALKEAIQQQQNQLVWVSEGKADGATSDDLDLHDDRLSYLSAPGSEYSMYSTDSRHTSDYEDTDTEGGAYTDQELDETLNDEVGTPPESAITRSSEPVREDSSGMHHENQTYPPYSPQAQPQPIHRIDSPGFKPASQQVYRKDPYPEEMMRQNHVLKQPAVSHPGHRPDKEPNLTYEPQLPYVEKQASRDLEQPTYRYESSSYTDQFSRNYEHRLRYEDRVPMYEEQWSYYDDKQPYPSRPPFDNQHSQDLDSRQHPEESSERGYFPRFEEPAPLSYDSRPRYEQAPRASALRHEEQPAPGYDTHGRLRPEAQPHPSAGPKPAESKQYFEQYSRSYEQVPPQGFTSRAGHFEPLHGAAAVPPLIPSSQHKPEALPSNTKPLPPPPTQTEEEEDPAMKPQSVLTRVKMFENKRSASLETKKDVNDTGSFKPPEVASKPSGAPIIGPKPTSQNQFSEHDKTLYRIPEPQKPQLKPPEDIVRSNHYDPEEDEEYYRKQLSYFDRRSFENKPPAHIAASHLSEPAKPAHSQNQSNFSSYSSKGKPPEADGVDRSFGEKRYEPIQATPPPPPLPSQYAQPSQPVTSASLHIHSKGAHGEGNSVSLDFQNSLVSKPDPPPSQNKPATFRPPNREDTAQAAFYPQKSFPDKAPVNGTEQTQKTVTPAYNRFTPKPYTSSARPFERKFESPKFNHNLLPSETAHKPDLSSKTPTSPKTLVKSHSLAQPPEFDSGVETFSIHAEKPKYQINNISTVPKAIPVSPSAVEEDEDEDGHTVVATARGIFNSNGGVLSSIETGVSIIIPQGAIPEGVEQEIYFKVCRDNSILPPLDKEKGETLLSPLVMCGPHGLKFLKPVELRLPHCASMTPDGWSFALKSSDSSSGDPKTWQNKCLPGDPNYLVGANCVSVLIDHF

SEQ ID NO: 47748 - protein, 782 aa, Homo sapiens
MVPRYDLNRHLDEMCANNDFVQVDPGQVGLINSNVSMVDLTSVTLEDVTPKKSPPPKTNLTPGQSDSAKREVKQKISPYFKSNDVVCKNQDELRNRSVKVICLGSLASKLSRKYVKAKKSIDKDEEFAGSSPQSSKSTVVKSLIDNSSEIEDEDQILENSSQKENVFKCDSLKEECIPEHMVRGSKIMEAESQKATRECEKSALTPGFSDNAIMLFSPDFTLRNTLKSTSEDSLVKQECIKEVVEKREACHCEEVKMTVASEAKIQLSDSEAKSHSSADDASAWSNIQEAPLQDDSCLNNDIPHSIPLEQGSSCNGPGQTTGHPYYLRSFLVVLKTVLENEDDMLLFDEQEKGIVTKFYQLSATGQKLYVRLFQRKLSWIKMTKLEYEEIALDLTPVIEELTNAGFLQTESELQELSEVLELLSAPELKSLAKTFHLVNPNGQKQQLVDAFLKLAKQRSVCTWGKNKPGIGAVILKRAKALAGQSVRICKGPRAVFSRILLLFSLTDSMEDEDAACGGQGQLSTVLLVNLGRMEFPSYTINRKTHIFQDRDDLIRYAAATHMLSDISSAMANGNWEEAKELAQCAKRDWNRLKNHPSLRCHEDLPLFLRCFTVGWIYTRILSRFVEILQRLHMYEEAVRELESLLSQRIYCPDSRGRWWDRLALNLHQHLKRLEPTIKCITEGLADPEVRTGHRLSLYQRAVRLRESPSCKKFKHLFQQLPEMAVQDVKHVTITGRLCPQRGMCKSVFVMEAGEAADPTTVLCSVEELALAHYRRSGFDQGN

SEQ ID NO: 47749 - protein, 221 aa, Homo sapiens
MCLGRRAGSGGVLGRPLESAGWSIRRIHDVCICRSPSMSRTAYTVGALLLLLGTLLPAAEGKKKGSQGAIPPPDKAQHNDSEQTQSPQQPGSRNRGRGQGRGTAMPGEEVLESSQEALHVTERKYLKRDWCKTQPLKQTIHEEGCNSRTIINRFCYGQCNSFYIPRHIRKEEGSFQSCSFCKPKKFTTMMVTLNCPELQPPTKKKRVTRVKQCRCISIDLD

SEQ ID NO: 47750 - protein, 232 aa, Homo sapiens
MAQALGIPATECEFVGSLPVIVVGRLKVALEPQLWELGKVLRKAGLSAGYVDAGAEPGRSRMISQEEFARQLQLSDPQTVAGAFGYFQQDTKGLVDFRDVALALAALDGGRSLEELTRLAFELFAEEQAEGPNRLLYKDGFSTILHLLLGSPHPAATALHAELCQAGSSQGLSLCQFQNFSLHDPLYGKLFSTYLRPPHTSRGTSQTPNASSPGNPTALANGTVQAPKQKGD

SEQ ID NO: 47751 - protein, 683 aa, Homo sapiens
MLKIQQCVVANKLPRNRPYVCNICFKHFETPSKLARHYLIHTGQKPFECDVCHKTFRQLVHLERHQLTHSLPFKCSICQRHFKNLKTFVKHQQLHNETYQNNVKQVRRLLEAKQEKSMYGVYNTFTTEERWALHPCSKSDPMYSMKRRKNIHACTICGKMFPSQSKLDRHVLIHTGQRPFKCVLCTKSFRQSTHLKIHQLTHSEERPFQCCFCQKGFKIQSKLLKHKQIHTRNKAFRALLLKKRRTESRPLPNKLNANQGGFENGEIGESEENNPLDVHSIYIVPFQCPKCEKCFESEQILNEHSCFAARSGKIPSRFKRSYNYKTIVKKILAKLKRARSKKLDNFQSEKKVFKKSFLRNCDLISGEQSSEQTQRTFVGSLGKHGTYKTIGNRKKKTLTLPFSWQNMGKNLKGILTTENILSIDNSVNKKDLSICGSSGEEFFNNCEVLQCGFSVPRENIRTRHKICPCDKCEKVFPSISKLKRHYLIHTGQRPFGCNICGKSFRQSAHLKRHEQTHNEKSPYASLCQVEFGNFNNLSNHSGNNVNYNASQQCQAPGVQKYEVSESDQMSGVKAESQDFIPGSTGQPCLPNVLLESEQSNPFCSYSEHQEKNDVFLYRCSVCAKSFRSPSKLERHYLIHAGQKPFECSVCGKTFRQAPHWKRHQLTHFKERPQGKVVALDSVM

SEQ ID NO: 47752 - protein, 455 aa, Homo sapiens
MYGDPHAPRPIPPVHHLNHGPPLHATQHYGAHAPHPNVMPASMGSAVNDALKRDKDAIYGHPLFPLLALVFEKCELATCTPREPGVAGGDVCSSDSFNEDIAVFAKQVRAEKPLFSSNPELDNLMIQAIQVLRFHLLELEKVHELCDNFCHRYISCLKGKMPIDLVIDERDGSSKSDHEELSGSSTNLADHNPSSWRDHDDATSTHSAGTPGPSSGGHASQSGDNSSEQGDGLDNSVASPGTGDDDDPDKDKKRQKKRGIFPKVATNIMRAWLFQHLTHPYPSEEQKKQLAQDTGLTILQVNNWFINARRRIVQPMIDQSNRAGFLLDPSVSQGAAYSPEGQPMGSFVLDGQQHMGIRPAGLQSMPGDYVSQGGPMGMSMAQPSYTPPQMTPHPTQLRHGPPMHSYLPSHPHHPAMMMHGGPPTHPGMTMSAQSPTMLNSVDPNVGGQVMDIHAQ

SEQ ID NO: 47753 - protein, 379 aa, Homo sapiens
MYGDPHAPRPIPPVHHLNHGPPLHATQHYGAHAPHPNVMPASMGSAVNDALKRDKDAIYGHPLFPLLALVFEKCELATCTPREPGVAGGDVCSSDSFNEDIAVFAKQVRAEKPLFSSNPELDNLMIQAIQVLRFHLLELEKVHELCDNFCHRYISCLKGKMPIDLVIDERDGSSKSDHEELSGSSTNLADHNPSSWRDHDDATSTHSAGTPGPSSGGHASQSGDNSSEQGDGLDNSVASPGTGDDDDPDKDKKRQKKRGIFPKVATNIMRAWLFQHLTHPYPSEEQKKQLAQDTGLTILQVNNWFINARRRIVQPMIDQSNRAGFLLDPSVSQGAAYSPEGQPMGSFVLDGQQHMGIRPAGPMSGMGMNMGMDGQWHYM

SEQ ID NO: 47754 - protein, 423 aa, Homo sapiens
MTRDDSSGGWLPLGGSGLSSVTVFKVPHQEENGCADFFIRGERLRDKMVVLECMLKKDLIYNKVTPTFHHWKIDDKKFGLTFQSPADARAFDRGIRRAIEDISQGCPESKNEAEGADDLQANEEDSSSSLVKDHLFQQETVVTSEPYRSSNIRPSPFEDLNARRVYMQSQANQITFGQPGLDIQSRSMEYVQRQISKECGSLKSQNRVPLKSIRHVSFQDEDEIVRINPRDILIRRYADYRHPDMWKNDLERDDADSSIQFSKPDSKKSDYLYSCGDETKLSSPKDSVVFKTQPSSLKIKKSKRRKEDGERSRCVYCQERFNHEENVRGKCQDAPDPIKRCIYQVSCMLCAESMLYHCMSDSEGDFSDPCSCDTSDDKFCLRWLALVALSFIVPCMCCYVPLRMCHRCGEACGCCGGKHKAAG

SEQ ID NO: 47755 - protein, 413 aa, Homo sapiens
MENTKKFLSLTAVSEETVGPSHEEEDTFSSVFHTQIPPEEYEMQMQKLNKDFTCDVERNESLIKSGKKPFSNTEKIELRGKHNQDFIKRNIELAKESRNPVVMVDREKKRLVELLKDLDEKDSGLSSSEGDQSGWVVPVKGYELAVTQHQQLAEIDIKLQELSAASPTISSFSPRLENRNNQKPDRDGERNMEVTPGEKILRNTKEQRDLHNRLREIDEKLKMMKENVLESTSCLSEEQLKCLLDECILKQKSIIKLSSERKKEDIEDVTPVFPQLSRSIISKLLNESETKVQKTEVEDADMLESEECEASKGYYLTKALTGHNMSEALVTEAENMKCLQFSKDVIISDTKDYFMSKTLGIGRLKRPSFLDDPLYGISVSLSSEDQHLKLSSPENTIADEQETKDAAEECKEP

SEQ ID NO: 47756 - protein, 1528 aa, Homo sapiens
MIFELAYHVQSFLSEHNKPPPKSFHEEMLERRAQEEQQRLLEAKRKEEQEQREILHEIQRRKEEIKEEKKRKEMAKQERLEIASLSNQDHTSKKDPGGHRTAAILHGGSPDFVGNGKHRANSSGRSRRERQYSVCNSEDSPGSCEILYFNMGSPDQLMVHKGKCIGSDEQLGKLVYNALETATGGFVLLYEWVLQWQKKMGPFLTSQEKEKIDKCKKQIQGTETEFNSLVKLSHPNVVRYLAMNLKEQDDSIVVDILVEHISGVSLAAHLSHSGPIPVHQLRRYTAQLLSGLDYLHSNSVVHKVLSASNVLVDAEGTVKITDYSISKRLADICKEDVFEQTRVRFSDNALPYKTGKKGDVWRLGLLLLSLSQGQECGEYPVTIPSDLPADFQDFLKKCVCLDDKERWSPQQLLKHSFINPQPKMPLVEQSPEDSEGQDYVETVIPSNRLPSAAFFSETQRQFSRYFIEFEELQLLGKGAFGAVIKVQNKLDGCCYAVKRIPINPASRQFRRIKGEVTLLSRLHHENIVRYYNAWIERHERPAGPGTPPPDSGPLAKDDRAARGQPASDTDGLDSVEAAAPPPILSSSVEWSTSGERSASARFPATGPGSSDDEDDDEDEHGGVFSQSFLPASDSESDIIFDNEDENSKSQNQDEDCNEKNGCHESEPSVTTEAVHYLYIQMEYCEKSTLRDTIDQGLYRDTVRLWRLFREILDGLAYIHEKGMIHRDLKPVNIFLDSDDHVKIGDFGLATDHLAFSADSKQDDQTGDLIKSDPSGHLTGMVGTALYVSPEVQGSTKSAYNQKVDLFSLGIIFFEMSYHPMVTASERIFVLNQLRDPTSPKFPEDFDDGEHAKQKSVISWLLNHDPAKRPTATELLKSELLPPPQMEESELHEVLHHTLTNVDGKAYRTMMAQIFSQRISPAIDYTYDSDILKGNFSIRTAKMQQHVCETIIRIFKRHGAVQLCTPLLLPRNRQIYEHNEAALFMDHSGMLVMLPFDLRIPFARYVARNNILNLKRYCIERVFRPRKLDRFHPKELLECAFDIVTSTTNSFLPTAEIIYTIYEIIQEFPALQERNYSIYLNHTMLLKAILLHCGIPEDKLSQVYIILYDAVTEKLTRREVEAKFCNLSLSSNSLCRLYKFIEQKGDLQDLMPTINSLIKQKTGIAQLVKYGLKDLEEVVGLLKKLGIKLQVLINLGLVYKVQQHNGIIFQFVAFIKRRQRAVPEILAAGGRYDLLIPQFRGPQALGPVPTAIGVSIAIDKISAAVLNMEESVTISSCDLLVVSVGQMSMSRAINLTQKLWTAGITAEIMYDWSQSQEELQEYCRHHEITYVALVSDKEGSHVKVKSFEKERQTEKRVLETELVDHVLQKLRTKVTDERNGREASDNLAVQNLKGSFSNASGLFEIHGATVVPIVSVLAPEKLSASTRRRYETQVQTRLQTSLANLHQKSSEIEILAVDLPKETILQFLSLEWDADEQAFNTTVKQLLSRLPKQRYLKLVCDEIYNIKVEKKVSVLFLYSYRDDYYRILF

SEQ ID NO: 47757 - protein, 495 aa, Homo sapiens
MIFELAYHVQSFLSEHNKPPPKSFHEEMLERRAQEEQQRLLEAKRKEEQEQREILHEIQRRKEEIKEEKKRKEMAKQERLEIASLSNQDHTSKKDPGGHRTAAILHGGSPDFVGNGKHRANSSGRSRRERQYSVCNSEDSPGSCEILYFNMGSPDQLMVHKGKCIGSDEQLGKLVYNALETATGGFVLLYEWVLQWQKKMGPFLTSQEKEKIDKCKKQIQGTETEFNSLVKLSHPNVVRYLAMNLKEQDDSIVVDILVEHISGVSLAAHLSHSGPIPVHQLRRYTAQLLSGLDYLHSNSVVHKVLSASNVLVDAEGTVKITDYSISKRLADICKEDVFEQTRVRFSDNALPYKTGKKGDVWRLGLLLLSLSQGQECGEYPVTIPSDLPADFQDFLKKCVCLDDKERWSPQQLLKHSFINPQPKMPLVEQSPEDSEGQDYVETVIPSNRLPSAAFFSETQRQFSRYFIEFEELQLLGKGAFGAVIKVWYRVIPSPL

SEQ ID NO: 47758 - protein, 1013 aa, Homo sapiens
MSTLQGALAQESACNNTLQQQKRAFEYEIRFYTGNDPLDVWDRYISWTEQNYPQGGKESNMSTLLERAVEALQGEKRYYSDPRFLNLWLKLGRLCNEPLDMYSYLHNQGIGVSLAQFYISWAEEYEARENFRKADAIFQEGIQQKAEPLERLQSQHRQFQARVSRQTLLALEKEEEEEVFESSVPQRSTLAELKSKGKKTARAPIIRVGGALKAPSQNRGLQNPFPQQMQNNSRITVFDENADEASTAELSKPTVQPWIAPPMPRAKENELQAGPWNTGRSLEHRPRGNTASLIAVPAVLPSFTPYVEETARQPVMTPCKIEPSINHILSTRKPGKEEGDPLQRVQSHQQASEEKKEKMMYCKEKIYAGVGEFSFEEIRAEVFRKKLKEQREAELLTSAEKRAEMQKQIEEMEKKLKEIQTTQQERTGDQQEETMPTKETTKLQIASESQKIPGMTLSSSVCQVNCCARETSLAENIWQEQPHSKGPSVPFSIFDEFLLSEKKNKSPPADPPRVLAQRRPLAVLKTSESITSNEDVSPDVCDEFTGIEPLSEDAIITGFRNVTICPNPEDTCDFARAARFVSTPFHEIMSLKDLPSDPERLLPEEDLDVKTSEDQQTACGTIYSQTLSIKKLSPIIEDSREATHSSGFSGSSASVASTSSIKCLQIPEKLELTNETSENPTQSPWCSQYRRQLLKSLPELSASAELCIEDRPMPKLEIEKEIELGNEDYCIKREYLICEDYKLFWVAPRNSAELTVIKVSSQPVPWDFYINLKLKERLNEDFDHFCSCYQYQDGCIVWHQYINCFTLQDLLQHSEYITHEITVLIIYNLLTIVEMLHKAEIVHGDLSPRCLILRNRIHDPYDCNKNNQALKIVDFSYSVDLRVQLDVFTLSGFRTVQILEGQKILANCSSPYQVDLFGIADLAHLLLFKEHLQVFWDGSFWKLSQNISELKDGELWNKFFVRILNANDEATVSVLGELAAEMNGVFDTTFQSHLNKALWKVGKLTSPGALLFQ

SEQ ID NO: 47759 - protein, 436 aa, Homo sapiens
MAVTTPALLQPDGLTVTISQVPGEKRVVSRNWARGTCGPRVTNEMLEDEDAEDHGGTFCLGELVELAVTMENKAEGKRIVSEKPTRARNQGIEGSPGGRVTRSPPTQVAISSDSARKGSWEPWSRPVGEPPEAGWDYAQWKQEREQIDLARLARHRDAQGDWRRPWDLDKAKSTLQDCSQLRGEGPARAGSRRGPRSHQKLQPPPLLPDGKGRGGQASRPSVAPATGSKARGKERLTGRARRWDMKEDKEELEGQEGSQSTRETPSEEEQAQKQSGMEQGRLGSAPAASPALASPEGPKGESVASTASSVPCSPQEPDLAPLDLSLGGAGIPGPRESGCVLGLRPGAQESPVSWPEGSKQQPLGWSNHQAELEVQTCPEPQRGAGLPEPGEDRSGKSGAQQGLAPRSRPTRGGSQRSRGTAGVRRRTGRPGPAGRC

SEQ ID NO: 47760 - protein, 770 aa, Homo sapiens [sequence omitted]

SEQ ID NO: 47761 - protein, 331 aa, Homo sapiens
MFAVIVASSGLLLMIERGILAEMKPLPLHPPGREGTAWRGKAPKPGGLSLRAGDADLQVRQDVRNRTLRAVCGQPGMPRDPWDLPVGQRRTLLRHILVSDRYRFLYCYVPKVACSNWKRVMKVLAGVLDSVDVRLKMDHRSDLVFLADLRPEEIRYRLQHYFKFLFVREPLERLLSAYRNKFGEIREYQQRYGAEIVRRYRAGAGPSPAGDDVTFPEFLRYLVDEDPERMNEHWMPVYHLCQPCAVHYDFVGSYERLEADANQVLEWVRAPPHVRFPARQAWYRPASPESLHYHLCSAPRALLQDVLPKYILDFSLFAYPLPNVTKEACQQ

SEQ ID NO: 47762 - protein, 35 aa, Homo sapiens
MLRTLAQAKKECWDRFLQEKLASEFFVDGLDSDER

SEQ ID NO: 47763 - protein, 86 aa, Homo sapiens
MLRTLAQAKKECWDRFLQEKLASEFFVDGLDSDESTLEHFKRWLQPDKVAVSTEEVQYLIPPESQVEKPVAEDEPAAGDKPAAAEQ

SEQ ID NO: 47764 - protein, 328 aa, Homo sapiens [sequence omitted]

SEQ ID NO: 47765 - protein, 45 aa, Homo sapiens
MDIQNVPLSEKIAELKEKIVLTHNRLKSLMKILSEVTPDQSKPEN

SEQ ID NO: 47766 - protein, 2962 aa, Homo sapiens
MFPYCRYWITGLDSNLKYILVMDISPVDNHRYKWNGRWWEPSGKAEPHVLGRVFIHPESPSTGHYWMHQPVSFYKLKLTNNTLDQEGHIILHSMHRYLPRLHLVPAEKAVEVIQLNGPGVHTFTFPQTEFFAVTAYQNIQITQLKIDYNPFAKGFRDDGLNNKPQRDGKQKNSSDQEGNNISSSSGHRVRLTEGQGSEIQPGDLDPLSRGHETSGKGLEKTSLNIKRDFLGFMDTDSALSEVPQLKQEISECLIASSFEDDSRVASPLDQNGSFNVVIKEEPLDDYDYELGECPEGVTVKQEETDEETDVYSNSDDDPILEKQLKRHNKVDNPEADHLSSKWLPSSPSGVAKAKMFKLDTGKMPVVYLEPCAVTRSTVKISELPDNMLSTSRKDKSSMLAELEYLPTYIENSNETAFCLGKESENGLRKHSPDLRVVQKYPLLKEPQWKYPDISDSISTERILDDSKDSVGDSLSGKEDLGRKRTTMLKIATAAKVVNANQNASPNVPGKRGRPRKLKLCKAGRPPKNTGKSLISTKNTPVSPGSTFPDVKPDLEDVDGVLFVSFESKEALDIHAVDGTTEESSSLQASTTNDSGYRARISQLEKELIEDLKTLRHKQVIHPGLQEVGLKLNSVDPTMSIDLKYLGVQLPLAPATSFPFWNLTGTNPASPDAGFPFVSRTGKTNDFTKIKGWRGKFHSASASRNEGGNSESSLKNRSAFCSDKLDEYLENEGKLMETSMGFSSNAPTSPVVYQLPTKSTSYVRTLDSVLKKQSTISPSTSYSLKPHSVPPVSRKAKSQNRQATFSGRTKSSYKSILPYPVSPKQKYSHVILGDKVTKNSSGIISENQANNFVVPTLDENIFPKQISLRQAQQQQQQQQGSRPPGLSKSQVKLMDLEDCALWEGKPRTYITEERADVSLTTLLTAQASLKTKPIHTIIRKRAPPCNNDFCRLGCVCSSLALEKRQPAHCRRPDCMFGCTCLKRKVVLVKGGSKTKHFQRKAAHRDPVFYDTLGEEAREEEEGIREEEEQLKEKKKRKKLEYTICETEPEQPVRHYPLWVKVEGEVDPEPVYIPTPSVIEPMKPLLLPQPEVLSPTVKGKLLTGIKSPRSYTPKPNPVIREEDKDPVYLYFESMMTCARVRVYERKKEDQRQPSSSSSPSPSFQQQTSCHSSPENHNNAKEPDSEQQPLKQLTCDLEDDSDKLQEKSWKSSCNEGESSSTSYMHQRSPGGPTKLIEIISDCNWEEDRNKILSILSQHINSNMPQSLKVGSFIIELASQRKSRGEKNPPVYSSRVKISMPSCQDQDDMAEKSGSETPDGPLSPGKMEDISPVQTDALDSVRERLHGGKGLPFYAGLSPAGKLVAYKRKPSSSTSGLIQVASNAKVAASRKPRTLLPSTSNSKMASSSGTATNRPGKNLKAFVPAKRPIAARPSPGGVFTQFVMSKVGALQQKIPGVSTPQTLAGTQKFSIRPSPVMVVTPVVSSEPVQVCSPVTAAVTTTTPQVFLENTTAVTPMTAISDVETKETTYSSGATTTGVVEVSETNTSTSVTSTQSTATVNLTKTTGITTPVASVAFPKSLVASPSTITLPVASTASTSLVVVTAAASSSMVTTPTSSLGSVPIILSGINGSPPVSQRPENAAQIPVATPQVSPNTVKRAGPRLLLIPVQQGSPTLRPVSNTQLQGHRMVLQPVRSPSGMNLFRHPNGQIVQLLPLHQLRGSNTQPNLQPVMFRNPGSVMGIRLPAPSKPSETPPSSTSSSAFSVMNPVIQAVGSSSAVNVITQAPSLLSSGASFVSQAGTLTLRISPPEPQSFASKTGSETKITYSSGGQPVGTASLIPLQSGSFALLQLPGQKPVPSSILQHVASLQMKRESQNPDQKDETNSIKREQETKKVLQSEGEAVDPEANVIKQNSGAATSEETLNDSLEDRGDHLDEECLPEEGCATVKPSEHSCITGSHTDQDYKDVNEEYGARNRKSSKEKVAVLEVRTISEKASNKTVQNLSKVQHQKLGDVKVEQQKGFDNPEENSSEFPVTFKEESKFELSGSKVMEQQSNLQPEAKEKECGDSLEKDRERWRKHLKGPLTRKCVGASQECKKEADEQLIKETKTCQENSDVFQQEQGISDLLGKSGITEDARVLKTECDSWSRISNPSAFSIVPRRAAKSSRGNGHFQGHLLLPGEQIQPKQEKKGGRSSADFTVLDLEEDDEDDNEKTDDSIDEIVDVVSDYQSEEVDDVEKNNCVEYIEDDEEHVDIETVEELSEEINVAHLKTTAAHTQSFKQPSCTHISADEKAAERSRKAPPIPLKLKPDYWSDKLQKEAEAFAYYRRTHTANERRRRGEMRDLFEKLKITLGLLHSSKVSKSLILTRAFSEIQGLTDQADKLIGQKNLLTRKRNILIRKVSSLSGKTEEVVLKKLEYIYAKQQALEAQKRKKKMGSDEFDISPRISKQQEGSSASSVDLGQMFINNRRGKPLILSRKKDQATENTSPLNTPHTSANLVMTPQGQLLTLKGPLFSGPVVAVSPDLLESDLKPQVAGSAVALPENDDLFMMPRIVNVTSLATEGGLVDMGGSKYPHEVPDSKPSDHLKDTVRNEDNSLEDKGRISSRGNRDGRVTLGPTQVFLANKDSGYPQIVDVSNMQKAQEFLPKKISGDMRGIQYKWKESESRGERVKSKDSSFHKLKMKDLKDSSIEMELRKVTSAIEEAALDSSELLTNMEDEDDTDETLTSLLNEIAFLNQQLNDDSVGLAELPSSMDTEFPGDARRAFISKVPPGSRATFQVEHLGTGLKELPDVQGESDSISPLLLHLEDDDFSENEKQLAEPASEPDVLKIVIDSEIKDSLLSNKKAIDGGKNTSGLPAEPESVSSPPTLHMKTGLENSNSTDTLWRPMPKLAPLGLKVANPSSDADGQSLKVMPCLAPIAAKVGSVGHKMNLTGNDQEGRESKVMPTLAPVVAKLGNSGASPSSAGK

SEQ ID NO: 47767 - protein, 537 aa, Homo sapiens
MGRQAGGRERAGGADAVQTVTGGLRSLYLRKVLPLEEAYRFHEFHSPALEDADFENKPMILLVGQYSTGKTTFIRYLLEQDFPGMRIGPEPTTDSFIAVMYGETEGSTPGNALVVDPKKPFRKLSRFGNAFLNRFMCSQLPNQVLKSISVIDSPGILSGEKQRISRGYDFCQVLQWFAERVDRIILLFDAHKLDISDEFSEAIKAFRGQDDKIRVVLNKADQVDTQQLMRVYGALMWSLGKVINTPEVLRVYIGSFWAQPLQNTDNRRLFEAEAQDLFRDIQSLPQKAAVRKLNDLIKRARLAKVHAYIISYLKKEMPSVFGKENKKRELISRLPEIYIQLQREYQISAGDFPEVKAMQEQLENYDFTKFHSLKPKLIEAVDNMLSNKISPLMNLISQEETSTPTQLVQGGAFDGTTEGPFNQGYGEGAKEGADEEEWVVAKDKPVYDELFYTLSPINGKISGVNAKKEMVTSKLPNSVLGKIWKLADCDCDGMLDEEEFALAKHLIKIKLDGYELPSSLPPHLVPPSHRKSLPKAD

SEQ ID NO: 47768 - protein, 751 aa, Homo sapiens
MCVAVKKKLQLYFWKDREFHELQGDFSVPDVPKSMAWCENSICVGFKRDYYLIRVDGKGSIKELFPTGKQLEPLVAPLADGKVAVGQDDLTVVLNEEGICTQKCALNWTDIPVAMEHQPPYIIAVLPRYVEIRTFEPRLLVQSIELQRPRFITSGGSNIIYVASNHFVWRLIPVPMATQIQQLLQDKQFELALQLAEMKDDSDSEKQQQIHHIKNLYAFNLFCQKRFDESMQVFAKLGTDPTHVMGLYPDLLPTDYRKQLQYPNPLPVLSGAELEKAHLALIDYLTQKRSQLVKKLNDSDHQSSTSPLMEGTPTIKSKKKLLQIIDTTLLKCYLHTNVALVAPLLRLENNHCHIEESEHVLKKAHKYSELIILYEKKGLHEKALQVLVDQSKKANSPLKGHERTVQYLQHLGTENLHLIFSYSVWVLRDFPEDGLKIFTEDLPEVESLPRDRVLGFLIENFKGLAIPYLEHIIHVWEETGSRFHNCLIQLYCEKVQGLMKEYLLSFPAGKTPVPAGEEEGELGEYRQKLLMFLEISSYYDPGRLICDFPFDGLLEERALLLGRMGKHEQALFIYVHILKDTRMAEEYCHKHYDRNKDGNKDVYLSLLRMYLSPPSIHCLGPIKLELLEPKANLQAALQVLELHHSKLDTTKALNLLPANTQINDIRIFLEKVLEENAQKKRFNQVLKNLLHAEFLRVQEERILHQQVKCIITEEKVCMVCKKKIGNSAFARYPNGVVVHYFCSKEVNPADT

SEQ ID NO: 47769 - protein, 704 aa, Homo sapiens [sequence omitted]

SEQ ID NO: 47770 - protein, 168 aa, Homo sapiens [sequence omitted]

SEQ ID NO: 47771 - protein, 310 aa, Homo sapiens
MFWRRLNEAAVTVSREATTLTIVFSQLPLPSPQETQKFCEQVHAAIKAFIAVYYLLPKDQGITLRKLVRGATLDIVDGMAQLMEVLSVTPTQSPENNDLISYNSVWVACQQMPQIPRDNKAAALLMLTKNVDFVKDAHEEMEQAVEECDPYSGLLNDTEENNSDNHNHEDDVLGFPSNQDLYWSEDDQELIIPCLALVRASKACLKKIRMLVAENGKKDQVAQLDDIVDISDEISPSVDDLALSIYPPMCHLTVRINSAKLVSVLKKALEITKASHVTPQPEDSWIPLLINAIDHCMNRIKELTQSELEL

SEQ ID NO: 47772 - protein, 466 aa, Homo sapiens
MRPQDAFGQFMLQHFRQLNSPLHGLERFPDVEAQRRRFLQAGWTACGAVDMNEFYHCFLPAEERRRVENIEPFDEFEEWHLKCAHYFILAASRGDTLSHTLVFPSSEAFPRVNPASPSGVFPASVVSSEGQVPNLKRYGHASVFLSPDVILSAGGFGEQEGRHCRVSQFHLLSRDCDSEWKGSQIGSCGTGVQWDGRLYHTMTRLSESRVLVLGGRLSPVSPALGVLQLHFFKSEDNNTEDLKVTITKAGRKDDSTLCCWRHSTTEVSCQNQEYLFVYGGRSVVEPVLSDWHFLHVGTMAWVRIPVEGEVPEARHSHSACTWQGGALIAGGLGASEEPLNSVLFLRPISCGFLWESVDIQPPITPRYSHTAHVLNGKLLLVGGIWIHSSSFPGVTVINLTTGLSSEYQIDTTYVPWPLMLHNHTSILLPEEQQLLLLGGGGNCFSFGTYFNPHTVTLDLSSLSAGQ

SEQ ID NO: 47773 - protein, 1245 aa, Homo sapiens
MNKALQEELTELKDEISLYESAAKLGIHPSDSEGELNIELTESYVDLGIKKVNWKKSKVTSIVQEEDPNEELSKDEFILKLKAEVQRLLGSNSMKRHLVSQLQNDLKDCHKKIEDLHQVKKDEKSIEVETKTDTSEKPKNQLWPESSTSDVVRDDILLLKNEIQVLQQQNQELKETEGKLRNTNQDLCNQMRQMVQDFDHDKQEAVDRCERTYQQHHEAMKTQIRESLLAKHALEKQQLFEAYERTHLQLRSELDKLNKEVTAVQECYLEVCREKDNLELTLRKTTEKEQQTQEKIKEKLIQQLEKEWQSKLDQTIKAMKKKTLDCGSQTDQVTTSDVISKKEMAIMIEEQKCTIQQNLEQEKDIAIKGAMKKLEIELELKHCENITKQVEIAVQNAHQRWLGELPELAEYQALVKAEQKKWEEQHEVSVNKRISFAVSEAKEKWKSELENMRKNILPGKELEEKIHSLQKELELKNEEVPVVIRAELAKARSEWNKEKQEEIHRIQEQNEQDYRQFLDDHRNKINEVLAAAKEDFMKQKTELLLQKETELQTCLDQSRREWTMQEAKRIQLEIYQYEEDILTVLGVLLSDTQKEHISDSEDKQLLEIMSTCSSKWMSVQYFEKLKGCIQKAFQDTLPLLVENADPEWKKRNMAELSKDSASQGTGQGDPGPAAGHHAQPLALQATEAEADKKKVLEIKDLCCGHCFQELEKAKQECQDLKGKLEKCCRHLQHLERKHKAVVEKIGEENNKVVEELIEENNDMKNKLEELQTLCKTPPRSLSAGAIENACLPCSGGALEELRGQYIKAVKKIKCDMLRYIQESKERAAEMVKAEVLRERQETARKMRKYYLICLQQILQDDGKEGAEKKIMNAASKLATMAKLLETPISSKSQSKTTQSALPLTSEMLIAVKKSKRNDVNQKIPCCIESKSNSVNTITRTLCEQAPKRRAACNLQRLLENSEHQSIKHVGSKETHLEFQFGDGSCKHLNSLPRNVSPEFVPCEGEGGFGLHKKKDLLSDNGSESLPHSAAYPFLGTLGNKPSPRCTPGPSESGCMHITFRDSNERLGLKVYKCNPLMESENAASEKSQGLDVQEPPVKDGGDLSDCLGWPSSSATLSFDSREASFVHGRPQGTLEIPSESVKSKQFSPSGYLSDTEESNMICQTMKCQRYQTPYLSEETTYLEPGKISVNCGHPSRHKADRLKSDFKKLSSTLPSSVCQQPSRKLIVPLSSQQDSGFDSPFVNLD

SEQ ID NO: 47774 - protein, 1069 aa, Homo sapiens
MALPNDNGSVSGVEPTPIPSYLITCYPFVQENQSNRQFPLYNNDIRWQQPNPNPTGPYFAYPIISAQPPVSTEYTYYQLMPAPCAQVMGFYHPFPTPYSNTFQAANTVNAITTECTERPSQLGQVFPLSSHRSRNSNRGSVVPKQQLLQQHIKSKRPLVKNVATQKETNAAGPDSRSKIVLLVDASQQTDFPSDIANKSLSETTATMLWKSKGRRRRASHPTAESSSEQGASEADIDSDSGYCSPKHSNNQPAAGALRNPDSGTMNHVESSMCAGGVNWSNVTCQATQKKPWMEKNQTFSRGGRQTEQRNNSQVGFRCRGHSTSSERRQNLQKRPDNKHLSSSQSHRSDPNSESLYFEDEDGFQELNENGNAKDENIQQKLSSKVLDDLPENSPINIVQTPIPITTSVPKRAKSQKKKALAAALATAQEYSEISMEQKKLQEALSKAAGKKNKTPVQLDLGDMLAALEKQQQAMKARQITNTRPLSYTVVTAASFHTKDSTNRKPLTKSQPCLTSFNSVDIASSKAKKGKEKEIAKLKRPTALKKVILKEREEKKGRLTVDHNLLGSEEPTEMHLDFIDDLPQEIVSQEDTGLSMPSDTSLSPASQNSPYCMTPVSQGSPASSGIGSPMASSTITKIHSKRFREYCNQVLCKEIDECVTLLLQELVSFQERIYQKDPVRAKARRRLVMGLREVTKHMKLNKIKCVIISPNCEKIQSKGGLDEALYNVIAMAREQEIPFVFALGRKALGRCVNKLVPVSVVGIFNYFGAESLFNKLVELTEEARKAYKDMVAAMEQEQAEEALKNVKKVPHHMGHSRNPSAASAISFCSVISEPISEVNEKEYETNWRNMVETSDGLEASENEKEVSCKHSTSEKPSKLPFDTPPIGKQPSLVATGSTTSATSAGKSTASDKEEVKPDDLEWASQQSTETGSLDGSCRDLLNSSITSTTSTLVPGMLEEEEDEDEEEEEDYTHEPISVEVQLNSRIESWVSETQRTMETLQLGKTLNGSEEDNVEQSGEEEAEAPEVLEPGMDSEAWTADQQASPGQQKSSNCSSLNKEHSDSNYTTQTT

SEQ ID NO: 47775 - protein, 447 aa, Homo sapiens
MEDDFMCDDEEDYDLEYSEDSNSEPNVDLENQYYNSKALKEDDPKAALSSFQKVLELEGEKGEWGFKALKQMIKINFKLTNFPEMMNRYKQLLTYIRSAVTRNYSEKSINSILDYISTSKQNSDFLCQMDLLQEFYETTLEALKDAKNDRLWFKTNTKLGKLYLEREEYGKLQKILRQLHQSCQTDDGEDDLKKGTQLLEIYALEIQMYTAQKNNKKLKALYEQSLHIKSAIPHPLIMGVIRECGGKMHLREGEFEKAHTDFFEAFKNYDESGSPRRTTCLKYLVLANMLMKSGINPFDSQEAKPYKNDPEILAMTNLVSAYQNNDITEFEKILKTNHSNIMDDPFIREHIEELLRNIRTQVLIKLIKPYTRIHIPFISKELNIDVADVESLLVQCILDNTIHGRIDQVNQLLELDHQKRGGARYTALDKWTNQLNSLNQAVVSKLA

SEQ ID NO: 47776 - protein, 440 aa, Homo sapiens
MEDDFMCDDEEDYDLEYSEDSNSEPNVDLENQYYNSKALKEDDPKAALSSFQKVLELEGEKGEWGFKALKQMIKINFKLTNFPEMMNRYKQLLTYIRSAVTRNYSEKSINSILDYISTSKQMDLLQEFYETTLEALKDAKNDRLWFKTNTKLGKLYLEREEYGKLQKILRQLHQSCQTDDGEDDLKKGTQLLEIYALEIQMYTAQKNNKKLKALYEQSLHIKSAIPHPLIMGVIRECGGKMHLREGEFEKAHTDFFEAFKNYDESGSPRRTTCLKYLVLANMLMKSGINPFDSQEAKPYKNDPEILAMTNLVSAYQNNDITEFEKILKTNHSNIMDDPFIREHIEELLRNIRTQVLIKLIKPYTRIHIPFISKELNIDVADVESLLVQCILDNTIHGRIDQVNQLLELDHQKRGGARYTALDKWTNQLNSLNQAVVSKLA

SEQ ID NO: 47777 - protein, 160 aa, Homo sapiens [sequence omitted]

SEQ ID NO: 47778 - protein, 1723 aa, Homo sapiens
MQKFELHPRIKQLLGKGLIKAAVTTGAWILTGGVNTGVAKHVGDALKEHASRSSRKICTIGIAPWGVIENRNDLVGRDVVAPYQTLLNPLSKLNVLNNLHSHFILVDDGTVGKYGAEVRLRRELEKTINQQRIHARIGQGVPVVALIFEGGPNVILTVLEYLQESPPVPVVVCEGTGRAADLLAYIHKQTEEGGNLPDAAEPDIISTIKKTFNFGQNEALHLFQTLMECMKRKELITVFHIGSDEHQDIDVAILTALLKGTNASAFDQLILTLAWDRVDIAKNHVFVYGQQWLVGSLEQAMLDALVMDRVAFVKLLIENGVSMHKFLTIPRLEELYNTKQGPTNPMLFHLVRDVKQGNLPPGYKITLIDIGLVIEYLMGGTYRCTYTRKRFRLIYNSLGGNNRRSGRNTSSSTPQLRKSHESFGNRADKKEKMRHNHFIKTAQPYRPKIDTVMEEGKKKRTKDEIVDIDDPETKRFPYPLNELLIWACLMKRQVMARFLWQHGEESMAKALVACKIYRSMAYEAKQSDLVDDTSEELKQYSNDFGQLAVELLEQSFRQDETMAMKLLTYELKNWSNSTCLKLAVSSRLRPFVAHTCTQMLLSDMWMGRLNMRKNSWYKVILSILVPPAILLLEYKTKAEMSHIPQSQDAHQMTMDDSENNFQNITEEIPMEVFKEVRILDSNEGKNEMEIQMKSKKLPITRKFYAFYHAPIVKFWFNTLAYLGFLMLYTFVVLVQMEQLPSVQEWIVIAYIFTYAIEKVREIFMSEAGKVNQKIKVWFSDYFNISDTIAIISFFIGFGLRFGAKWNFANAYDNHVFVAGRLIYCLNIIFWYVRLLDFLAVNQQAGPYVMMIGKMVANMFYIVVIMALVLLSFGVPRKAILYPHEAPSWTLAKDIVFHPYWMIFGEVYAYEIDVCANDSVIPQICGPGTWLTPFLQAVYLFVQYIIMVNLLIAFFNNVYLQVKAISNIVWKYQRYHFIMAYHEKPVLPPPLIILSHIVSLFCCICKRRKKDKTSDGPKLFLTEEDQKKLHDFEEQCVEMYFNEKDDKFHSGSEERIRVTFERVEQMCIQIKEVGDRVNYIKRSLQSLDSQIGHLQDLSALTVDTLKTLTAQKASEASKVHNEITRELSISKHLAQNLIDDGPVRPSVWKKHGVVNTLSSSLPQGDLESNNPFHCNILMKDDKDPQCNIFGQDLPAVPQRKEFNFPEAGSSSGALFPSAVSPPELRQRLHGVELLKIFNKNQKLGSSSTSIPHLSSPPTKFFVSTPSQPSCKSHLETGTKDQETVCSKATEGDNTEFGAFVGHRDSMDLQRFKETSNKIKILSNNNTSENTLKRVSSLAGFTDCHRTSIPVHSKQAEKISRRPSTEDTHEVDSKAALIPDWLQDRPSNREMPSEEGTLNGLTSPFKPAMDTNYYYSAVERNNLMRLSQSIPFTPVPPRGEPVTVYRLEESSPNILNNSMSSWSQLGLCAKIEFLSKEEMGGGLRRAVKVQCTWSEHDILKSGHLYIIKSFLPEVVNTWSSIYKEDTVLHLCLREIQQQRAAQKLTFAFNQMKPKSIPYSPRFLEVFLLYCHSAGQWFAVEECMTGEFRKYNNNNGDEIIPTNTLEEIMLAFSHWTYEYTRGELLVLDLQGVGENLTDPSVIKAEEKRSCDMVFGPANLGEDAIKNFRAKHHCNSCCRKLKLPDLKRNDYTPDKIIFPQDEPSDLNLQPGNSTKESESTNSVRLML

SEQ ID NO: 47779 - protein, 53 aa, Homo sapiens
MCIYYTKFQGPSQMPSRMSNLSATRQVFLWSLGQATCLFYCKSCHEILRCEIG

SEQ ID NO: 47780 - protein, 701 aa, Homo sapiens
MDLKPLGCGGNGLVFSAVDNDCDKRVAIKKIVLTDPQSVKHALREIKIIRRLDHDNIVKVFEILGPSGSQLTDDVGSLTELNSVYIVQEYMETDLANVLEQGPLLEEHARLFMYQLLRGLKYIHSANVLHRDLKPANLFINTEDLVLKIGDFGLARIMDPHYSHKGHLSEGLVTKWYRSPRLLLSPNNYTKAIDMWAAGCIFAEMLTGKTLFAGAHELEQMQLILESIPVVHEEDRQELLSVIPVYIRNDMTEPHKPLTQLLPGISREALDFLEQILTFSPMDRLTAEEALSHPYMSIYSFPMDEPISSHPFHIEDEVDDILLMDETHSHIYNWERYHDCQFSEHDWPVHNNFDIDEVQLDPRALSDVTDEEEVQVDPRKYLDGDREKYLEDPAFDTNYSTEPCWQYSDHHENKYCDLECSHTCNYKTRSSSYLDNLVWRESEVNHYYEPKLIIDLSNWKEQSKEKSDKKGKSKCERNGLVKAQIALEEASQQLAGKEREKNQGFDFDSFIAGTIQLSSQHEPTDVVDKLNDLNSSVSQLELKSLISKSVSQEKQEKGMANLAQLEALYQSSWDSQFVSGGEDCFFINQFCEVRKDEQVEKENTYTSYLDKFFSRKEDTEMLETEPVEDGKLGERGHEEGFLNNSGEFLFNKQLESIGIPQFHSPVGSPLKSIQATLTPSAMKSSPQIPHQTYSSILKHLN

SEQ ID NO: 47781 - protein, 1694 aa, Homo sapiens
MDPHIFAVAEEAYKQMARDERNQSIIVSGESGAGKTVSAKYAMRYFATVSGSASEANVEEKVLASNPIMESIGNAKTTRNDNSSRFGKYIEIGFDKRYRIIGANMRTYLLEKSRVVFQAEEERNYHIFYQLCASAKLPEFKMLRLGNADNFNYTKQGGSPVIEGVDDAKEMAHTRQACTLLGISESHQMGIFRILAGILHLGNVGFTSRDADSCTIPPKHEPLCIFCELMGVDYEEMCHWLCHRKLATATETYIKPISKLQATNARDALAKHIYAKLFNWIVDNVNQALHSAVKQHSFIGVLDIYGFETFEINSFEQFCINYANEKLQQQFNMHVFKLEQEEYMKEQIPWTLIDFYDNQPCINLIESKLGILDLLDEECKMPKGTDDTWAQKLYNTHLNKCALFEKPRLSNKAFIIQHFADKVEYQCEGFLEKNKDTVFEEQIKVLKSSKFKMLPELFQDDEKAISPTSATSSGRTPLTRTPAKPTKGRPGQMAKEHKKTVGHQFRNSLHLLMETLNATTPHYVRCIKPNDFKFPFTFDEKRAVQQLRACGVLETIRISAAGFPSRWTYQEFFSRYRVLMKQKDVLSDRKQTCKNVLEKLILDKDKYQFGKTKIFFRAGQVAYLEKLRADKLRAACIRIQKTIRGWLLRKKYLRMRKAAITMQRYVRGYQARCYAKFLRRTKAATIIQKYWRMYVVRRRYKIRRAATIVLQSYLRGFLARNRYRKILREHKAVIIQKRVRGWLARTHYKRSMHAIIYLQCCFRRMMAKRELKKLKIEARSVERYKKLHIGMENKIMQLQRKVDEQNKDYKCLVEKLTNLEGIYNSETEKLRSDLERLQLSEEEAKVATGRVLSLQEEIAKLRKDLEQTRSEKKCIEEHADRYKQETEQLVSNLKEENTLLKQEKEALNHRIVQQAKEMTETMEKKLVEETKQLELDLNDERLRYQNLLNEFSRLEERYDDLKEEMTLMVHVPKPGHKRTDSTHSSNESEYIFSSEIAEMEDIPSRTEEPSEKKVPLDMSLFLKLQKRVTELEQEKQVMQDELDRKEEQVLRSKAKEEERPQIRGAELEYESLKRQELESENKKLKNELNELRKALSEKSAPEVTAPGAPAYRVLMEQLTSVSEELDVRKEEVLILRSQLVSQKEAIQPKDDKNTMTDSTILLEDVQKMKDKGEIAQAYIGLKETNRLLESQLQSQKRSHENEAEALRGEIQSLKEENNRQQQLLAQNLQLPPEARIEASLQHEITRLTNENLDLMEQLEKQDKTVRKLKKQLKVFAKKIGELEVGQMENISPGQIIDEPIRPVNIPRKEKDFQGMLEYKKEDEQKLVKNLILELKPRGVAVNLIPGLPAYILFMCVRHADYLNDDQKVRSLLTSTINSIKKVLKKRGDDFETVSFWLSNTCRFLHCLKQYSGEEGFMKHNTSRQNEHCLTNFDLAEYRQVLSDLAIQIYQQLVRVLENILQPMIVSGMLEHETIQGVSGVKPTGLRKRTSSIADEGTYTLDSILRQLNSFHSVMCQHGMDPELIKQVVKQMFYIIGAITLNNLLLRKDMCSWSKGMQIRYNVSQLEEWLRDKNLMNSGAKETLEPLIQAAQLLQVKKKTDDDAEAICSMCNALTTAQIVKVLNLYTPVNEFEERVSVSFIRTIQMRLRDRKDSPQLLMDAKHIFPVTFPFNPSSLALETIQIPASLGLGFISRV

SEQ ID NO: 47782 - protein, 1721 aa, Homo sapiens
MDPHIFAVAEEAYKQMARDERNQSIIVSGESGAGKTVSAKYAMRYFATVSGSASEANVEEKVLASNPIMESIGNAKTTRNDNSSRFGKYIEIGFDKRYRIIGANMRTYLLEKSRVVFQAEEERNYHIFYQLCASAKLPEFKMLRLGNADNFNYTKQGGSPVIEGVDDAKEMAHTRQACTLLGISESHQMGIFRILAGILHLGNVGFTSRDADSCTIPPKHEPLCIFCELMGVDYEEMCHWLCHRKLATATETYIKPISKLQATNARDALAKHIYAKLFNWIVDNVNQALHSAVKQHSFIGVLDIYGFETFEINSFEQFCINYANEKLQQQFNMHVFKLEQEEYMKEQIPWTLIDFYDNQPCINLIESKLGILDLLDEECKMPKGTDDTWAQKLYNTHLNKCALFEKPRLSNKAFIIQHFADKVEYQCEGFLEKNKDTVFEEQIKVLKSSKFKMLPELFQDDEKAISPTSATSSGRTPLTRTPAKPTKGRPGQMAKEHKKTVGHQFRNSLHLLMETLNATTPHYVRCIKPNDFKFPFTFDEKRAVQQLRACGVLETIRISAAGFPSRWTYQEFFSRYRVLMKQKDVLSDRKQTCKNVLEKLILDKDKYQFGKTKIFFRAGQVAYLEKLRADKLRAACIRIQKTIRGWLLRKKYLRMRKAAITMQRYVRGYQARCYAKFLRRTKAATIIQKYWRMYVVRRRYKIRRAATIVLQSYLRGFLARNRYRKILREHKAVIIQKRVRGWLARTHYKRSMHAIIYLQCCFRRMMAKRELKKLKIEARSVERYKKLHIGMENKIMQLQRKVDEQNKDYKCLVEKLTNLEGIYNSETEKLRSDLERLQLSEEEAKVATGRVLSLQEEIAKLRKDLEQTRSEKKCIEEHADRYKQETEQLVSNLKEENTLLKQEKEALNHRIVQQAKEMTETMEKKLVEETKQLELDLNDERLRYQNLLNEFSRLEERYDDLKEEMTLMVHVPKPGHKRTDSTHSSNESEYIFSSEIAEMEDIPSRTEEPSEKKVPLDMSLFLKLQKRVTELEQEKQVMQDELDRKEEQVLRSKAKEEERPQIRGAELEYESLKRQELESENKKLKNELNELRKALSEKSAPEVTAPGAPAYRVLMEQLTSVSEELDVRKEEVLILRSQLVSQKEAIQPKPSQNTMTDSTILLEDVQKMKDKGEIAQAYIGLKETNRSSALDYHELNEDGELWLVYEGLKQANRLLESQLQSQKRSHENEAEALRGEIQSLKEENNRQQQLLAQNLQLPPEARIEASLQHEITRLTNENLDLMEQLEKQDKTVRKLKKQLKVFAKKIGELEVGQMENISPGQIIDEPIRPVNIPRKEKDFQGMLEYKKEDEQKLVKNLILELKPRGVAVNLIPGLPAYILFMCVRHADYLNDDQKVRSLLTSTINSIKKVLKKRGDDFETVSFWLSNTCRFLHCLKQYSGEEGFMKHNTSRQNEHCLTNFDLAEYRQVLSDLAIQIYQQLVRVLENILQPMIVSGMLEHETIQGVSGVKPTGLRKRTSSIADEGTYTLDSILRQLNSFHSVMCQHGMDPELIKQVVKQMFYIIGAITLNNLLLRKDMCSWSKGMQIRYNVSQLEEWLRDKNLMNSGAKETLEPLIQAAQLLQVKKKTDDDAEAICSMCNALTTAQIVKVLNLYTPVNEFEERVSVSFIRTIQMRLRDRKDSPQLLMDAKHIFPVTFPFNPSSLALETIQIPASLGLGFISRV

SEQ ID NO: 47783 - protein, 732 aa, Homo sapiens [sequence omitted]

SEQ ID NO: 47784 - protein, 3489 aa, Homo sapiens
MSYQRSREQILDQLKNEILTSGNIPPNYQYIFQPISASAKLYMNPYAESELKTPKLDCNIEIQNIAIELTKPQYLSMIDLLESVDYMVRNAPYRKYKPYLPLHTNGRRWWKYAIDSVLEVHIRRYTQMWSWSNIKKHRQLLKSYKIAYKNKLTQSKVSEEIQKEIQDLEKTLDVFNIILARQQAQVEVIRSGQKLRKKSADTGEKRGGWFSGLWGKKESKKKDEESLIPETIDDLMTPEEKDKLFTAIGYSESTHNLTLPKQYVAHIMTLKLVSTSVTIRENKNIPEILKIQIIGLGTQVSQRPGAQALKVEAKLEHWYITGLRQQDIVPSLVASIGDTTSSLLKIKFETNPEDSPADQTLIVQSQPVEVIYDAKTVNAVVEFFQSNKGLDLEQITSATLMKLEEIKERTATGLTHIIETRKVLDLRINLKPSYLVVPQTGFHHEKSDLLILDFGTFQLNSKDQGLQKTTNSSLEEIMDKAYDKFDVEIKNVQLLFARAEETWKKCRFQHPSTMHILQPMDIHVELAKAMVEKDIRMARFKVSGGLPLMHVRISDQKMKDVLYLMNSIPLPQKSSAQSPERQVSSIPIISGGTKGLLGTSLLLDTVESESDDEYFDAEDGEPQTCKSMKGSELKKAAEVPNEELINLLLKFEIKEVILEFTKQQKEEDTILVFNVTQLGTEATMRTFDLTVVSYLKKISLDYHEIEGSKRKPLHLISSSDKPGLDLLKVEYIKADKNGPSFQTAFGKTEQTVKVAFSSLNLLLQTQALVASINYLTTIIPSDDQSISVAKEVQISTEKQQKNSTLPKAIVSSRDSDIIDFRLFAKLNAFCVIVCNEKNNIAEIKIQGLDSSLSLQSRKQSLFARLENIIVTDVDPKTVHKKAVSIMGNEVFRFNLDLYPDATEGDLYTDMSKVDGVLSLNVGCIQIVYLHKFLMSLLNFLNNFQTAKESLSAATAQAAERAATSVKDLAQRSFRVSINIDLKAPVIVIPQSSISTNAVVVDLGLIRVHNQFSLVSDEDYLNPPVIDRMDVQLTKLTLYRTVIQPGIYHPDIQLLHPINLEFLVNRNLAASWYHKVPVVEIKGHLDSMNVSLNQEDLNLLFRILTENLCEGTEDLDKVKPRVQETGEIKEPLEISISQDVHDSKNTLTTGVEEIRSVDIINMLLNFEIKEVVVTLMKKSEKKGRPLHELNVLQLGMEAKVKTYDMTAKAYLKKISMQCFDFTDSKGEPLHIINSSNVTDEPLLKMLLTKADSDGPEFKTIHDSTKQRLKVSFASLDLVLHLEALLSFMDFLSSAAPFSEPSSSEKESELKPLVGESRSIAVKAVSSNISQKDVFDLKITAELNAFNVFVCDQKCNIADIKIHGMDASISVKPKQTDVFARLKDIIVMNVDLQSIHKKAVSILGDEVFRFQLTLYPDATEGEAYADMSKVDGKLSFKVGCIQIVYVHKFFMSLLNFLNNFQTAKEALSTATVQAAERAASSMKDLAQKSFRLLMDINLKAPVIIIPQSSVSPNAVIADLGLIRVENKFSLVPMEHYSLPPVIDKMNIELTQLKLSRTILQASLPQNDIEILKPVNMLLSIQRNLAAAWYVQIPGMEIKGKLKPMQVALSEDDLTVLMKILLENLGEASSQPSPTQSVQETVRVRKVDVSSVPDHLKEQEDWTDSKLSMNQIVSLQFDFHFESLSIILYNNDINQESGVAFHNDSFQLGELRLHLMASSGKMFKDGSMNVSVKLKTCTLDDLREGIERATSRMIDRKNDQDNNSSMIDISYKQDKNGSQIDAVLDKLYVCASVEFLMTVADFFIKAVPQSPENVAKETQILPRQTATGKVKIEKDDSVRPNMTLKAMITDPEVVFVASLTKADAPALTASFQCNLSLSTSKLEQMMEASVRDLKVLACPFLREKRGKNITTVLQPCSLFMEKCTWASGKQNINIMVKEFIIKISPIILNTVLTIMAALSPKTKEDGSKDTSKEMENLWGIKSINDYNTWFLGVDTATEITESFKGIEHSLIEENCGVVVESIQVTLECGLGHRTVPLLLAESKFSGNIKNWTSLMAAVADVTLQVHYYNEIHAVWEPLIERVEGKRQWNLRLDVKKNPVQDKSLLPGDDFIPEPQMAIHISSGNTMNITISKSCLNVFNNLAKGFSEGTASTFDYSLKDRAPFTVKNAVGVPIKVKPNCNLRVMGFPEKSDIFDVDAGQNLELEYASMVPSSQGNLSILSRQESSFFTLTIVPHGYTEVANIPVARPGRRLYNVRNPNASHSDSVLVQIDATEGNKVITLRSPLQIKNHFSIAFIIYKFVKNVKLLERIGIARPEEEFHVPLDSYRCQLFIQPAGILEHQYKESTTYISWKEELHRSREVRCMLQCPSVEVSFLPLIVNTVALPDELSYICTHGEDWDVAYIIHLYPSLTLRNLLPYSLRYLLEGTAETHELAEGSTADVLHSRISGEIMELVLVKYQGKNWNGHFRIRDTLPEFFPVCFSSDSTEVTTVDLSVHVRRIGSRMVLSVFSPYWLINKTTRVLQYRSEDIHVKHPADFRDIILFSFKKKNIFTKNKVQLKISTSAWSSSFSLDTVGSYGCVKCPANNMEYLVGVSIKMSSFNLSRIVTLTPFCTIANKSSLELEVGEIASDGSMPTNKWNYIASSECLPFWPESLSGKLCVRVVGCEGSSKPFFYNRQDNGTLLSLEDLNGGILVDVNTAEHSTVITFSDYHEGSAPALIMNHTPWDILTYKQSGSPEEMVLLPRQARLFAWADPTGTRKLTWTYAANVGEHDLLKDGCGQFPYDANIQIHWVSFLDGRQRVLLFTDDVALVSKALQAEEMEQADYEITLSLHSLGLSLVNNESKQEVSYIGITSSGVVWEVKPKQKWKPFSQKQIILLEQSYQKHQISRDHGWIKLDNNFEVNFDKDPMEMRLPIRSPIKRDFLSGIQIEFKQSSHQRSLRARLYWLQVDNQLPGAMFPVVFHPVAPPKSIALDSEPKPFIDVSVITRFNEYSKVLQFKYFMVLIQEMALKIDQGFLGAIIALFTPTTDPEAERRRTKLIQQDIDALNAELMETSMTDMSILSFFEHFHISPVKLHLSLSLGSGGEESDKEKQEMFAVHSVNLLLKSIGATLTDVDDLIFKLAYYEIRYQFYKRDQLIWSVVRHYSEQFLKQMYVLVLGLDVLGNPFGLIRGLSEGVEALFYEPFQGAVQGPEEFAEGLVIGVRSLFGHTVGGAAGVVSRITGSVGKGLAAITMDKEYQQKRREELSRQPRDFGDSLARGGKGFLRGVVGGVTGIITKPVEGAKKEGAAGFFKGIGKGLVGAVARPTGGIVDMASSTFQGIQRAAESTEEVSSLRPPRLIHEDGIIRPYDRQESEGSDLLENHIKKLEGETYRYHCAIPGSKKTILMVTNRRVLCIKEVEILGLMCVDWQCPFEDFVFPPSVSENVLKISVKEQGLFHKKDSANQGCVRKVYLKDTATAERACNAIEDAQSTRQQQKLMKQSSVRLLRPQLPS

SEQ ID NO: 47785 - protein, 150 aa, Homo sapiens
MLKKIVLGNFSSGPVDPMMADAIDFMVDRLESLGQSELASRLTLNCQNSYVEPHKIRDIPVTIMDVFDQSALSTEAKEEMYKLYPNARRAHLKTGGNFPYLCRSAEVNLYVQIHLLQFHGTKYAAIDPSMVSAEELEVQKGSLGISQEEQ

SEQ ID NO: 47786 - protein, 304 aa, Homo sapiens
MPSPSPKGLPVKQYAVQSQLPVYEWPDVGSGEYDVGVVASFGRLLNEALILKFPYGILNVHPSCLPRWRGPAPVIHTVLHGDTVTGVTIMQIRPKRFDVGPILKQETVPVPPKSTAKELEAVLSRLGANMLISVLKNLPESLSNGRQQPMEGATYAPKISAGTSCIKWEEQTSEQIFRLYRAIGNIIPLQTLWMANTIKLLDLVEVNSSVLADPKLTGQALIPGSVIYHKQSQILLVYCKDGWIGVRSVMLKKSLTATDFYNGYLHPWYQKNSQAQPSQCRFQTLRLPTKKKQKKTVAMQQCIE

SEQ ID NO: 47787 - protein, 772 aa, Homo sapiens
MAKAPHDFMFVKRNDPDGPHSDRIYYLAMSGENRENTLFYSEIPKTINRAAVLMLSWKPLLDLFQATLDYGMYSREEELLRERKRIGTVGIASYDYHQGSGTFLFQAGSGIYHVKDGGPQGFTQQPLRPNLVETSCPNIRMDPKLCPADPDWIAFIHSNDIWISNIVTREERRLTYVHNELANMEEDARSAGVATFVLQEEFDRYSGYWWCPKAETTPSGGKILRILYEENDESEVEIIHVTSPMLETRRADSFRYPKTGTANPKVTFKMSEIMIDAEGRIIDVIDKELIQPFEILFEGVEYIARAGWTPEGKYAWSILLDRSQTRLQIVLISPELFIPVEDDVMERQRLIESVPDSVTPLIIYEETTDIWINIHDIFHVFPQSHEEEIEFIFASECKTGFRHLYKITSILKESKYKRSSGGLPAPSDFKCPIKEEIAITSGEWEVLGRHGSNIQVDEVRRLVYFEGTKDSPLEHHLYVVSYVNPGEVTRLTDRGYSHSCCISQHCDFFISKYSNQKNPHCVSLYKLSSPEDDPTCKTKEFWATILDSAGPLPDYTPPEIFSFESTTGFTLYGMLYKPHDLQPGKKYPTVLFIYGGPQVQLVNNRFKGVKYFRLNTLASLGYVVVVIDNRGSCHRGLKFEGAFKYKMVAIAGAPVTLWIFYDTGYTERYMGHPDQNEQGYYLGSVAMQAEKFPSEPNRLLLLHGFLDENVHFAHTSILLSFLVRAGKPYDLQIYPQERHSIRVPESGEHYELHLLHYLQENLGSRIAALKVI

SEQ ID NO: 47788 - protein, 823 aa, Homo sapiens
MAKAPHDFMFVKRNDPDGPHSDRIYYLAMSGENRENTLFYSEIPKTINRAAVLMLSWKPLLDLFQATLDYGMYSREEELLRERKRIGTVGIASYDYHQGSGTFLFQAGSGIYHVKDGGPQGFTQQPLRPNLVETSCPNIRMDPKLCPADPDWIAFIHSNDIWISNIVTREERRLTYVHNELANMEEDARSAGVATFVLQEEFDRYSGYWWCPKAETTPSGGKILRILYEENDESEVEIIHVTSPMLETRRADSFRYPKTGTANPKVTFKMSEIMIDAEGRIIDVIDKELIQPFEILFEGVEYIARAGWTPEGKYAWSILLDRSQTRLQIVLISPELFIPVEDDVMERQRLIESVPDSVTPLIIYEETTDIWINIHDIFHVFPQSHEEEIEFIFASECKTGFRHLYKITSILKESKYKRSSGGLPAPSDFKCPIKEEIAITSGEWEVLGRHGSNIQVDEVRRLVYFEGTKDSPLEHHLYVVSYVNPGEVTRLTDRGYSHSCCISQHCDFFISKYSNQKNPHCVSLYKLSSPEDDPTCKTKEFWATILDSAGPLPDYTPPEIFSFESTTGFTLYGMLYKPHDLQPGKKYPTVLFIYGGPQVQLVNNRFKGVKYFRLNTLASLGYVVVVIDNRGSCHRGLKFEGAFKYKMGQIEIDDQVEGLQYLASRYDFIDLDRVGIHGWSYGGYLSLMALMQRSDIFRVAIAGAPVTLWIFYDTGYTERYMGHPDQNEQGYYLGSVAMQAEKFPSEPNRLLLLHGFLDENVHFAHTSILLSFLVRAGKPYDLQIYPQERHSIRVPESGEHYELHLLHYLQENLGSRIAALKVI

SEQ ID NO: 47789 - protein, 723 aa, Homo sapiens
MAKAPHDFMFVKRNDPDGPHSDRIYYLAMSGENRENTLFYSEIPKTINRAAVLMLSWKPLLDLFQATLDYGMYSREEELLRERKRIGTVGIASYDYHQGSGTFLFQAGSGIYHVKDGGPQGFTQQPLRPNLVETSCPNIRMDPKLCPADPDWIAFIHSNDIWISNIVTREERRLTYVHNELANMEEDARSAGVATFVLQEEFDRYSGYWWCPKAETTPSGGKILRILYEENDESEVEIIHVTSPMLETRRADSFRYPKTGTANPKVTFKMSEIMIDAEGRIIDVIDKELIQPFEILFEGVEYIARAGWTPEGKYAWSILLDRSQTRLQIVLISPELFIPVEDDVMERQRLIESVPDSVTPLIIYEETTDIWINIHDIFHVFPQSHEEEIEFIFASECKTGFRHLYKITSILKESKYKRSSGGLPAPSDFKCPIKEEIAITSGEWEVLGRHGSNIQVDEVRRLVYFEGTKDSPLEHHLYVVSYVNPGEVTRLTDRGYSHSCCISQHCDFFISKYSNQKNPHCVSLYKLSSPEDDPTCKTKEFWATILDSAGPLPDYTPPEIFSFESTTGFTLYGMLYKPHDLQPGKKYPTVLFIYGGPQVAIAGAPVTLWIFYDTGYTERYMGHPDQNEQGYYLGSVAMQAEKFPSEPNRLLLLHGFLDENVHFAHTSILLSFLVRAGKPYDLQIYPQERHSIRVPESGEHYELHLLHYLQENLGSRIAALKVI

SEQ ID NO: 47790 - protein, 1039 aa, Homo sapiens
MLIIGSTYQHLRRPRGLSSLWAAVSSHQPIKLASRDLSSEEMMMMSSSPSKPSSEMGGKMLVPQASVGSDEATLSMTVENIPSMPKRTAKMIPTTTKNNYSPTAAGTERRKEDTPTSSRTLTYYTSTSSRQIVKKYTPTPRGEMKSYSPTQVREKVKYTPSPRGRRVGTYVPSTFMTMETSHAITPRTTVKDSDITATYKILETNSLKRIMEETTPTTLKGMFDSTPTFLTHEVEANVLTSPRSVMEKNNLFPPRRVESNSSAHPWGLVGKSNPKTPQGTVLLHTPATSEGQVTISTMTGSSPAETKAFTAAWSLRNPSPRTSVSAIKTAPAIVWRLAKKPSTAPSTSTTPTVRAKLTMQVHHCVVVKPTPAMLTTPSPSLTTALLPEELSPSPSVLPPSLPDLHPKGEYPPDLFSVEERRQGWVVLHVFGMMYVFVALAIVCDEYFVPALGVITDKLQISEDVAGATFMAAGGSAPELFTSLIGVFISHSNVGIGTIVGSAVFNILFVIGTCSLFSREILNLTWWPLFRDVSFYILDLIMLILFFLDSLIAWWESLLLLLAYAFYVFTMKWNKHIEVWVKEQLSRRPVAKVMALEDLSKPGDGAIAVDELQDNKKLKLPSLLTRGSSSTSLHNSTIRSTIYQLMLHSLDPLREVRLAKEKEEESLNQGARAQPQAKAESKPEEEEPAKLPAVTVTPAPVPDIKGDQKENPGGQEDVAEAESTGEMPGEEGETAGEGETEEKSGGETQPEGEGETETQGKGEECEDENEAEGKGDNEGEDEGEIHAEDGEMKGNEGETESQELSAENHGEAKNDEKGVEDGGGSDGGDSEEEEEEEEEQEEEEEEEEQEEEEEEEEEEEEKGNEEPLSLDWPETRQKQAIYLFLLPIVFPLWLTVPDVRRQVGETIGISEEIMGLTILAAGTSIPDLITSVIVARKGLGDMAVSSSVGSNIFDITVGLPVPWLLFSLINGLQPVPVSSNGLFCAIVLLFLMLLFVISSIASCKWRMNKILGFTMFLLYFVFLIISVMLEDRIISCPVSV

SEQ ID NO: 47791 - protein, 1756 aa, Homo sapiens
MTQNTLAVTDICIIIPSKGESPPHTFCKVDKNLNNSMWGSAVYLCYKKSVAKTNTVSYKAGLICRYPQEDYESFSLPESVPLFCLPMGATIECWPSNSKYPLPVFSTFVLTGASAEKVYGAAIQFYEPYSEENLTEKQRLLLGLTSADGKSDSSKTIHTNKCICLLSHWPFFDAFRKFLTFLYRYSISGPHVLPIEKHISHFMHKVPFPSPQRPRILVQLSPHDNLILSQPVSSPLPLSGGKFSTLLQNLGPENAVTLLVFAVTEHKILIHSLRPSVLTSVTEALVSMIFPFHWPCPYVPLCPLALADVLSAPCPFIVGIDSRYFDLYDPPPDVSCVDVDTNTISQIGDKKNVAWKILPKKPCKNLMNTLNNLHQQLAKLQQRPRDDGLMDLAINDYDFNSGKRLHMIDLEIQEAFLFFMASILKGYRSYLRPITQAPSETATDAASLFALQAFLRSRDRSHQKFYNMMTKTQMFIRFIEECSFVSDKDASLAFFDDCVDKVDMDKSGEVRLIELDESFKSEHTVFVTPPEIPHLPNGEEPPLQYSYNGFPVLRNNLFERPEGFLQAKKNKLPSKSSSPNSPLPMFRRTKQEIKSAHKIAKRYSSIPQMWSRCLLRHCYGLWFICLPAYVKVCHSKVRALKTAYDVLKKMQSKKMDPPDEVCYRILMQLCGQYDQPVLAVRVLFEMQKAGIDPNAITYGYYNKAVLESTWPSRSRSGYFLWTKVRNVVLGVTQFKRALKKHAHLSQTTLSDGSDLDAVSHGSMDSGHGTHTVEQAPFNTGLIKVYATDDRSSTGGQSDLGYNSLSKDEVRRGDTSTEDIQEEKDKKGSDCSSLSESESTKGSADCLPKLSYQNSSSIVRLTGTSNNSAGKISGESMESTPELLLISSLEDTNETRNIQSRCFRKRHKSDNETNLQQQVVWGNRNRNLSGGVLMGFMLNRINQEATPGDIVEKLGADAKILSNVISKSTRPNTLDIGKPPLRSKRDSLEKESSDDDTPFDGSNYLADKVDSPVIFDLEDLDSETDVSKAGCVATQNPKRIQRMNSSFSVKPFEKTDVATGFDPLSLLVAETEQQQKEEEEEDEDDSKSISTPSARRDLAEEIVMYMNNMSSPLTSRTPSIDLQRACDDKLNKKSPPLVKACRRSSLPPNSPKPVRLTKSKSYTKSEEKPRDRLWSSPAFSPTCPFREESQDTLTHSSPSFNLDTLLVPKLDVLRNSMFTAGKGVAEKASKWYSRFTMYTTSSKDQSSDRTSLSSVGAQDSESTSLTDEDVCHELEGPISSQETSATSGTKRIDLSRISLESSASLEGSLSKFALPGKSEVTSSFNASNTNIFQNYAMEVLISSCSRCRTCDCLVHDEEIMAGWTADDSNLNTTCPFCGNIFLPFLNIEIRDLRRPGRYFLKSSPSTENMHFPSSISSQTRQSCISTSASGLDTSALSVQGNFDLNSKSKLQENFCTRSIQIPANRSKTAMSKCPIFPMARSISTSGPLDKEDTGRQKLISTGSLPATLQGATDSLGLEWHLPSPDPVTVPYLSPLVVWKELESLLENEGDHAITVADFVDHHPIVFWNLVWYFRRLDLPSNLPGLILSSEHCNKYSKIPRHCMSEDSKYVLIQMLWDNMKLHQDPGQPLYILWNAHTQKYPMVHLLQKSDNSFNQELLKSMVKSIKMNDVYGPMSQILETLNKCPHFKRQRSLYREILFLSLVALGRENIDIDAFDKEYKMAYDRLTPSQVKSTHNCDRPPSTGVMECRKTFGEPYL

SEQ ID NO: 47792 - protein, 97 aa, Homo sapiens
MLVGNKSDLRHLRAVPTDEARAFAEKNGLSFIETSALDSTNVEAAFQTILTEIYRIVSQKQMSDRRENDMSPSNNVVPIHVPPTTENKPKVQCCQNI

SEQ ID NO: 47793 - protein, 920 aa, Homo sapiens
MEKWQTRSIYNAAVWYYHHCQDRMPIVMVTEDEEAIQQYGSETEGVFVITFKNYLDNFWPDLKAAHELCDSILQSRRERENESQESHGKEYPEHLPLEVLEAGIKSGRYIQGILNVNKHRAQIEAFVRLQGASSKDSDLVSDILIHGMKARNRSIHGDVVVVELLPKNEWKGRTVALCENDCDDKASGESPSEPMPTGRVVGILQKNWRDYVVTFPSKEEVQSQGKNAQKILVTPWDYRIPKIRISTQQAETLQDFRVVVRIDSWESTSVYPNGHFVRVLGRIGDLEGEIATILVENSISVIPFSEAQMCEMPVNTPESPWKVSPEEEQKRKDLRKSHLVFSIDPKGCEDVDDTLSVRTLNNGNLELGVHIADVTHFVAPNSYIDIEARTRATTYYLADRRYDMLPSVLSADLCSLLGGVDRYAVSIMWELDKASYEIKKVWYGRTIIRSAYKLFYEAAQELLDGNLSVVDDIPEFKDLDEKSRQAKLEELVWAIGKLTDIARHVRAKRDGCGALELEGVEVCVQLDDKKNIHDLIPKQPLEVHETVAECMILANHWVAKKIWESFPHQALLRQHPPPHQEFFSELRECAKAKGFFIDTRSNKTLADSLDNANDPHDPIVNRLLRSMATQAMSNALYFSTGSCAEEEFHHYGLALDKYTHFTSPIRRYSDIVVHRLLMAAISKDKKMEIKGNLFSNKDLEELCRHINNRNQAAQHSQKQSTELFQCMYFKDKDPATEERCISDGVIYSIRTNGVLLFIPRFGIKGAAYLKNKDGLVISCGPDSCSEWKPGSLQRFQNKITSTTTDGESVTFHLFDHVTVRISIQASRCHSDTIRLEIISNKPYKIPNTELIHQSSPLLKSELVKEVTKSVEEAQLAQEVKVNIIQEEYQEYRQTKGRSLYTLLEEIRDLALLDVSNNYGI

SEQ ID NO: 47794 - protein, 106 aa, Homo sapiens
MACARPLISVYSEKGESSGKNVTLPAVFKAPIRPDIVNFVHTNLRKNNRQPYAVSELAGHQTSAESWGTGRAVARIPRVRGGGTHRSGQGAFGNVSFVSLPKTGHL

SEQ ID NO: 47795 - skipped

SEQ ID NO: 47796 - protein, 640 aa, Homo sapiens [sequence omitted]

SEQ ID NO: 47797 - protein, 348 aa, Homo sapiens [sequence omitted]

SEQ ID NO: 47798 - protein, 55 aa, Homo sapiens
MVECIREVNEVIQNPATITRILLSHFNWDKEKLMESISLALNVDISFVCSAGVNI

SEQ ID NO: 47799 - protein, 374 aa, Homo sapiens
MGKGAAAERFFSDKETFHDIAQVASEFPGAQHYVGGNAALIGQKFAANSDLKVLLCGPVGPKLHELLDDNVFVPPESLQEVDEFHLILEYQAGEEWGQLKAPHANRFIFSHDLSNGAMNMLEVFVSSLEEFQPDLVVLSGLHMMEGQSKELQRKRLLEVVTSISDIPTGIPVHLELASMTNRELMSSIVHQVFPAVTSLGLNEQELLFLTQSASGPHSSLSSWNGVPDVGMVSDILFWILKEHGRSKSRASDLTRIHFHTLVYHILATVDGHWANQLAAVAAGARVAGTQACATETIDTSRVSLRAPQEFMTSHSEAGSRIVLNPNKPVVEWHREGISFHFTPVLVCKDPIRTVGLGDAISAEGLFYSEVHPHY

SEQ ID NO: 47800 - protein, 311 aa, Homo sapiens
MIVFRLGRIRTPQGPGMVLLLPFIDSFQRVDLRTRAFNVPPCKLASKDGAVLSVGADVQFRIWDPVLSVMTVKDLNTATRMTAQNAMTKALLKRPLREIQMEKLKISDQLLLEINDVTRAWGLEVDRVELAVEAVLQPPQDSPAGPNLDSTLQQLALHFLGGSMNSMAGGAPSPGPADTVEMVSEVEPPAPQVGARSSPKQPLAEGLLTALQPFLSEALVSQVGACYQFNVVLPSGTQSAYFLDLTTGRGRVGHGVPDGIPDVVVEMAEADLRALLCRELRPLGAYMSGRLKVKGDLAMAMKLEAVLRALK

SEQ ID NO: 47801 - protein, 179 aa, Homo sapiens
MLYYLWMLHSVTLFLNLLACLAWFSGNSSKGVDFGLSILWFLIFTPCAFLCWYRPIYKAFRSDNSFSFFVFFFVFFCQIGIYIIQLVGIPGLGDSGWIAALSTLDNHSLAISVIMMVVAGFFTLCAVLSVFLLQRVHSLYRRTGASFQQAQEEFSQGIFSSRTFHRAASSAAQGAFQGN

SEQ ID NO: 47802 - protein, 62 aa, Homo sapiens
MLGASPNRPDSSGKRSVKFNKGYTALSQSPDENLVSLDSDRPFMYIPGPFSSEQYPFPGWLG

SEQ ID NO: 47803 - protein, 1947 aa, Homo sapiens
MAAGCRLEEEEYEDDAYGHYEAFSTLAPEAWPAMELPEPCVPEPGLPPVFANFTQLLTISPLVVAEGGTAWLEWRHVQPTLDLMEAELRKSQVLFSVTRGARHGELELDIPGAQARKMFTLLDVVNRKARFIHDGSEDTSDQLVLEVSVTARVPMPSCLRRGQTYLLPIQVNPVNDPPHIIFPHGSLMVILEHTQKPLGPEVFQAYDPDSACEGLTFQVLGTSSGLPVERRDQPGEPATEFSCRELEAGSLVYVHRGGPAQDLTFRVSDGLQASPPATLKVVAIRPAIQIHRSTGLRLAQGSAMPILPANLSVETNAVGQDVSVLFRVTGALQFGELQKQGAGGVEGAEWWATQAFHQRDVEQGRVRYLSTDPQHHAYDTVENLALEVQVGQEILSNLSFPVTIQRATVWMLRLEPLHTQNTQQETLTTAHLEATLEEAGPSPPTFHYEVVQAPRKGNLQLQGTRLSDGQGFTQDDIQAGRVTYGATARASEAVEDTFRFRVTAPPYFSPLYTFPIHIGGDPDAPVLTNVLLVVPEGGEGVLSADHLFVKSLNSASYLYEVMERPRHGRLAWRGTQDKTTMVTSFTNEDLLRGRLVYQHDDSETTEDDIPFVATRQGESSGDMAWEEVRGVFRVAIQPVNDHAPVQTISRIFHVARGGRRLLTTDDVAFSDADSGFADAQLVLTRKDLLFGSIVAVDEPTRPIYRFTQEDLRKRRVLFVHSGADRGWIQLQVSDGQHQATALLEVQASEPYLRVANGSSLVVPQGGQGTIDTAVLHLDTNLDIRSGDEVHYHVTAGPRWGQLVRAGQPATAFSQQDLLDGAVLYSHNGSLSPRDTMAFSVEAGPVHTDATLQVTIALEGPLAPLKLVRHKKIYVFQGEAAEIRRDQLEAAQEAVPPADIVFSVKSPPSAGYLVMVSRGALADEPPSLDPVQSFSQEAVDTGRVLYLHSRPEAWSDAFSLDVASGLGAPLEGVLVELEVLPAAIPLEAQNFSVPEGGSLTLAPPLLRVSGPYFPTLLGLSLQVLEPPQHGALQKEDGPQARTLSAFSWRMVEEQLIRYVHDGSETLTDSFVLMANASEMDRQSHPVAFTVTVLPVNDQPPILTTNTGLQMWEGATAPIPAEALRSTDGDSGSEDLVYTIEQPSNGRVVLRGAPGTEVRSFTQAQLDGGLVLFSHRGTLDGGFRFRLSDGEHTSPGHFFRVTAQKQVLLSLKGSQTLTVCPGSVQPLSSQTLRASSSAGTDPQLLLYRVVRGPQLGRLFHAQQDSTGEALVNFTQAEVYAGNILYEHEMPPEPFWEAHDTLELQLSSPPARDVAATLAVAVSFEAACPQRPSHLWKNKGLWVPEGQRARITVAALDASNLLASVPSPQRSEHDVLFQVTQFPSRGQLLVSEEPLHAGQPHFLQSQLAAGQLVYAHGGGGTQQDGFHFRAHLQGPAGASVAGPQTSEAFAITVRDVNERPPQPQASVPLRLTRGSRAPISRAQLSVVDPDSAPGEIEYEVQRAPHNGFLSLVGGGLGPVTRFTQADVDSGRLAFVANGSSVAGIFQLSMSDGASPPLPMSLAVDILPSAIEVQLRAPLEVPQALGRSSLSQQQLRVVSDREEPEAAYRLIQGPQYGHLLVGGRPTSAFSQFQIDQGEVVFAFTNFSSSHDHFRVLALARGVNASAVVNVTVRALLHVWAGGPWPQGATLRLDPTVLDAGELANRTGSVPRFRLLEGPRHGRVVRVPRARTEPGGSQLVEQFTQQDLEDGRLGLEVGRPEGRAPGPAGDSLTLELWAQGVPPAVASLDFATEPYNAARPYSVALLSVPEAARTEAGKPESSTPTGEPGPMASSPEPAVAKGGFLSFLEANMFSVIIPMCLVLLLLALILPLLFYLRKRNKTGKHDVQVLTAKPRNGLAGDTETFRKVEPGQAIPLTAVPGQGPPPGGQPDPELLQFCRTPNPALKNGQYWV

SEQ ID NO: 47804 - protein, 256 aa, Homo sapiens
MLDQPLPTGQNGTTEEVTSEEEEEEEEMAEDIEDLDHYEMKEEEPISGKKSEDEGIEKENLAILEKIRKTQRQDHLNGAVSGSVQASDRLMKELRDIYRSQSYKTGIYSVELINDSLYDWHVKLQKVDPDSPLHSDLQILKEKEGIEYILLNFSFKDNFPFDPPFVRVVLPVLSGGYVLGGGALCMELLTKQGWSSAYSIESVIMQINATLVKGKARVQFGANKNQYNLARAQQSYNSIVQIHEKNGWYTPPKEDG

SEQ ID NO: 47805 - protein, 1605 aa, Homo sapiens
MSDNNNGLTEVLKEIAGLDTAPQIRGNETNSRETFLGRINDCYKRSLERKLPPSCMIGGIKETQGKHVILSGSTEVISNEGGRFCYPEFSSGEESEEDVLFSNMEEEHESWDESDEELLAMEIRMRGQPRFANFRANTLSPVRFFVDKKWNTIPLRNKSLQRICAVDYDDSYDEILNGYEENSVVSYGQGSIQSMVSSDSTSPDSSLTEESRSETASSLSQKICNGGLSPGNPGDSKDMKEIEPNYESPSSNNQDKDSSQASKSSIKVPETHKAVLALRLEEKDGKIAVQTEKEESKASTDVAGQAVTINLVPTEEQAKPYRVVNLEQPLCKPYTVVDVSAAMASEHLEGPVNSPKTKSSSSTPNSPVTSSSLTPGQISAHFQKSSAIRYQEVWTSSTSPRQKIPKVELITSGTGPNVPPRKNCHKSAPTSPTATNISSKTIPVKSPNLSEIKFNSYNNAGMPPFPIIIHDEPTYARSSKNAIKVPIVINPNAYDNLAIYKSFLGTSGELSVKEKTTSVISHTYEEIETESKVPDNTTSKTTDCLQTKGFSNSTEHKRGSVAQKVQEFNNCLNRGQSSPQRSYSSSHSSPAKIQRATQEPVAKIEGTQESQMVGSSSTREKASTVLSQIVASIQPPQSPPETPQSGPKACSVEELYAIPPDADVAKSTPKSTPVRPKSLFTSQPSGEAEAPQTTDSPTTKVQKDPSIKPVTPSPSKLVTSPQSEPPAPFPPPRSTSSPYHAGNLLQRHFTNWTKPTSPTRSTEAESVLHSEGSRRAADAKPKRWISFKSFFRRRKTDEEDDKEKEREKGKLVGLDGTVIHMLPPPPVQRHHWFTEAKGESSEKPAIVFMYRCDPAQGQLSVDQSKARTDQAAVMEKGRAENALLQDSEKKRSHSSPSQIPKKILSHMTHEVTEDFSPRDPRTVVGKQDGRGCTSVTTALSLPELEREDGKEDISDPMDPNPCSATYSNLGQSRAAMIPPKQPRQPKGAVDDAIAFGGKTDQEAPNASQPTPPPLPKKMIIRANTEPISKDLQKSMESSLCVMANPTYDIDPNWDASSAGSSISYELKGLDIESYDSLERPLRKERPVPSAANSISSLTTLSIKDRFSNSMESLSSRRGPSCRQGRGIQKPQRQALYRGLENREEVVGKIRSLHTDALKKLAVKCEDLFMAGQKDQLRFGVDSWSDFRLTSDKPCCEAGDAVYYTASYAKDPLNNYAVKICKSKAKESQQYYHSLAVRQSLAVHFNIQQDCGHFLAEVPNRLLPWEDPDDPEKDEDDMEETEEDAKGETDGKNPKPCSEAASSQKENQGVMSKKQRSHVVVITREVPCLTVADFVRDSLAQHGKSPDLYERQVCLLLLQLCSGLEHLKPYHVTHCDLRLENLLLVHYQPGGTAQGFGPAEPSPTSSYPTRLIVSNFSQAKQKSHLVDPEILRDQSRLAPEIITATQYKKCDEFQTGILIYEMLHLPNPFDENPELKEREYTRADLPRIPFRSPYSRGLQQLASCLLNPNPSERILISDAKGILQCLLWGPREDLFQTFTACPSLVQRNTLLQNWLDIKRTLLMIKFAEKSLDREGGISLEDWLCAQYLAFATTDSLSCIVKILQHR

SEQ ID NO: 47806 - protein, 908 aa, Homo sapiens
MSDNNNGLTEVLKEIAGLDTAPQIRGNETNSRETFLGRINDCYKRSLERKLPPSCMIGGIKETQGKHVILSGSTEVISNEGGRFCYPEFSSGEESEEDVLFSNMEEEHESWDESDEELLAMEIRMRGQPRFANFRANTLSPVRFFVDKKWNTIPLRNKSLQRICAVDYDDSYDEILNGYEENSVVSYGQGSIQSMVSSDSTSPDSSLTEESRSETASSLSQKICNGGLSPGNPGDSKDMKEIEPNYESPSSNNQDKDSSQASKSSIKVPETHKAVLALRLEEKDGKIAVQTEKEESKASTDVAGQAVTINLVPTEEQAKPYRVVNLEQPLCKPYTVVDVSAAMASEHLEGPVNSPKTKSSSSTPNSPVTSSSLTPGQISAHFQKSSAIRYQEVWTSSTSPRQKIPKVELITSGTGPNVPPRKNCHKSAPTSPTATNISSKTIPVKSPNLSEIKFNSYNNAGMPPFPIIIHDEPTYARSSKNAIKVPIVINPNAYDNLAIYKSFLGTSGELSVKEKTTSVISHTYEEIETESKVPDNTTSKTTDCLQTKGFSNSTEHKRGSVAQKVQEFNNCLNRGQSSPQRSYSSSHSSPAKIQRATQEPVAKIEGTQESQMVGSSSTREKASTVLSQIVASIQPPQSPPETPQSGPKACSVEELYAIPPDADVAKSTPKSTPVRPKSLFTSQPSGEAEAPQTTDSPTTKVQKDPSIKPVTPSPSKLVTSPQSEPPAPFPPPRSTSSPYHAGNLLQRHFTNWTKPTSPTRSTEAESVLHSEGSRRAADAKPKRWISFKSFFRRRKTDEEDDKEKEREKGKLVGLDGTVIHMLPPPPVQRHHWFTEAKGESSEKPAIVFMYRCDPAQGQLSVDQSKARTDQAAVMEKGRAENALLQDSEKKRSHSSPSQIPKKILRYVK

SEQ ID NO: 47807 - protein, 906 aa, Homo sapiens
MKKEDVMNILDWKTKQSNVEVPFFPARVLLQDFTGIPAMVDFAAMREAVKTLGGDPEKVHPACPTDLTVDHSLQIDFSKCAIQNAPNPGGGDLQKAGKLSPLKVQPKKLPCRGQTTCRGSCDSGELGRNSGTFSSQIENTPILCPFHLQPVPEPETVLKNQEVEFGRNRERLQFFKWSSRVFKNVAVIPPGTGMAHQINLEYLSRVVFEEKDLLFPDSVVGTDSHITMVNGLGILGWGVGGIETEAVMLGLPVSLTLPEVVGCELTGSSNPFVTSIDVVLGITKHLRQVGVAGKFVEFFGSGVSQLSIVDRTTIANMCPEYGAILSFFPVDNVTLKHLEHTGFSKAKLESMETYLKAVKLFRNDQNSSGEPEYSQVIQINLNSIVPSVSGPKRPQDRVAVTDMKSDFQACLNEKVGFKGFQIAAEKQKDIVSIHYEGSEYKLSHGSVVIAAVISCTNNCNPSVMLAAGLLAKKAVEAGLRVKPYIRTSLSPGSGMVTHYLSSSGVLPYLSKLGFEIVGYGCSICVGNTAPLSDAVLNAVKQGDLVTCGILSGNKNFEGRLCDCVRANYLASPPLVVAYAIAGTVNIDFQTEPLGTDPTGKNIYLHDIWPSREEVHRVEEEHVILSMFKALKDKIEMGNKRWNSLEAPDSVLFPWDLKSTYIRCPSFFDKLTKEPIALQAIENAHVLLYLGDSVTTDHISPAGSIARNSAAAKYLTNRGLTPREFNSYGARRGNDAVMTRGTFANIKLFNKFIGKPAPKTIHFPSGQTLDVFEAAELYQKEGIPLIILAGKKYGSGNSRDWAAKGPYLLGVKAVLAESYEKIHKDHLIGIGIAPLQFLPGENADSLGLSGRETFSLTFPEELSPGITLNIQTSTGKVFSVIASFEDDVEITLYKHGGLLNFVARKFS

SEQ ID NO: 47808 - protein, 182 aa, Homo sapiens
MCSFYIGLGSRINCNIFSYDYSGYGVSSGKPSEKNLYADIDAAWQALRTRYGVSPENIILYGQSIGTVPTVDLASRYECAAVILHSPLMSGLRVAFPDTRKTYCFDAFPSIDKISKVTSPVLVIHGTEDEVIDFSHGLAMYERCPRAVEPLWVEGAGHNDIELYAQYLERLKQFISHELPNS

SEQ ID NO: 47809 - protein, 172 aa, Homo sapiens [sequence omitted]

SEQ ID NO: 47810 - protein, 376 aa, Homo sapiens
MFNGGMATTSAEIELPDVEPAAFLALLRFLYSDEVQIGPETVMTTLYTAKKYAVPALEAHCVEFLTKHLRADNAFMLLTQARLFDEPQLASLCLDTIDKSTMDAISAEGFTDIDIDTLCAVLERDTLSIRESRLFGAVVRWAEAECQRQQLPVTFGNKQKVLGKALSLIRFPLMTIEEFAAGPAQSGILSDREVVNLFLHFTVNPKPRVEYIDRPRCCLRGKECCINRFQQVESRWGYSGTSDRIRFTVNRRISIVGFGLYGSIHGPTDYQVNIQIIEYEKKQTLGQNDTGFSCDGTANTFRVMFKEPIEILPNVCYTACATLKGPDSHYGTKGLKKVVHETPAASKTVFFFFSSPGNNNGTSIEDGQIPEIIFYT

SEQ ID NO: 47811 - protein, 279 aa, Homo sapiens
MFNGGMATTSAEIELPDVEPAAFLALLRFLYSDEVQIGPETVMTTLYTAKKYAVPALEAHCVEFLTKHLRADNAFMLLTQARLFDEPQLASLCLDTIDKSTMDAISAEGFTDIDIDTLCAVLERDTLSIRESRLFGAVVRWAEAECQRQQLPVTFGNKQKVLGKALSLIRFPLMTIEEFAAGPAQSGILSDREVVNLFLHFTVNPKPRVEYIDRPRCCLRGKECCINRFQQVESRWGYSGTSDRIRSLNMRKSKPWDRMIPALVVMGQLTHSGSCSRNP

SEQ ID NO: 47812 - protein, 185 aa, Homo sapiens
MKGYPHWPARIDELPEGAVKPPANKYPIFFFGTHETAFLGPKDLFPYKEYKDKFGKSNKRKGFNEGLWEIENNPGVKFTGYQAIQQQSSSETEGEGGNTADASSEEEGDRVEEDGKGKRKNEKAGSKRKKSYTSKKSSKQSRKSPGDEDDKDCKEEENKSSSEGGDAGNDTRNTTSDLQKTSEGT

SEQ ID NO: 47813 - protein, 113 aa, Homo sapiens
MIVSSALMIWKGLMVITGSESPIVVVLSGSMEPAFHRGDLLFLTNRVEDPIRVGEIVVFRIEGREIPIVHRVLKIHEKFVPYIGIVTILMNDYPKFKYAVLFLLGLFVLVHRE

SEQ ID NO: 47814 - protein, 2538 aa, Homo sapiens
MNIQQQLMKTNLKQMDSLMPLMMTAQDPSSAPETDGQFLPCAPEPTDPQRLSSSEETESTQCCPGSPVAQTESPCDLSSIVEEENTDRSCRKKNKGVERKGEEVEPAPIVDSGTVSDQDSCLQSLPDCGVKGTEGLSSCGNRNEETGTKSSGMPTDQESLSSGDAVLQRDLVMEPGTAQYSSGGELGGISTTNVSTPDTAGEMEHGLMNPDATVWKNVLQGGESTKERFENSNIGTAGASDVHVTSKPVDKISVPNCAPAASSLDGNKPAESSLAFSNEETSTEKTAETETSRSREESADAPVDQNSVVIPAAAKDKISDGLEPYTLLAAGIGEAMSPSDLALLGLEEDVMPHQNSETNSSHAQSQKGKSSPICSTTGDDKLCADSACQQNTVTSSGDLVAKLCDNIVSESESTTARQPSSQDPPDASHCEDPQAHTVTSDPVRDTQERADFCPFKVVDNKGQRKDVKLDKPLTNMLEVVSHPHPVVPKMEKELVPDQAVISDSTFSLANSPGSESVTKDDALSFVPSQKEKGTATPELHTATDYRDGPDGNSNEPDTRPLEDRAVGLSTSSTAAELQHGMGNTSLTGLGGEHEGPAPPAIPEALNIKGNTDSSLQSVGKATLALDSVLTEEGKLLVVSESSAAQEQDKDKAVTCSSIKENALSSGTLQEEQRTPPPGQDTQQFHEKSISADCAKDKALQLSNSPGASSAFLKAETEHNKEVAPQVSLLTQGGAAQSLVPPGASLATESRQEALGAEHNSSALLPCLLPDGSDGSDALNCSQPSPLDVGVKNTQSQGKTSACEVSGDVTVDVTGVNALQGMAEPRRENISHNTQDILIPNVLLSQEKNAVLGLPVALQDKAVTDPQGVGTPEMIPLDWEKGKLEGADHSCTMGDAEEAQIDDEAHPVLLQPVAKELPTDMELSAHDDGAPAGVREVMRAPPSGRERSTPSLPCMVSAQDAPLPKGADLIEEAASRIVDAVIEQVKAAGALLTEGEACHMSLSSPELGPLTKGLESAFTEKVSTFPPGESLPMGSTPEEATGSLAGCFAGREEPEKIILPVQGPEPAAEMPDVKAEDEVDFRASSISEEVAVGSIAATLKMKQGPMTQAINRENWCTIEPCPDAASLLASKQSPECENFLDVGLGRECTSKQGVLKRESGSDSDLFHSPSDDMDSIIFPKPEEEHLACDITGSSSSTDDTASLDRHSSHGSDVSLSQILKPNRSRDRQSLDGFYSHGMGAEGRESESEPADPGDVEEEEMDSITEVPANCSVLRSSMRSLSPFRRHSWGPGKNAASDAEMNHRSMSWCPSGVQYSAGLSADFNYRSFSLEGLTGGAGVGNKPSSSLEVSSANAEELRHPFSGEERVDSLVSLSEEDLESDQREHRMFDQQICHRSKQQGFNYCTSAISSPLTKSISLMTISHPGLDNSRPFHSTFHNTSANLTESITEENYNFLPHSPSKKDSEWKSGTKVSRTFSYIKNKMSSSKKSKEKEKEKDKIKEKEKDSKDKEKDKKTVNGHTFSSIPVVGPISCSQCMKPFTNKDAYTCANCSAFVHKGCRESLASCAKVKMKQPKGSLQAHDTSSLPTVIMRNKPSQPKERPRSAVLLVDETATTPIFANRRSQQSVSLSKSVSIQNITGVGNDENMSNTWKFLSHSTDSLNKISKVNESTESLTDEGVGTDMNEGQLLGDFEIESKQLEAESWSRIIDSKFLKQQKKDVVKRQEVIYELMQTEFHHVRTLKIMSGVYSQGMMADLLFEQQMVEKLFPCLDELISIHSQFFQRILERKKESLVDKSEKNFLIKRIGDVLVNQFSGENAERLKKTYGKFCGQHNQSVNYFKDLYAKDKRFQAFVKKKMSSSVVRRLGIPECILLVTQRITKYPVLFQRILQCTKDNEVEQEDLAQSLSLVKDVIGAVDSKVASYEKKVRLNEIYTKTDSKSIMRMKSGQMFAKEDLKRKKLVRDGSVFLKNAAGRLKEVQAVLLTDILVFLQEKDQKYIFASLDQKSTVISLKKLIVREVAHEEKGLFLISMGMTDPEMVEVHASSKEERNSWIQIIQDTINTLNRDEDEGIPSENEEEKKMLDTRARELKEQLHQKDQKILLLLEEKEMIFRDMAECSTPLPEDCSPTHSPRVLFRSNTEEALKGGPLMKSAINEVEILQGLVSGNLGGTLGPTVSSPIEQDVVGPVSLPRRAETFGGFDSHQMNASKGGEKEEGDDGQDLRRTESDSGLKKGGNANLVFMLKRNSEQVVQSVVHLYELLSALQGVVLQQDSYIEDQKLVLSERALTRSLSRPSSLIEQEKQRSLEKQRQDLANLQKQQAQYLEEKRRREREWEARERELREREALLAQREEEVQQGQQDLEKEREELQQKKGTYQYDLERLRAAQKQLEREQEQLRREAERLSQRQTERDLCQVSHPHTKLMRIPSFFPSPEEPPSPSAPSIAKSGSLDSELSVSPKRNSISRTHKDKGPFHILSSTSQTNKGPEGQSQAPASTSASTRLFGLTKPKEKKEKKKKNKTSRSQPGDGPASEVSAEGEEIFC

SEQ ID NO: 47815 - protein, 2534 aa, Homo sapiens
MNIQQQLMKTNLKQMDSLMPLMMTAQDPSSAPETDGQFLPCAPEPTDPQRLSSSEETESTQCCPGSPVAQTESPCDLSSIVEEENTDRSCRKKNKGVERKGEEVEPAPIVDSGTVSDQDSCLQSLPDCGVKGTEGLSSCGNRNEETGTKSSGMPTDQESLSSGDAVLQRDLVMEPGTAQYSSGGELGGISTTNVSTPDTAGEMEHGLMNPDATVWKNVLQGGESTKERFENSNIGTAGASDVHVTSKPVDKISVPNCAPAASSLDGNKPAESSLAFSNEETSTEKTAETETSRSREESADAPVDQNSVVIPAAAKDKISDGLEPYTLLAAGIGEAMSPSDLALLGLEEDVMPHQNSETNSSHAQSQKGKSSPICSTTGDDKLCADSACQQNTVTSSGDLVAKLCDNIVSESESTTARQPSSQDPPDASHCEDPQAHTVTSDPVRDTQERADFCPFKVVDNKGQRKDVKLDKPLTNMLEVVSHPHPVVPKMEKELVPDQAVISDSTFSLANSPGSESVTKDDALSFVPSQKEKGTATPELHTATDYRDGPDGNSNEPDTRPLEDRAVGLSTSSTAAELQHGMGNTSLTGLGGEHEGPAPPAIPEALNIKGNTDSSLQSVGKATLALDSVLTEEGKLLVVSESSAAQEQDKDKAVTCSSIKENALSSGTLQEEQRTPPPGQDTQQFHEKSISADCAKDKALQLSNSPGASSAFLKAETEHNKEVAPQVSLLTQGGAAQSLVPPGASLATESRQEALGAEHNSSALLPCLLPDGSDGSDALNCSQPSPLDVGVKNTQSQGKTSACEVSGDVTVDVTGVNALQGMAEPRRENISHNTQDILIPNVLLSQEKNAVLGLPVALQDKAVTDPQGVGTPEMIPLDWEKGKLEGADHSCTMGDAEEAQIDDEAHPVLLQPVAKELPTDMELSAHDDGAPAGVREVMRAPPSGRERSTPSLPCMVSAQDAPLPKGADLIEEAASRIVDAVIEQVKAAGALLTEGEACHMSLSSPELGPLTKGLESAFTEKVSTFPPGESLPMGSTPEEATGSLAGCFAGREEPEKIILPVQGPEPAAEMPDVKAEDEVDFRASSISEEVAVGSIAATLKMKQGPMTQAINRENWCTIEPCPDAASLLASKQSPECENFLDVGLGRECTSKQGVLKRESGSDSDLFHSPSDDMDSIIFPKPEEEHLACDITGSSSSTDDTASLDRHSSHGSDVSLSQILKPNRSRDRQSLDGFYSHGMGAEGRESESEPADPGDVEEEEMDSITEVPANCSVLRSSMRSLSPFRRHSWGPGKNAASDAEMNHRSSMRVLGDVVRRPPIHRRSFSLEGLTGGAGVGNKPSSSLEVSSANAEELRHPFSGEERVDSLVSLSEEDLESDQREHRMFDQQICHRSKQQGFNYCTSAISSPLTKSISLMTISHPGLDNSRPFHSTFHNTSANLTESITEENYNFLPHSPSKKDSEWKSGTKVSRTFSYIKNKMSSSKKSKEKEKEKDKIKEKEKDSKDKEKDKKTVNGHTFSSIPVVGPISCSQCMKPFTNKDAYTCANCSAFVHKGCRESLASCAKVKMKQPKGSLQAHDTSSLPTVIMRNKPSQPKERPRSAVLLVDETATTPIFANRRSQQSVSLSKSVSIQNITGVGNDENMSNTWKFLSHSTDSLNKISKVNESTESLTDEGVGTDMNEGQLLGDFEIESKQLEAESWSRIIDSKFLKQQKKDVVKRQEVIYELMQTEFHHVRTLKIMSGVYSQGMMADLLFEQQMVEKLFPCLDELISIHSQFFQRILERKKESLVDKSEKNFLIKRIGDVLVNQFSGENAERLKKTYGKFCGQHNQSVNYFKDLYAKDKRFQAFVKKKMSSSVVRRLGIPECILLVTQRITKYPVLFQRILQCTKDNEVEQEDLAQSLSLVKDVIGAVDSKVASYEKKVRLNEIYTKTDSKSIMRMKSGQMFAKEDLKRKKLVRDGSVFLKNAAGRLKEVQAVLLTDILVFLQEKDQKYIFASLDQKSTVISLKKLIVREVAHEEKGLFLISMGMTDPEMVEVHASSKEERNSWIQIIQDTINTLNRDEDEGIPSENEEEKKMLDTRARELKEQLHQKDQKILLLLEEKEMIFRDMAECSTPLPEDCSPTHSPRVLFRSNTEEALKGGPLMKSAINEVEILQGLVSGNLGGTLGPTVSSPIEQDVVGPVSLPRRAETFGGFDSHQMNASKGGEKEEGDDGQDLRRTESDSGLKKGGNANLVFMLKRNSEQVVQSVVHLYELLSALQGVVLQQDSYIEDQKLVLSERALTRSLSRPSSLIEQEKQRSLEKQRQDLANLQKQQAQYLEEKRRREREWEARERELREREALLAQREEEVQQGQQDLEKEREELQQKKGTYQYDLERLRAAQKQLEREQEQLRREAERLSQRQTERDLCQVSHPHTKLMRIPSFFPSPEEPPSPSAPSIAKSGSLDSELSVSPKRNSISRTHKDKGPFHILSSTSQTNKGPEGQSQAPASTSASTRLFGLTKPKEKKEKKKKNKTSRSQPGDGPASEVSAEGEEIFC

SEQ ID NO: 47816 - protein, 516 aa, Homo sapiens
MFSHGLRESRDDTVNFQDNLHPEVLELLLDFAYSSRIAINEENAESLLEAGDMLQFHDVRDAAAEFLEKNLFPSNCLGMMLLSDAHQCRRLYEFSWRMCLVHFETVRQSEDFNSLSKDTLLDLISSDELETEDERVVFEAILQWVKHDLEPRKVHLPELLRSVRLALLPSDCLQEAVSSEALLMADERTKLIMDEALRCKTRILQNDGVVTSPCARPRKAGHTLLILGGQTFMCDKIYQVDHKAKEIIPKADLPSPRKEFSASAIGCKVYVTGGRGSENGVSKDVWVYDTVHEEWSKAAPMLIARFGHGSAELENCLYVVGGHTSLAGVFPASPSVSLKQVEKYDPGANKWMMVAPLRDGVSNAAVVSAKLKLFVFGGTSIHRDMVSKVQCYDPSENRWTIKAECPQPWRYTAAAVLGSQIFIMGGDTEFTAASAYRFDCETNQWTRIGDMTAKRMSCHALASGNKLYVVGGYFGTQRCKTLDCYDPTSDTWNCITTVPYSLIPTAFVSTWKHLPA

SEQ ID NO: 47817 - protein, 285 aa, Homo sapiens
MARKALLQEQGLLSMPPEPGSSPLPTPFGAATATEAASSGKQCLRAGSGSAPCSRRPAPGKASGPLPSKCVAIDCEMVGTGPRGRVSELARCSIVSYHGNVLYDKYIRPEMPIADYRTRWSGITRQHMRKAVPFQVAQKEILKLLKGKVVVGHALHNDFQALKYVHPRSQTRDTTYVPNFLSEPGLHTRARVSLKDLALQLLHKKIQVGQHGHSSVEDATTAMELYRLVEVQWEQQEARSLWTCPEDREPDSSTDMEQYMEDQYWPDDLAHGSRGGAREAQDRRN

SEQ ID NO: 47818 - protein, 2375 aa, Homo sapiens
MHPVTTAPSTAPLAPRIKWSRVSKEKEVVLLVATEGRVRVNSAYQDKVSLPNYPAIPSDATLEVQSLRSNDSGVYRCEVMHGIEDSEATLEVVVKGIVFHYRAISTRYTLDFDRAQRACLQNSAIIATPEQLQAAYEDGFHQCDAGWLADQTVRYPIHTPREGCYGDKDEFPGVRTYGIRDTNETYDVYCFAEEMEGEVFYATSPEKFTFQEAANECRRLGARLATTGQLYLAWQAGMDMCSAGWLADRSVRYPISKARPNCGGNLLGVRTVYVHANQTGYPDPSSRYDAICYTGEDFVDIPENFFGVGGEEDITVQTVTWPDMELPLPRNITEGEARGSVILTVKPIFEVSPSPLEPEEPFTFAPEIGATAFAEVENETGEATRPWGFPTPGLGPATAFTSEDLVVQVTAVPGQPHLPGGVVFHYRPGPTRYSLTFEEAQQACLRTGAVIASPEQLQAAYEAGYEQCDAGWLRDQTVRYPIVSPRTPCVGDKDSSPGVRTYGVRPSTETYDVYCFVDRLEGEVFFATRLEQFTFQEALEFCESHNATLATTGQLYAAWSRGLDKCYAGWLADGSLRYPIVTPRPACGGDKPGVRTVYLYPNQTGLPDPLSRHHAFCFRGISAVPSPGEEEGGTPTSPSGVEEWIVTQVVPGVAAVPVEEETTAVPSGETTAILEFTTEPENQTEWEPAYTPVGTSPLPGILPTWPPTGAATEESTEGPSATEVPSASEEPSPSEVPFPSEEPSPSEEPFPSVRPFPSVELFPSEEPFPSKEPSPSEEPSASEEPYTPSPPVPSWTELPSSGEESGAPDVSGDFTGSGDVSGHLDFSGQLSGDRASGLPSGDLDSSGLTSTVGSGLPVESGLPSGDEERIEWPSTPTVGELPSGAEILEGSASGVGDLSGLPSGEVLETSASGVGDLSGLPSGEVLETTAPGVEDISGLPSGEVLETTAPGVEDISGLPSGEVLETTAPGVEDISGLPSGEVLETTAPGVEDISGLPSGEVLETTAPGVEDISGLPSGEVLETTAPGVEDISGLPSGEVLETAAPGVEDISGLPSGEVLETAAPGVEDISGLPSGEVLETAAPGVEDISGLPSGEVLETAAPGVEDISGLPSGEVLETAAPGVEDISGLPSGEVLETAAPGVEDISGLPSGEVLETAAPGVEDISGLPSGEVLETAAPGVEDISGLPSGEVLETAAPGVEDISGLPSGEVLETAAPGVEDISGLPSGEVLETAAPGVEDISGLPSGEVLETAAPGVEDISGLPSGEVLETAAPGVEDISGLPSGEVLETAAPGVEDISGLPSGEVLETAAPGVEDISGLPSGEVLETAAPGVEDISGLPSGEVLETTAPGVEEISGLPSGEVLETTAPGVDEISGLPSGEVLETTAPGVEEISGLPSGEVLETSTSAVGDLSGLPSGGEVLEISVSGVEDISGLPSGEVVETSASGIEDVSELPSGEGLETSASGVEDLSRLPSGEEVLEISASGFGDLSGLPSGGEGLETSASEVGTDLSGLPSGREGLETSASGAEDLSGLPSGKEDLVGSASGDLDLGKLPSGTLGSGQAPETSGLPSGFSGEYSGVDLGSGPPSGLPDFSGLPSGFPTVSLVDSTLVEVVTASTASELEGRGTIGISGAGEISGLPSSELDISGRASGLPSGTELSGQASGSPDVSGEIPGLFGVSGQPSGFPDTSGETSGVTELSGLSSGQPGISGEASGVLYGTSQPFGITDLSGETSGVPDLSGQPSGLPGFSGATSGVPDLVSGTTSGSGESSGITFVDTSLVEVAPTTFKEEEGLGSVELSGLPSGEADLSGKSGMVDVSGQFSGTVDSSGFTSQTPEFSGLPSGIAEVSGESSRAEIGSSLPSGAYYGSGTPSSFPTVSLVDRTLVESVTQAPTAQEAGEGPSGILELSGAHSGAPDMSGEHSGFLDLSGLQSGLIEPSGEPPGTPYFSGDFASTTNVSGESSVAMGTSGEASGLPEVTLITSEFVEGVTEPTISQELGQRPPVTHTPQLFESSGKVSTAGDISGATPVLPGSGVEVSSVPESSSETSAYPEAGFGASAAPEASREDSGSPDLSETTSAFHEANLERSSGLGVSGSTLTFQEGEASAAPEVSGESTTTSDVGTEAPGLPSATPTASGDRTEISGDLSGHTSQLGVVISTSIPESEWTQQTQRPAETHLEIESSSLLYSGEETHTVETATSPTDASIPASPEWKRESESTAADQEVCEEGWNKYQGHCYRHFPDRETWVDAERRCREQQSHLSSIVTPEEQEFVNNNAQDYQWIGLNDRTIEGDFRWSDGHPMQFENWRPNQPDNFFAAGEDCVVMIWHEKGEWNDVPCNYHLPFTCKKGTATTYKRRLQKRSSRHPRRSRPSTAH

SEQ ID NO: 47819 - protein, 2474 aa, Homo sapiens
MHPVTTAPSTAPLAPRIKWSRVSKEKEVVLLVATEGRVRVNSAYQDKVSLPNYPAIPSDATLEVQSLRSNDSGVYRCEVMHGIEDSEATLEVVVKGIVFHYRAISTRYTLDFDRAQRACLQNSAIIATPEQLQAAYEDGFHQCDAGWLADQTVRYPIHTPREGCYGDKDEFPGVRTYGIRDTNETYDVYCFAEEMEGEVFYATSPEKFTFQEAANECRRLGARLATTGQLYLAWQAGMDMCSAGWLADRSVRYPISKARPNCGGNLLGVRTVYVHANQTGYPDPSSRYDAICYTGEDFVDIPENFFGVGGEEDITVQTVTWPDMELPLPRNITEGEARGSVILTVKPIFEVSPSPLEPEEPFTFAPEIGATAFAEVENETGEATRPWGFPTPGLGPATAFTSEDLVVQVTAVPGQPHLPGGVVFHYRPGPTRYSLTFEEAQQACLRTGAVIASPEQLQAAYEAGYEQCDAGWLRDQTVRYPIVSPRTPCVGDKDSSPGVRTYGVRPSTETYDVYCFVDRLEGEVFFATRLEQFTFQEALEFCESHNATLATTGQLYAAWSRGLDKCYAGWLADGSLRYPIVTPRPACGGDKPGVRTVYLYPNQTGLPDPLSRHHAFCFRGISAVPSPGEEEGGTPTSPSGVEEWIVTQVVPGVAAVPVEEETTAVPSGETTAILEFTTEPENQTEWEPAYTPVGTSPLPGILPTWPPTGAATEESTEGPSATEVPSASEEPSPSEVPFPSEEPSPSEEPFPSVRPFPSVELFPSEEPFPSKEPSPSEEPSASEEPYTPSPPVPSWTELPSSGEESGAPDVSGDFTGSGDVSGHLDFSGQLSGDRASGLPSGDLDSSGLTSTVGSGLPVESGLPSGDEERIEWPSTPTVGELPSGAEILEGSASGVGDLSGLPSGEVLETSASGVGDLSGLPSGEVLETTAPGVEDISGLPSGEVLETTAPGVEDISGLPSGEVLETTAPGVEDISGLPSGEVLETTAPGVEDISGLPSGEVLETTAPGVEDISGLPSGEVLETTAPGVEDISGLPSGEVLETAAPGVEDISGLPSGEVLETAAPGVEDISGLPSGEVLETAAPGVEDISGLPSGEVLETAAPGVEDISGLPSGEVLETAAPGVEDISGLPSGEVLETAAPGVEDISGLPSGEVLETAAPGVEDISGLPSGEVLETAAPGVEDISGLPSGEVLETAAPGVEDISGLPSGEVLETAAPGVEDISGLPSGEVLETAAPGVEDISGLPSGEVLETAAPGVEDISGLPSGEVLETAAPGVEDISGLPSGEVLETAAPGVEDISGLPSGEVLETAAPGVEDISGLPSGEVLETAAPGVEDISGLPSGEVLETTAPGVEEISGLPSGEVLETTAPGVDEISGLPSGEVLETTAPGVEEISGLPSGEVLETSTSAVGDLSGLPSGGEVLEISVSGVEDISGLPSGEVVETSASGIEDVSELPSGEGLETSASGVEDLSRLPSGEEVLEISASGFGDLSGLPSGGEGLETSASEVGTDLSGLPSGREGLETSASGAEDLSGLPSGKEDLVGSASGDLDLGKLPSGTLGSGQAPETSGLPSGFSGEYSGVDLGSGPPSGLPDFSGLPSGFPTVSLVDSTLVEVVTASTASELEGRGTIGISGAGEISGLPSSELDISGRASGLPSGTELSGQASGSPDVSGEIPGLFGVSGQPSGFPDTSGETSGVTELSGLSSGQPGISGEASGVLYGTSQPFGITDLSGETSGVPDLSGQPSGLPGFSGATSGVPDLVSGTTSGSGESSGITFVDTSLVEVAPTTFKEEEGLGSVELSGLPSGEADLSGKSGMVDVSGQFSGTVDSSGFTSQTPEFSGLPSGIAEVSGESSRAEIGSSLPSGAYYGSGTPSSFPTVSLVDRTLVESVTQAPTAQEAGEGPSGILELSGAHSGAPDMSGEHSGFLDLSGLQSGLIEPSGEPPGTPYFSGDFASTTNVSGESSVAMGTSGEASGLPEVTLITSEFVEGVTEPTISQELGQRPPVTHTPQLFESSGKVSTAGDISGATPVLPGSGVEVSSVPESSSETSAYPEAGFGASAAPEASREDSGSPDLSETTSAFHEANLERSSGLGVSGSTLTFQEGEASAAPEVSGESTTTSDVGTEAPGLPSATPTASGDRTEISGDLSGHTSQLGVVISTSIPESEWTQQTQRPAETHLEIESSSLLYSGEETHTVETATSPTDASIPASPEWKRESESTAAAPARSCAEEPCGAGTCKETEGHVICLCPPGYTGEHCNIDQEVCEEGWNKYQGHCYRHFPDRETWVDAERRCREQQSHLSSIVTPEEQEFVNNNAQDYQWIGLNDRTIEGDFRWSDGHPMQFENWRPNQPDNFFAAGEDCVVMIWHEKGEWNDVPCNYHLPFTCKKGTVACGEPPVVEHARTFGQKKDRYEINSLVRYQCTEGFVQRHMPTIRCQPSGHWEEPQITCTDPTTYKRRLQKRSSRHPRRSRPSTAH

SEQ ID NO: 47820 - protein, 660 aa, Homo sapiens
MVDVSGQFSGTVDSSGFTSQTPEFSGLPSGIAEVSGESSRAEIGSSLPSGAYYGSGTPSSFPTVSLVDRTLVESVTQAPTAQEAGEGPSGILELSGAHSGAPDMSGEHSGFLDLSGLQSGLIEPSGEPPGTPYFSGDFASTTNVSGESSVAMGTSGEASGLPEVTLITSEFVEGVTEPTISQELGQRPPVTHTPQLFESSGKVSTAGDISGATPVLPGSGVEVSSVPESSSETSAYPEAGFGASAAPEASREDSGSPDLSETTSAFHEANLERSSGLGVSGSTLTFQEGEASAAPEVSGESTTTSDVGTEAPGLPSATPTASGDRTEISGDLSGHTSQLGVVISTSIPESEWTQQTQRPAETHLEIESSSLLYSGEETHTVETATSPTDASIPASPEWKRESESTAADIDECLSSPCLNGATCVDAIDSFTCLCLPSYEGDLCEIDQEVCEEGWNKYQGHCYRHFPDRETWVDAERRCREQQSHLSSIVTPEEQEFVNNNAQDYQWIGLNDRTIEGDFRWSDGHPMQFENWRPNQPDNFFAAGEDCVVMIWHEKGEWNDVPCNYHLPFTCKKGTVACGEPPVVEHARTFGQKKDRYEINSLVRYQCTEGFVQRHMPTIRCQPSGHWEEPQITCTDPTTYKRRLQKRSSRHPRRSRPSTAH

SEQ ID NO: 47821 - protein, 720 aa, Homo sapiens
MPASCSQERVDWLCRYKEDPWLWDLEWDLQEFKQKKAKKVKKEPATASKLPIEGAGAPGDPMDQEDLGPCSEEEEFQQDVMARACLQKLKGTTELLPKRPQHLPGHPGWYRKLCPRLDDPAWTPGPSLLSLQMRVTPKLMALTWDGFPLHYSERHGWGYLVPGRRDNLAKLPTGTTLESAGVVCPYRAIESLYRKHCLEQGKQQLMPQEAGLAEEFLLTDNSAIWQTVEELDYLEVEAEAKMENLRAAVPGQPLALTARGGPKDTQPSYHHGNGPYNDVDIPGCWFFKLPHKDGNSCNVGSPFAKDFLPKMEDGTLQAGPGGASGPRALEINKMISFWRNAHKRISSQMVVWLPRSALPRAVIRHPDYDEEGLYGAILPQVVTAGTITRRAVEPTWLTASNARPDRVGSELKAMVQAPPGYTLVGADVDSQELWIAAVLGDAHFAGMHGCTAFGWMTLQGRKSRGTDLHSKTATTVGISREHAKIFNYGRIYGAGQPFAERLLMQFNHRLTQQEAAEKAQQMYAATKGLRWYRLSDEGEWLVRELNLPVDRTEGGWISLQDLRKVQRETARKSQWKKWEVVAERAWKGGTESEMFNKLESIATSDIPRTPVLGCCISRALEPSAVQEEFMTSRVNWVVQSSAVDYLHLMLVAMKWLFEEFAIDGRFCISIHDEVRYLVREEDRYRAALALQITNLLTRTSLGTMIYPDYWVHVCLQAGSE

SEQ ID NO: 47822 - protein, 1146 aa, Homo sapiens
MGNAARHTGATHLNHLSSRSHTVFTVTLEQRGRAPSRLPRPAPGQLLVSKFHFVDLAGSERVLKTGSTGERLKESIQINSSLLALGNVISALGDPQRRGSHIPYRDSKITRILKDSLGGNAKTVMIACVSPSSSDFDETLNTLNYASRAQNIRNRATVNWRPEAERPPEETASGARGPPRHRSETRIIHRGRRAPGPATASAAAAMRLGAECARYRACTDAAYSLLRELQAEPGLPGAAARKVRDWLCAVEGERSALSSASGPDSGIESASVEDQAAQGAGGRKEDEGAQQLLTLQNQVARLEEENRDFLAALEDAMEQYKLQSDRLREQQEEMVELRLRLELVRPGWGGPRLLNGLPPGSFVPRPHTAPLGGAHAHVLGMVPPACLPGDEVGSEQRGEQVTNGREAGAELLTEVNRLGSGSSAASEEEEEEEEPPRRTLHLRRNRISNCSQRAGARPGSLPERKGPELCLEELDAAIPGSRAVGGSKARVQARQVPPATASEWRLAQAQQKIRELAINIRMKEELIGELVRTGKAAQALNRQHSQRIRELEQEAEQVRAELSEGQRQLRELEGKELQDAGERSRLQEFRRRVAAAQSQVQVLKEKKQATERLVSLSAQSEKRLQELERNVQLMRQQQGQLQRRLREETEQKRRLEAEMSKRQHRVKELELKHEQQQKILKIKTEEIAAFQRKRRSGSNGSVVSLEQQQKIEEQKKWLDQEMEKVLQQRRALEELGEELHKREAILAKKEALMQEKTGLESKRLRSSQALNEDIVRVSSRLEHLEKELSEKSGQLRQGSAQSQQQIRGEIDSLRQEKDSLLKQRLEIDGKLRQGSLLSPEEERTLFQLDEAIEALDAAIEYKNEAITCRQRVLRASASLLSQCEMNLMAKLSYLSSSETRALLCKYFDKVVTLREEQHQQQIAFSELEMQLEEQQRLVYWLEVALERQRLEMDRQLTLQQKEHEQNMQLLLQQSRDHLGEGLADSRRQYEARIQALEKELGRYMWINQELKQKLGGVNAVGHSRGGEKRSLCSEGRQAPGNEDELHLAPELLWLSPLTEGAPRTREETRDLVHAPLPLTWKRSSLCGEEQGSPEELRQREAAEPLVGRVLPVGEAGLPWNFGPLSKPRRELRRASPGMIDVRKNPL

SEQ ID NO: 47823 - protein, 219 aa, Homo sapiens
MEAPGAPPRTLTWEAMEQIRYLHEEFPESWSVPRLAEGFDVSTDVIRRVLKSKFLPTLEQKLKQDQKVLKKAGLAHSLQHLRGSGNTSKLLPAGHSVSGSLLMPGHEASSKDPNHSTALKVIESDTHRTNTPRRRKGRNKEIQDLEESFVPVAAPLGHPRELQKYSSDSESPRGTGSGALPSGQKLEELKAEEPDNFSSKVVQRGREFFDSNGNFLYRI

SEQ ID NO: 47824 - protein, 492 aa, Homo sapiens
MAAAAARIQPEAEYQGFLRQYGSAPDVPPCVTFDESLLEEGEPLEPGELQLNELTVESVQHTLTSVTDELAVATEMVFRRQEMVTQLQQELRNEEENTHPRERVQLLGKRQVLQEALQGLQVALCSQAKLQAQQELLQTKLEHLGPGEPPPVLLLQDDRHSTSSSEQEREGGRTPTLEILKSHISGIFRPKFSNLYRLEGEGFPSIPLLIDHLLSTQQPLTKKSGVVLHRAVPKDKWVLNHEDLVLGEQIGRGNFGEVFSGRLRADNTLVAVKSCRETLPPDLKAKFLQEARSSPSTSSWSLCRGSSPPAGGDFLTFLRTEGARLRVKTLLQMVGDAAAGMEYLESKCCIHRDLAARNCLVTEKNVLKISDFGMSREEADGVYAASGGLRQVPVKWTAPEALNYGRYSSESDVWSFGILLWETFSLGASPYPNLSNQQTREFVEKGGRLPCPELCPDAVFRLMEQCWAYEPGQRPSFSTIYQELQSIRKRHR

SEQ ID NO: 47825 - protein, 223 aa, Homo sapiens
MAYIQDAQKRLTLHTAQALGVSSLKDGQLEVILDRRLMQDDNRGLGQGLKDNKRTCNRFRLLLERRTVGSEVQDSHSTSYPSLLSHLTSMYLNAPALALPVARMQLPGPGLRSFHPLASSLPCDFHLLNLRTLQAEEDTLPSAETALILHRKGFDCGLEAKNLGFNCTTSQGKVALGSLFHGLDVVFLQPTSLTLLYPLASPSNSTDVYLEPMEIATFRLRLG

SEQ ID NO: 47826 - protein, 601 aa, Homo sapiens [sequence omitted]

SEQ ID NO: 47827 - protein, 80 aa, Homo sapiens [sequence omitted]

SEQ ID NO: 47828 - protein, 917 aa, Homo sapiens
MFFFFVCLFFVVFFCFIGVIAVFSRGVLLRSGFLGLHAAMDLDKPSVWGSLKQRTRPLLINLSKKKVKKNPSKPPDLRARHHLDRRLSLSVPDLLEAEALAPEGRPYSGPQSSYTSVPSSLSTAGIFPKSSSSSLKQSEEELDWSQEEASHLHVVETDSEEAYASPAERRRVSSNGIFDLQKTSLGGDAPEEPEKLCGSSDLNASMTSQHFEEQSVPGEASDGLSNLPSPFAYLLTIHLKEGRNLVVRDRCGTSDPYVKFKLNGKTLYKSKVIYKNLNPVWDEIVVLPIQSLDQKLRVKVYDRDLTTSDFMGSAFVILSDLELNRTTEHILKLEDPNSLEDDMGVIVLNLNLVVKQGDFKRHRWSNRKRLSASKSSLIRNLRLSESLKKNQLWNGIISITLLEGKNVSGGSMTEMFVQLKLGDQRYKSKTLCKSANPQWQEQFDFHYFSDRMGILDIEVWGKDNKKHEERLGTCKVDISALPLKQANCLELPLDSCLGALLMLVTLTPCAGVSVSDLCVCPLADLSERKQITQRYCLQNSLKDVKDVGILQVKVLKAADLLAADFSGKSDPFCLLELGNDRLQTHTVYKNLNPEWNKVFTFPIKDIHDVLEVTVFDEDGDKPPDFLGKVAIPLLSIRDGQPNCYVLKNKDLEQAFKGVIYLEMDLIYNPVKASIRTFTPREKRFVEDSRKLSKKILSRDVDRVKRITMAIWNTMQFLKSCFQWESTLRSTIAFAVFLITVWNFELYMIPLALLLIFVYNFIRPVKGKVSSIQDSQESTDIDDEEDEDDKESEKKGLIERIYMVQDIVSTVQNVLEEIASFGERIKNTFNWTVPFLSSLACLILAAATIILYFIPLRYIILIWGINKFTKKLRNPYSIDNNELLDFLSRVPSDVQKVQYAELKLCSSHSPLRKKRSAL

SEQ ID NO: 47829 - protein, 320 aa, Homo sapiens
MKRNSLTSLPENLAQKLPNLVELYLHSNNIVVVPEAIGSLVKLQCLDLSDNALEIVCPEIGRLRALRHLRLANNQLQFLPPEVGDLKELQTLDISTNRLLTLPERLHMCLSLQYLTVDRNRLWYVPRHLCQLPSLNELSMAGNRLAFLPLDLGRSRELQYVYVDNNIHLKGLPSYLYNKVIGCSGCGAPIQVSEVKLLSFSSGQRTVFLPAEVKAIGTEHDHVLPLQELAMRGLYHTYHSLLKDLNFLSPISLPRSLLELLHCPLGHCHRCSEPMFTIVYPKLFPLRETPMAGLHQWKTTVSFVAYCCSTQCLQTFDLLS

SEQ ID NO: 47830 - protein, 469 aa, Homo sapiens
MKKAYELSVLCDCEIALIIFNSSNKLFQYASTDMDKVLLKYTEYNEPHESRTNSDIVETLRKKGLNGCESPDADDYFEHSPLSEDRFSKLNEDSDFIFKRGPPGLPPQNFSMSVTVPVTSPNALSYTNPGSSLVSPSLAASSTLTDSSMLSPPQTTLHRNVSPGAPQRPPSTGNAGGMLSTTDLTVPNGAGSSPVGNGFVNSRASPNLIGATGANSLGKVMPTKSPPPPGGGNLGMNSRKPDLRVVIPPSSKGMMPPLNTQRISSSQATQPLATPVVSVTTPSLPPQGLVYSAMPTAYNTDYSLTSADLSALQGFNSPGMLSLGQVSAWQQHHLGQAALSSLVAGGQLSQGSNLSINTNQNISIKSEPISPPRDRMTPSGFQQQQQQQQQQQPPPPPQPQPQPPQPQPRQEMGRSPVDSLSSSSSSYDGSDREDPRGDFHSPIVLGRPPNTEDRESPSVKRMRMDAWVT

SEQ ID NO: 47831 - protein, 471 aa, Homo sapiens
MKKAYELSVLCDCEIALIIFNSSNKLFQYASTDMDKVLLKYTEYNEPHESRTNSDIVEALNKKEHRGCDSPDPDTSYVLTPHTEEKYKKINEEFDNMMRNHKIAPGLPPQNFSMSVTVPVTSPNALSYTNPGSSLVSPSLAASSTLTDSSMLSPPQTTLHRNVSPGAPQRPPSTGNAGGMLSTTDLTVPNGAGSSPVGNGFVNSRASPNLIGATGANSLGKVMPTKSPPPPGGGNLGMNSRKPDLRVVIPPSSKGMMPPLNTQRISSSQATQPLATPVVSVTTPSLPPQGLVYSAMPTAYNTDYSLTSADLSALQGFNSPGMLSLGQVSAWQQHHLGQAALSSLVAGGQLSQGSNLSINTNQNISIKSEPISPPRDRMTPSGFQQQQQQQQQQQPPPPPQPQPQPPQPQPRQEMGRSPVDSLSSSSSSYDGSDREDPRGDFHSPIVLGRPPNTEDRESPSVKRMRMDAWVT

SEQ ID NO: 47832 - protein, 1988 aa, Homo sapiens
METLNGAGDTGGKPSTRGGDPAARSRRTEGIRAAYRRGDRGGARDLLEEACDQCASQLEKGQLLSIPAAYGDLEMVRYLLSKRLVELPTEPTDDNPAVVAAYFGHTAVVQELLESLPGPCSPQRLLNWMLALACQRGHLGVVKLLVLTHGADPESYAVRKNEFPVIVRLPLYAAIKSGNEDIAIFLLRHGAYFCSYILLDSPDPSKHLLRKYFIEASPLPSSYPGKTALRVKWSHLRLPWVDLDWLIDISCQITELDLSANCLATLPSVIPWGLINLRKLNLSDNHLGELPGVQSSDEIICSRLLEIDISSNKLSHLPPGFLHLSKLQKLTASKNCLEKLFEEENATNWIGLRKLQELDISDNKLTELPALFLHSFKSLNSLNVSRNNLKVFPDPWACPLKCCKASRNALECLPDKMAVFWKNHLKDVDFSENALKEVPLGLFQLDALMFLRLQGNQLAALPPQEKWTCRQLKTLDLSRNQLGKNEDGLKTKRIAFFTTRGRQRSGTEAASVLEFPAFLSESLEVLCLNDNHLDTVPPSVCLLKSLSELYLGNNPGLRELPPELGQLGNLWQLDTEDLTISNVPAEIQKEGPKAMLSYLRAQLRKAEKCKLMKMIIVGPPRQGKSTLLEILQTGRAPQVVHGEATIRTTKWELQRPAGSRAKVESVEFNVWDIGGPASMATVNQCFFTDKALYVVVWNLALGEEAVANLQFWLLNIEAKAPNAVVLVVGTHLDLIEAKFRVERIATLRAYVLALCRSPSGSRATGFPDITFKHLHEISCKSLEGQEGLRQLIFHVTCSMKDVGSTIGCQRLAGRLIPRSYLSLQEAVLAEQQRRSRDDDVQYLTDRQLEQLVEQTPDNDIKDYEDLQSAISFLIETGTLLHFPDTSHGLRNLYFLDPIWLSECLQRIFNIKGSRSVAKNGVIRAEDLRMLLVGTGFTQQTEEQYFQFLAKFEIALPVANDSYLLPHLLPSKPGLDTHGMRHPTANTIQRVFKMSFVPVGFWQRFIARMLISLAEMDLQLFENKKNTKSRNRKVTIYSFTGNQRNRCSTFRVKRNQTIYWQEGLLVTFDGGYLSVESSDVNWKKKKSGGMKIVCQSEVRDFSAMAFITDHVNSLIDQWFPALTATESDGTPLMEQYVPCPVCETAWAQHTDPSEKSEDVQYFDMEDCVLTAIERDFISCPRHPDLPVPLQELVPELFMTDFPARLFLENSKLEHSEDEGSVLGQGGSGTVIYRARYQGQPVAVKRFHIKKFKNFANVPADTMLRHLRATDAMKNFSEFRQEASMLHALQHPCIVALIGISIHPLCFALELAPLSSLNTVLSENARDSSFIPLGHMLTQKIAYQIASGLAYLHKKNIIFCDLKSDNILVWSLDVKEHINIKLSDYGISRQSFHEGALGVEGTPGYQAPEIRPRIVYDEKVDMFSYGMVLYELLSGQRPALGHHQLQIAKKLSKGIRPVLGQPEEVQFRRLQALMMECWDTKPEKRPLALSVVSQMKDPTFATFMYELCCGKQTAFFSSQGQEYTVVFWDGKEESRNYTVVNTEKGLMEVQRMCCPGMKVSCQLQVQRSLWTATEDQKIYIYTLKGMCPLNTPQQALDTPAVVTCFLAVPVIKKNSYLVLAGLADGLVAVFPVVRGTPKDSCSYLCSHTANRSKFSIADEDARQNPYPVKAMEVVNSGSEVWYSNGPGLLVIDCASLEICRRLEPYMAPSMVTSVVCSSEGRGEEVVWCLDDKANSLVMYHSTTYQLCARYFCGVPSPLRDMFPVRPLDTEPPAASHTANPKVPEGDSIADVSIMYSEELGTQILIHQESLTDYCSMSSYSSSPPRQAARSPSSLPSSPASSSSVPFSTDCEDSDMLHTPGAASDRSEHDLTPMDGETFSQHLQAVKILAVRDLIWVPRRGGDVIVIGLEKDSGAQRGRVIAVLKARELTPHGVLVDAAVVAKDTVVCTFENENTEWCLAVWRGWGAREFDIFYQSYEELGRLEACTRKRR

SEQ ID NO: 47833 - protein, 711 aa, Homo sapiens [sequence omitted]

SEQ ID NO: 47834 - protein, 163 aa, Homo sapiens
MVGSLLATYGWYIVFSCILLYVVFQKLSARLRALRQRQLDRAAAAVEPDVVVKRQEALAAARLKMQEELNAQVEKHKEKLKQLEEEKRRQKIEMWDSMQEGKSYKGNAKKPQEEDSPGPSTSSVLKRKSDRKPLRGGGYNPLSGEGGGACSWRPGRRGPSSGG

SEQ ID NO: 47835 - protein, 451 aa, Homo sapiens
MWRIDYSAAVIYDFLAVDDINGDRIQDVLFLYKNTNSSNNFSRSCVDEGFSSPCTFAAAVSGANGSTLWERPVAQDVALVECAVPQPRGSEAPSACILVGRPSSFIAVNLFTGETLWNHSSSFSGNASILSPLLQVPDVDGDGAPDLLVLTQEREEVSGHLYSGSTGHQIGLRGSLGVDGESGFLLHVTRTGAHYILFPCASSLCGCSVKGLYEKVTGSGGPFKSDPHWESMLNATTRRMLSHSSGAVRYLMHVPGNAGADVLLVGSEAFVLLDGQELTPRWTPKAAHVLRKPIFGRYKPDTLAVAVENGTGTDRQILFLDLGTGAVLCSLALPSLPGGPLSASLPTADHRSAFFFWGLHELGSTSETETGEARHSLYMFHPTLPRVLLELANVSTHIVAFDGSHWATAERLLDGAELAPRPACPRLVTGVWEAARLCILLPGIRWLIYWF

SEQ ID NO: 47836 - protein, 491 aa, Homo sapiens
MGSESTYSECETFTDEDTSTLVHPELQPEGDADSAGGSAVPSECLDAMEEPDHGALLLLPGRPHPHGQSVITVIGGEEHFEDYGEGSEAELSPETLCNGQLGCSDPAFLTPSTDPLAAKLHSILTDEAFEFYCSQCHKQINRLEDLSARLSDLEMNSPTKRLSSKKVARYLHQSGALTMEALEDPSPELMEGPEEDIADKVVFLERRVLELEKDTAATGEQHSRLRQENLQLVHRANALEEQLKEQELRACEMVLEETRRQKELLCKMEREKSIEIENLQTRLQQLDEENSELRSCTPCLKANIERLEEEKQKLLDEIESLTLRLSEEQENKRRMGDRLSHERHQFQRDKEATQELIEDLRKQLEHLQLLKLEAEQRRGRSSSMGLQEYHSRARESELEQEVRRLKQDNRNLKEQNEELNGQIITLSIQGAKSLFSTAFSESLAAEISSVSRDELMEAIQKQEEINFRLQDYIDRIIVAIMETNPSILEVK

SEQ ID NO: 47837 - protein, 279 aa, Homo sapiens
MKVVEEPNAFGVNNPFLPQASRLQAKRDPSPVSGPVHLFRLSGKCFSLVESTYKYEFCPFHNVTQHEQTFRWNAYSGILGIWHEWEIANNTFTGMWMRDGDACRSRSRQSKVELACGKSNRLAHVSEPSTCVYALTFETPLVCHPHALLVYPTLPEALQRQWDQVEQDLADELITPQGHEKLLRTLFEDAGYLKTPEENEPTQLEGGPDSLGFETLENCRKAHKELSKEIKRLKGLLTQHGIPYTRPTETSNLEHLGHETPRAKSPEQLRGDPGLRGSL

SEQ ID NO: 47838 - protein, 148 aa, Homo sapiens [sequence omitted]

SEQ ID NO: 47839 - protein, 227 aa, Homo sapiens
MEYSCGTAAIRGTKELGEGQHFWEIKMTSPVYGTDMMVGIGTSDVDLDKYRHTFCSLLGRDEDSWGLSYTGLLHHKGDKTSFSSRFGQGSIIGVHLDTWHGTLTFFKNRKCIGVAATKLQNKRFYPMVCSTAARSSMKVTRSCASATSLQYLCCHRLRQLRPDSGDTLEGLPLPPGLKQVLHNKLGWVLSMSCSRRKAPVSDPQAATSAHPSSREPRPCQRKRCRRT

SEQ ID NO: 47840 - protein, 626 aa, Homo sapiens
MAEAPGSPRQQGLGLAGEGEQAQVKLLVNKDGRYVCALCHKTFKTGSILKAHMVTHSSRKDHECKLCGASFRTKGSLIRHHRRHTDERPYKCSKCGKSFRESGALTRHLKSLTPCTEKIRFSVSKDVVVSKEDARAGSGAGAAGLGTATSSVTGEPIETSPVIHLVTDAKGTVIHEVHVQMQELSLGMKALAPEPPVSQELPCSSEGSRENLLHQAMQNSGIVLERAAGEEGALEPAPAAGSSPQPLAVAAPQLPVLEVQPLETQVASEASAVPRTHPCPQCSETFPTAATLEAHKRGHTGPRPFACAQCGKAFPKAYLLKKHQEVHVRERRFRCGDCGKLYKTIAHVRGHRRVHSDERPYPCPKCGKRYKTKNAQQVHFRTHLEEKPHVCQFCSRGFREKGSLVRHVRHHTGEKPFKCYKCGRGFAEHGTLNRHLRTKGGCLLEVEELLVSEDSPAAATTVLTEDPHTVLVEFSSVVADTQEYIIEATADDAETSEATEIIEGTQTEVDSHIMKVVQQIVHQASAGHQIIVQNVTMDEETALGPEAAAADTITIATPESLTEQVAMTLASAISEGTVLAARAGTSGTEQATVTMVSSEDIEILEHAGELVIASPEGQLEVQTVIV

SEQ ID NO: 47841 - protein, 464 aa, Homo sapiens
MKDFTSLCLHLTVECVDRYLRRRLVPRYRLQLLGIACMVICTRFISKEILTIREAVWLTDNTYKYEDLVRMMGEIVSALEGKIRVPTVVDYKEVLLTLVPVELRTQHLCSFLCELSLLHTSLSAYAPARLAAAALLLARLTHGQTQPWTTQLWDLTGFSYEDLIPCVLSLHKKCFHDDAPKDYRQVSLTAVKQRFEDKRYGEISQEEVLSYSQLCAALGVTQDSPDPPTFLSTGEIHAFLSSPSGRRTKRKRENSLQEDRGSFVTTPTAELSSQEETLLGSFLDWSLDCCSGYEGDQESEGEKEGDVTAPSGILDVTVVYLNPEQHCCQESSDEEACPEDKGPQDPQALALDTQIPATPGPKPLVRTSREPGKDVTTSGYSSVSTASPTSSVDGGLGALPQPTSVLSLDSDSHTQPCHHQARKSCLQCRPPSPPESSVPQQQVKRINLCIHSEEEDMNLGLVRL

SEQ ID NO: 47842 - protein, 139 aa, Homo sapiens [sequence omitted]

SEQ ID NO: 47843 - protein, 1791 aa, Homo sapiens
MDESDEDFKELCASFFQRVKKHGIKEVSGERKTQKAASNGTQIRSKLKRTKQTATKTKTLQGPAEKKPPSGSQAPRTKKQRVTKWQASEPAHSVNGEGGVLASAPDPPVLRETAQNTQTGNQQEPSPNLSREKTRENVPNSDSQPPPSCLTTAVPSPSKPRTAQLVLQRMQQFKRADPERLRHASEECSLEAAREENVPKDPQEEMMAGNVYGLGPPAPESDAAVALTLQQEFARVGASAHDDSLEEKGLFFCQICQKNLSAMNVTRREQHVNRCLDEAEKTLRPSVPQIPECPICGKPFLTLKSRTSHLKQCAVKMEVGPQLLLQAVRLQTAQPEGSSSPPMFSFSDHSRGLKRRGPTSKKEPRKRRKVDEAPSEDLLVAMALSRSEMEPGAAVPALRLESAFSERIRPEAENKSRKKKPPVSPPLLLVQDSETTGRQIEDRVALLLSEEVELSSTPPLPASRILKEGWERAGQCPPPPERKQSFLWEGSALTGAWAMEDFYTARLVPPLVPQRPAQGLMQEPVPPLVPPEHSELSERRSPALHGTPTAGCGSRGPSPSASQREHQALQDLVDLAREGLSASPWPGSGGLAGSEGTAGLDVVPGGLPLTGFVVPSQDKHPDRGGRTLLSLGLLVADFGAMVNNPHLSDVQFQTDSGEVLYAHKFVLYARCPLLIQYVNNEGFSAVEDGVLTQRVLLGDVSTEAARTFLHYLYTADTGLPPGLSSELSSLAHRFGVSELVHLCEQVPIATDSEGKPWEEKEAENCESRAENFQELLRSMWADEEEEAETLLKSKDHEEDQENVNEAEMEEIYEFAATQRKLLQEERAAGAGEDADWLEGGSPVSGQLLAGVQVQKQWDKVEEMEPLEPGRDEAATTWEKMGQCALPPPQGQHSGARGAEAPEQEAPEEALGHSSCSSPSRDCQAERKEGSLPHSDDAGDYEQLFSSTQGEISEPSQITSEPEEQSGAVRERGLEVSHRLAPWQASPPHPCRFLLGPPQGGSPRGSHHTSGSSLSTPRSRGGTSQVGSPTLLSPAVPSKQKRDRSILTLSKEPGHQKGKERRSVLECRNKGVLMFPEKSPSIDLTQSNPDHSSSRSQKSSSKLNEEDEVILLLDSDEELELEQTKMKSISSDPLEEKKALEISPRSCELFSIIDVDADQEPSQSPPRSEAVLQQEDEGALPENRGSLGRRGAPWLFCDRESSPSEASTTDTSWLVPATPLASRSRDCSSQTQISSLRSGLAVQAVTQHTPRASVGNREGNEVAQKFSVIRPQTPPPQTPSSCLTPVSPGTSDGRRQGHRSPSRPHPGGHPHSSPLAPHPISGDRAHFSRRFLKHSPPGPSFLNQTPAGEVVEVGDSDDEQEVASHQANRSPPLDSDPPIPIDDCCWHMEPLSPIPIDHWNLERTGPLSTSSPSRRMNEAADSRDCRSPGLLDTTPIRGSCTTQRKLQEKSSGAGSLGNSRPSFLNSALWDVWDGEEQRPPETPPPAQMPSAGGAQKPEGLETPKGANRKKNLPPKVPITPMPQYSIMETPVLKKELDRFGVRPLPKRQMVLKLKEIFQYTHQTLDSDSEDESQSSQPLLQAPHCQTLASQTYKPSRAGVHAQQEATTGPGAHRPKGPAKTKGPRHQRKHHESITPPSRSPTKEAPPGLNDDAQIPASQESVATSVDGSDSSLSSQSSSSCEFGAAFESAGEEEGEGEVSASQAAVQAADTDEALRCYIRSKPALYQKVLLYQPFELRELQAELRQNGLRVSSRRLLDFLDTHCITFTTAATRREKLQGRRRQPRGKKKVERN

SEQ ID NO: 47844 - protein, 303 aa, Homo sapiens
MLIHIRTHTNEKPHRCPTCSKSFSRLENLKIHNRSHTGEKPYVCPYEGCNKRYSNSSDRFKHTRTHYVDKPYYCKMPGCHKRYTDPSSLRKHIKAHGHFVSHEQQELLQLRPPPKPPLPAPDGGPYVSGAQIIIPNPAALFGGPGLPGLPLPLAPGPLDLSALACGNGGGSGGGGGMGPGLPGPVLPLNLAKNPLLPSPFGAGGLGLPVVSLLAGAAGGKAEGEKGRGSVPTRALGMEGHKTPLERTESSCSRPSPDGLPLLPGTVLDLSTGVNSAASSPEALAPGWVVIPPGSVLLKPAVVN

SEQ ID NO: 47845 - protein, 166 aa, Homo sapiens [sequence omitted]

SEQ ID NO: 47846 - protein, 147 aa, Homo sapiens
MRFSVLMQMRFDGLLGFPGGFVDRRFWSLEDGLNRVLGLGLGCLRLTEADYLSSHLTEGPHRVVAHLYARQLTLEQLHAVEISAVHSRDHGLEVGPPPGPRPPPRGLALAPWKAPMGAGPRAGPAVHPEGPSRRLPQLPEQRLREHG

SEQ ID NO: 47847 - protein, 142 aa, Homo sapiens [sequence omitted]

SEQ ID NO: 47848 - protein, 149 aa, Homo sapiens
MWRCPRQVSTVVCVHEPRCQPPDCHGHGTCVDGHCQCTGHFWRGPGCDELDCGPSNCSQHGLCTETGCRCDAGWTGSNCSEECPLGWHGPGCQRPCKCEHHCPCDPKTGNCSVSRGTYPSKGRGMGRRSCSGPFSLSLVCYSKAVSPAT

SEQ ID NO: 47849 - protein, 442 aa, Homo sapiens [sequence omitted]

SEQ ID NO: 47850 - protein, 163 aa, Homo sapiens
MMNIQSHLGEALIQDLINYCLSYIAKIKLPKKRGTFIEFRNGMLNVSPIGRSCSQEERIEFYELDKKENIRQKFVADLRKEFAGKGLTFSIGGQISFDVFPDGWDKRYCLRHVENDGYKTIYFFGDKTMPGGNDHEIFTDPRTMGYSVTAPEDTRRICELLFS

SEQ ID NO: 47851 - protein, 1078 aa, Homo sapiens [sequence omitted]

SEQ ID NO: 47852 - protein, 498 aa, Homo sapiens
MELSEPIENGETEMSPEESWEHKEEISEAEPGGGSLGDGRPPEESAHEMMEEEEEIPKPKSVVAPPGAPKKEHVNVVFIGHVDAGKSTIGGQIMYLTGMVDKRTLEKYEREAKEKNRETWYLSWALDTNQEERDKGKTVEVGRAYFETEKKHFTILDAPGHKSFVPNMIGGASQADLAVLVISARKGEFETGFEKGGQTREHAMLAKTAGVKHLIVLINKMDDPTVNWSNERYEECKEKLVPFLKKVGFNPKKDIHFMPCSGLTGANLKEQSDFCPWYIGLPFIPYLDNLPNFNRSVDGPIRLPIVDKYKDMGTVVLGKLESGSICKGQQLVMMPNKHNVEVLGILSDDVETDTVAPGENLKIRLKGIEEEEILPGFILCDPNNLCHSGRTFDAQIVIIEHKSIICPGYNAVLHIHTCIEEVEITALICLVDKKSGEKSKTRPRFVKQDQVCIARLRTAGTICLETFKDFPQMGRFTLRDEGKTIAIGKVLKLVPEKD

SEQ ID NO: 47853 - protein, 301 aa, Homo sapiens
MIFAKIIRYEDYSPGFEIRLTILRCVFMRLATICVLVFTLGSKITSCDDDTCDLCGYNQKLYPCWETQVGQEMYKLMIFDFIIILAVTLFVDFPRKLLVTYCSSCKLIQCWGQQEFAIPDNVLGIVYGQTICWIGAFFSPLLPAIATLKFIIIFYVKEWSLLYTCRPSPRPFRASNSNFFFLLVLLIGLCLAIIPLTISISRIPSSKACGPFTNFNTTWEVIPKTVSTFPSSLQSFIHGVTSEAFAVPFFMIICLIMFYFIALAGAHKRVVIQLREQLSLESRDKCYLIQKLTEAQRDMRN

SEQ ID NO: 47854 - protein, 302 aa, Homo sapiens [sequence omitted]

SEQ ID NO: 47855 - protein, 90 aa, Homo sapiens
MNERKCVEEAYSLLNEYGDDMYGPEKFTDKDQQPSGSEGEDDDAEAALKKEVGDIKASTEMRLRRFQSVESGANNVVFIRTLGIGVTNTC

SEQ ID NO: 47856 - protein, 583 aa, Homo sapiens
MRECFRTKKLSNFLHAQQWKGASNYVAKRYIEPVDRDVYFEDVRLQMEAKLWGEEYNRHKPPKQVDIMQMCIIELKDRPGKPLFHLEHYIEGKYIKYNSNSGFVRDDNIRLTPQAFSHFTFERSGHQLIVVDIQGVGDLYTDPQIHTETGTDFGDGNLGVRGMALFFYSHACNRICESMGLAPFDLSPRERDAVNQNTKLLQSAKTILRGTEEKCGSPQVRTLSGSRPPLLRPLSENSGDENMSDVTFDSLPSSPSSATPHSQKLDHLHWPVFSDLDNMASRDHDHLDNHRESENSGDSGYPSEKRGELDDPEPREHGHSYSNRKYESDEDSLGSSGRVCVEKWNLLNSSRLHLPRASAVALEVQRLNALDLEKKIGKSILGKVHLAMVRYHEGGRFCEKGEEWDQESAVFHLEHAANLGELEAIVGLGLMYSQLPHHILADVSLKETEENKTKGFDYLLKAAEAGDRQSMILVARAFDSGQNLSPDRCQDWLEALHWYNTALEMTDCDEGGEYDGMQDEPRYMMLAREAEMLFTGGYGLEKDPQRSGDLYTQAAEAAMEAMKGRLANQYYQKAEEAWAQMEE

SEQ ID NO: 47857 - protein, 1214 aa, Homo sapiens
MNATLQCLSNTELFAEYLALGQYRAGRPEPSPDPEQPAGRGAQGQGEVTEQLAHLVRALWTLEYTPQHSRDFKTIVSKNALQYRGNSQHDAQEFLLWLLDRVHEDLNHSVKQSGQPPLKPPSETDMMPEGPSFPVCSTFVQELFQAQYRSSLTCPHCQKQSNTFDPFLCISLPIPLPHTRPLYVTVVYQGKCSHCMRIGVAVPLSGTVARLREAVSMETKIPTDQIVLTEMYYDGFHRSFCDTDDLETVHESDCIFAFETPEIFRPEGILSQRGIHLNNNLNHLKFGLDYHRLSSPTQTAAKQGKMDSPTSRAGSDKIVLLVCNRACTGQQGKRFGLPFVLHLEKTIAWDLLQKEILEKMKYFLRPTVCIQVCPFSLRVVSVVGITYLLPQEEQPLCHPIVERALKSCGPGGTAHVKLVVEWDKETRDFLFVNTEDEYIPDAESVRLQRERHHQPQTCTLSQCFQLYTKEERLAPDDAWRCPHCKQLQQGSITLSLWTLPDVLIIHLKRFRQEGDRRMKLQNMVKFPLTGLDMTPHVVKRSQSSWSLPSHWSPWRRPYGLGRDPEDYIYDLYAVCNHHGTMQGGHYTAYCKNSVDGLWYCFDDSDVQQLSEDEVCTQTAYILFYQRRTAIPSWSANSSVAGSTSSSLCEHWVSRLPGSKPASVTSAASSRRTSLASLSESVEMTGERSEDDGGFSTRPFVRSVQRQSLSSRSSVTSPLAVNENCMRPSWSLSAKLQMRSNSPSRFSGDSPIHSSASTLEKIGEAADDKVSISCFGSLRNLSSSYQEPSDSHSRREHKAVGRAPLAVMEGVFKDESDTRRLNSSVVDTQSKHSAQGDRLPPLSGPFDNNNQIAYVDQSDSVDSSPVKEVKAPSHPGSLAKKPESTTKRSPSSKGTSEPEKSLRKGRPALASQESSLSSTSPSSPLPVKVSLKPSRSRSKADSSSRGSGRHSSPAPAQPKKESSPKSQDSVSSPSPQKQKSASALTYTASSTSAKKASGPATRSPFPPGKSRTSDHSLSREGSRQSLGSDRASATSTSKPNSPRVSQARAGEGRGAGKHVRSSSMASLRSPSTSIKSGLKRDSKSEDKGLSFFKSALRQKETRRSTDLGKTALLSKKAGGSSVKSVCKNTGDDEAERGHQPPASQQPNANTTGKEQLVTKDPASAKHSLLSARKSKSSQLDSGVPSSPGGRQSAEKSSKKLSSSMQTSARPSQKPQ

SEQ ID NO: 47858 - protein, 295 aa, Homo sapiens [sequence omitted]

SEQ ID NO: 47859 - protein, 132 aa, Homo sapiens [sequence omitted]

SEQ ID NO: 47860 - protein, 140 aa, Homo sapiens
MNDCIIRGDLANVRVGRHCVVKSRSVIRPPFKKFSKGVAFFPLHIGDHVFIEEDCVVNAAQIGSYVHVGKNCVIGRRCVLKDCCKILDNTVLPPETVVPPFTVFSGCPGLFSGELPECTQELMIDVTKSYYQKFLPLTQV

SEQ ID NO: 47861 - protein, 856 aa, Homo sapiens
MEIDDGTSAWGDPSKYNYKNVNMWNKNVPNGNSRSDQQAQVHQLLTPASAISNKEASSGSGPKSMQDGWCGDDMPLPGNRPTGWEEEEDVEIGMWNSNSSQELNSSLNWPPYTKKMSSKGLSGKKRRRERGMMKGGNKQEEAWINPFVKQFSNISFSRDSPEENVQSNKMDLSGGMLQDKRMEIDKHSLNIGDYNRTVGKGPGSRPQISKESSMERNPYFDKNGNPSMFGVGNTAAQPRGMQQPPAQPLSSSQPNLRAQVPPPLLSPQVPVSLLKYAPNNGGLNPLFGPQQVAMLNQLSQLNQLSQISQLQRLLAQQQRAQSQRSVPSGNRPQQDQQGRPLSVQQQMMQQSRQLDPNLLVKQQTPPSQQQPLHQPAMKSFLDNVMPHTTPELQKGPSPINAFSNFPIGLNSNLNVNMDMNSIKEPQSRLRKWTTVDSISVNTSLDQNSSKHGAISSGFRLEESPFVPYDFMNSSTSPASPPGSIGDGWPRAKSPNGSSSVNWPPEFRPGEPWKGYPNIDPETDPYVTPGSVINNLSINTVREVDHLRDRNSGSSSSLNTTLPSTSAWSSIRASNYNVPLSSTAQSTSARNSDSKLTWSPGSVTNTSLAHELWKVPLPPKNITAPSRPPPGLTGQKPPLSTWDNSPLRIGGGWGNSDARYTPGSSWGESSSGRITNWLVLKNLTPQIDGSTLRTLCMQHGPLITFHLNLPHGNALVRYSSKEEVVKAQKSLHMCVLGNTTILAEFASEEEISRFFAQSQSLTPSPGWQSLGSSQSRLGSLDCSHSFSSRTDLNHWNGAGLSGTNCGDLHGTSLWGTPHYSTSLWGPPSSSDPRGISSPSPINAFLSVDHLGGGGESM

SEQ ID NO: 47862 - protein, 102 aa, Homo sapiens
MALPSEHGLEQPSHTPPQTPTPPSTPPLGKQNPSLPAPQTLAGGNPETAQPHAGTLPRPRPVPKPRNRPSVPPPPQPPGVHSAGDSSLTNTAPTASKIVTDV

SEQ ID NO: 47863 - protein, 800 aa, Homo sapiens
MKVLQEPTCVSDYMSISTCEWKMNGPTNCSTELRLLYQLVFLLSEAHTCIPENNGGAGCVCHLLMDDVVSADNYTLDLWAGQQLLWKGSFKPSEHVKPRAPGNLTVHTNVSDTLLLTWSNPYPPDNYLYNHLTYAVNIWSENDPADFRIYNVTYLEPSLRIAASTLKSGISYRARVRAWAQCYNTTWSEWSPSTKWHNSYREPFEQHLLLGVSVSCIVILAVCLLCYVSITKIKKEWWDQIPNPARSRLVAIIIQDAQGSQWEKRSRGQEPAKCPHWKNCLTKLLPCFLEHNMKRDEDPHKAAKEMPFQGSGKSAWCPVEISKTVLWPESISVVRCVELFEAPVECEEEEEVEEEKGSFCASPESSRDDFQEGREGIVARLTESLFLDLLGEENGGFCQQDMGESCLLPPSGSTSAHMPWDEFPSAGPKEAPPWGKEQPLHLEPSPPASPTQSPDNLTCTETPLVIAGNPAYRSFSNSLSQSPCPRELGPDPLLARHLEEVEPEMPCVPQLSEPTTVPQPEPETWEQILRRNVLQHGAAAAPVSAPTSGYQEFVHAVEQGGTQASAVVGLGPPGEAGYKAFSSLLASSAVSPEKCGFGASSGEEGYKPFQDLIPGCPGDPAPVPVPLFTFGLDREPPRSPQSSHLPSSSPEHLGLEPGEKVEDMPKPPLPQEQATDPLVDSLGSGIVYSALTCHLCGHLKQCHGQEDGGQTPVMASPCCGCCCGDRSSPPTTPLRAPDPSPGGVPLEASLCPASLAPSGISEKSKSSSSFHPAPGNAQSSSQTPKIVNFVSVGPTYMRVS

SEQ ID NO: 47864 - protein, 79 aa, Homo sapiens
MAHVTQAHVQTGITAAPPPHPGAPHPPQVMLLHPPQSHGGPPQGAVPQSGVPALSASTPSPYPYIGHPQALSDPDCLLT

SEQ ID NO: 47865 - protein, 452 aa, Homo sapiens
MAAATLLRATPHFSGLAAGRTFLLQGLLRLLKAPALPLLCRGLAVEAKKTYVRDKPHVNVGTIGHVDHGKTTLTAAITKILAEGGGAKFKKYEEIDNAPEERARGITINAAHVEYSTAARHYAHTDCPGHADYVKNMITGTAPLDGCILVVAANDGPMPQTREHLLLARQIGVEHVVVYVNKADAVQDSEMVELVELEIRELLTEFGYKGEETPVIVGSALCALEGRDPELGLKSVQKLLDAVDTYIPVPARDLEKPFLLPVEAVYSVPGRGTVVTGTLERGILKKGDECELLGHSKNIRTVVTGIEMFHKSLERAEAGDNLGALVRGLKREDLRRGLVMVKPGSIKPHQKVEAQVYILSKEEGGRHKPFVSHFMPVMFSLTWDMACRIILPPEKELAMPGEDLKFNLILRQPMILEKGQRFTLRDGNRTIGTGLVTNTLAMTEEEKNIKWG

SEQ ID NO: 47866 - protein, 466 aa, Homo sapiens
MNSFPPPQGHAQNPLQVGAELQSRFFASQGCAQSPFQAAPAPPPTPQAPAAEPLQVDLLPVLAAAQESAAAAAAAAAAAAAVAAAPPAPAAASTVDTAALKQPPAPPPPPPPVSAPAAEAAPPASAATIAAAAATAVVAPTSTVAVAPVASALEKKTKSKGPYICALCAKEFKNGYNLRRHEAIHTGAKAGRVPSGAMKMPTMVPLSLLSVPQLSGAGGGGGEAGAGGGAAAVAAGGVVTTTASGKRIRKNHACEMCGKAFRDVYHLNRHKLSHSDEKPYQCPVCQQRFKRKDRMSYHVRSHDGAVHKPYNCSHCGKSFSRPDHLNSHVRQVHSTERPFKCEKCEAAFATKDRLRAHTVRHEEKVPCHVCGKMLSSAYISDHMKVHSQGPHHVCELCNKGFTTAAYLRIHAVKDHGLQAPRADRILCKLCSVHCKTPAQLAGHMQTHLGGAAPPVPGDAPQPQPTC

SEQ ID NO: 47867 - protein, 450 aa, Homo sapiens
MNSFPPPQGHAQNPLQVGAELQSRFFASQGCAQSPFQAAPAPPPTPQAPAAEPLQVDLLPVLAAAQESAAAAAAAAAAAAAVAAAPPAPAAASTVDTAALKQPPAPPPPPPPVSAPAAEAAPPASAATIAAAAATAVVAPTSTVAVAPVASALEKKTKSKGPYICALCAKEFKNGYNLRRHEAIHTGAKAGRVPSGAMKMPTMVPLSLLSVPQLSGAGGGGGEAGAGGGAAAVAAGGVVTTTASGKRIRKNHACEMCGKAFRDVYHLNRHKLSHSDEKPYQCPVCQQRFKRKDRMSYHVRSHDGAVHKPYNCSHCGKSFSRPDHLNSHVRQVHSTERPFKCEKCEAAFATKDRLRAHTVRHEEKVPCHVCGKMLSSAYISDHMKVHSQGPHHVCELCNKGTGEVCPMAAAAAAAAAAAAAAVAAPPTAVGSLSGAEGVPVSSQPLPSQPW

SEQ ID NO: 47868 - protein, 84 aa, Homo sapiens
MRRTALTSHLRVHTGEKPYRCPQCGRCFGLKTGMAKHQWVHRPGGEGRRGRRPGGLSVTLTPVRGDLDPPVGFQLYPEIFQECG

SEQ ID NO: 47869 - protein, 133 aa, Homo sapiens
MPRVALRWWGQGARPGPWPSSSTSTTTSTSTPTSTPTSTSPLIPRACCHPTAPTCLRNIQERWKAFSDIIRTRPSLPQCPGCLRASRRPSPLAPCRGPSSPRARTLSCHHDWGRCRAGSPRRGHRSPTISGHL

SEQ ID NO: 47870 - protein, 475 aa, Homo sapiens
MSLATVDTLYIFSHDTQGLLRKKLIEASFQKVILDGYGSCGPQNLNLRKEWESEEKNQYNKSDTTLSQGISPRRHQKTHFLHNHCKRKKCEKAFHECTNHVHQSIFIQEKSAKCNKCIETFIQSSKHTQPQRIHIGEKSHRCNNGEKILSKLSSLRKHKIIHNEEKPYKCKECDKAFNHRSHLTQHQIIHTGEKPYKCKECGKAFNSSSYFTRHQRIHTGEKLYKCKACSKCFTHSSNLLVHQRIHTGEKPYKCKECGKSFKVSSALTQHERIHTGEKPYKCKECSKAFNCRSYLTKHQRIHTGEKLYKCKSCSKSFSRSSSLIVHQRIHTGEKPYKCKECGKAFNCSSRLTQHQRIHTGEKPYICKECGKAFNCSSSLTKHQRIHTGVKLYKCKACSKSFSHSSCLSVHQITHTGMKPYICKDCGISFNRSSNLRRHQMIHTGEKPYKCKECGKLFNRCSTLTRHKSIHTREFL

SEQ ID NO: 47871 - protein, 652 aa, Homo sapiens
MGWAVEQELASLEKGLFQDEDSCSDCSYRDKPGSSLQSFMPEGKTFFPEIFQTNQLLFYERFRAYQDYILADCKASEVQEFTAEFLEKVLEPSGWRAVWHTNVFKVLVEITDVDFAALKAVVRLAEPYLCDSQVSTFTMECMKELLDLKEHRLPLQELWVVFDDSGVFDQTALAIEHVRFFYQNIWRSWDEEEEDEYDYFVRCVEPRLRLHYDILEDRVPSGLIVDYHNLLSQCEESYRKFLNLRSSLSNCNSDSEQENISMVEGLKLYSEMEQLKQKLKLIENPLLRYVFGYQKNSNIQAKGVRSSGQKITHVVSSTMMAGLLRSLLTDRLCQEPGEEEREIQFHSDPLSAINACFEGDTVIVCPGHYVVHGTFSIADSIELEGYGLPDDIVIEKRGKGDTFVDCTGADIKISGIKFVQHDAVEGILIVHRGKTTLENCVLQCETTGVTVRTSAEFLMKNSDLYGAKGAGIEIYPGSQCTLSDNGIHHCKEGILIKDFLDEHYDIPKISMVNNIIHNNEGYGVVLVKPTIFSDLQENAEDGTEENKALKIQTSGEPDVAERVDLEELIECATGKMELCARTDPSEQVEGNCEIVNELIAASTQKGQIKKKRLSELGITQADDNLMSQEMFVGIVGNQFKWNGKGSFGTFLF

SEQ ID NO: 47872 - protein, 767 aa, Homo sapiens
MKRCLDKNKLMDALKHASNMLGELRTSMLSPKSYYELYMAISDELHYLEVYLTDEFAKGRKVADLYELVQYAGNIIPRLYLLITVGVVYVKSFPQSRKDILKDLVEMCRGVQHPLRGLFLRNYLLQCTRNILPDEGEPTDEETTGDISDSMDFVLLNFAEMNKLWVRMQHQGHSRDREKRERERQELRILVGTNLVRLSQLEGVNVERYKQIVLTGILEQVVNCRDALAQEYLMECIIQVFPDEFHLQTLNPFLRACAELHQNVNVKNIIIALIDRLALFAHREDGPGIPADIKLFDIFSQQVATVIQSRQDMPSEDVVSLQVSLINLAMKCYPDRVDYVDKVLETTVEIFNKLNLEHIATSSAVSKELTRLLKIPVDTYNNILTVLKLKHFHPLFEYFDYESRKSMSCYVLSNVLDYNTEIVSQDQVDSIMNLVSTLIQDQPDQPVEDPDPEDFADEQSLVGRFIHLLRSEDPDQQYLILNTARKHFGAGGNQRIRFTLPPLVFAAYQLAFRYKENSKVDDKWEKKCQKIFSFAHQTISALIKAELAELPLRLFLQGALAAGEIGFENHETVAYEFMSQAFSLYEDEISDSKAQLAAITLIIGTFERMKCFSEENHEPLRTQCALAASKLLKKPDQGRAVSTCAHLFWSGRNTDKNGEELHGGKRVMECLKKALKIANQCMDPSLQVQLFIEILNRYIYFYEKENDAVTIQVLNQLIQKIREDLPNLESSEETEQINKHFHNTLEHLRLRRESPESEGPIYEGLIL

SEQ ID NO: 47873 - protein, 194 aa, Homo sapiens
MKCPLDRAYLIKLSGLNKETYQSCLKSFECLLGLNSNIGIRDLAVQFSCIEAVNMASKILKSYESSLPQTQQVDLDLSRPLFTSAALLSACKILKLKVDKNKMVATSGVKKAIFDRLCKQLEKIGQQVDREPGDVATPPRKRKKIVVEAPAKEMEKVEEMPHKPQKDEDLTQDYEEWKRKILENAASAQKATAE

SEQ ID NO: 47874 - protein, 329 aa, Homo sapiens [sequence omitted]

SEQ ID NO: 47875 - protein, 382 aa, Homo sapiens
MWIKFSSDEELEGLGFRAKYSFIPDPDFTYLGDCQFELSGADGIVRSSQVEQEEKTKPGQAVDCIWTIKATPKAKIYLRFLDYQMEHSNECKRNFVAVYDGSSSIENLKAKFCSTVANDVMLKTGIGVIRMWADEGSRLSRFRMLFTSFVEPPCTSSTFFCHSNMCINNSLVCNGVQNCAYPWDENHCKEKKKAGVFEQITKTHGTIIGITSGIVLVLLIISILVQVKQPRKKVMACKTAFNKTGFQEVFDPPHYELFSLRDKEISADLADLSEELDNYQKMRRSSTASRCIHDHHCGSQASSVKQSRTNLSSMELPFRNDFAQPQPMKTFNSTFKKSSYTFKQGHECPEQALEDRVMEEIPCEIYVRGREDSAQASISIDF

SEQ ID NO: 47876 - protein, 824 aa, Homo sapiens [sequence omitted]

SEQ ID NO: 47877 - protein, 780 aa, Homo sapiens
MRTSVDSARNLQLVRSRLLKGTSLQSTILGVIPNTPDPASDAQDLPPLHRIGTAALAVQVVGSNWPKPHYTLLITGLCRFQIVQVLKEKPYPIAEVEQLDRLEEFPNTCKMREELGELSEQFYKYAVQILDAVSLEERFKMTIPLLVRQIEGLKLLQKTRKPKQDDDKRVIAIRPIRRITHISGTLEDEDEDEDNDDIVMLEKKIRTSSMPEQAHKVCVKEIKRLKKMPQSMPEYALTRNYLELMVELPWNKSTTDRLDIRAARILLDNDHYAMEKLKKRVLEYLAVRQLKNNLKGPILCFVGPPGVGKTSVGRSVAKTLGREFHRIALGGVCDQSDIRGHRRTYVGSMPGRIINGLKTVGVNNPVFLLDEVDKLGKSLQGDPAAALLEVLDPEQNHNFTDHYLNVAFDLSQVLFIATANTTATIPAALLDRMEIIQVPGYTQEEKIEIAHRHLIPKQLEQHGLTPQQIQIPQVTTLDIITRYTREAGVRSLDRKLGAICRAVAVKVAEGQHKEAKLDRSDVTEREGCREHILEDEKPESISDTTDLALPPEMPILIDFHALKDILGPPMYEMEVSQRLSQPGVAIGLAWTPLGGEIMFVEASRMDGEGQLTLTGQLGDVMKESAHLAISWLRSNAKKYQLTNAFGSFDLLDNTDIHLHFPAGAVTKDGPSAGVTIVTCLASLFSGRLVRSDVAMTGEITLRGLVLPVGGIKDKVLAAHRAGLKQVIIPRRNEKDLEGIPGNVRQDLSFVTASCLDEVLNAAFDGGFTVKTRPGLLNSKL

SEQ ID NO: 47878 - protein, 693 aa, Homo sapiens
MQIWETTQGLRNLYFNHHCHSSGGASGGGGSSSSSSTATGGSGSSTGSPGGAASAPAPAPAGMYRSGERLLGSHALPAEQRDFLPLETTNNNNNHHQPGAWARRAGSSASSPPSASSSPHPSAAVPAADPADSASGSSNKRKRDNKASTYGLNYSLLQPSGGRAAGGGRADGGGVVYSGTPWKRRNYNQGVVGLHEEISDFYEYMSPRPEEEKMRMEVVNRIESVIKELWPSADVQIFGSFKTGLYLPTSDIDLVVFGKWENLPLWTLEEALRKHKVADEDSVKVLDKATVPIIKLTDSFTEVKVDISFNVQNGVRAADLIKDFTKKYPVLPYLVLVLKQFLLQRDLNEVFTGGIGSYSLFLMAVSFLQLHPREDACIPNTNYGVLLIEFFELYGRHFNYLKTGIRIKDGGSYVAKDEVQKNMLDGYRPSMLYIEDPLQPGNDVGRSSYGAMQVKQAFDYAYVVLSHAVSPIAKYYPNNETESILGRIIRVTDEVATYRDWISKQWGLKNRPEPSCNGNGVTLIVDTQQLDKCNNNLSEENEALGKCRSKTSESLSKHSSNSSSGPVSSSSATQSSSSDVDSDATPCKTPKQLLCRPSTGNRVGSQDVSLESSQAVGKMQSTQTTNTSNSTNKSQHGSARLFRSSSKGFQGTTQTSHGSLMTNKQHQGKSNNQYYHGKKRKHKRDAPLSDLCR

SEQ ID NO: 47879 - protein, 5 aa, Homo sapiens
MLAAQ

SEQ ID NO: 47880 - protein, 1246 aa, Homo sapiens
MGGLQETSTTRTMKSRQAVSRVSREELEDRFLRLHDENILLKQHARKQEDKIKRMATKLIRLVNDKKRYERVGGGPKRLGRDVEMEEMIEQLQEKVHELEKQNETLKNRLISAKQQLQTQGYRQTPYNNVQSRINTGRRKANENAGLQECPRKGIKFQDADVAETPHPMFTKYGNSLLEEARGEIRNLENVIQSQRGQIEELEHLAEILKTQLRRKENEIELSLLQLREQQATDQRSNIRDNVEMIKLHKQLVEKSNALSAMEGKFIQLQEKQRTLRISHDALMANGDELNMQLKEQRLKCCSLEKQLHSMKFSERRIEELQDRINDLEKERELLKENYDKLYDSAFSAAHEEQWKLKEQQLKVQIAQLETALKSDLTDKTEILDRLKTERDQNEKLVQENRELQLQYLEQKQQLDELKKRIKLYNQENDINADELSEALLLIKAQKEQKNGDLSFLVKVDSEINKDLERSMRELQATHAETVQELEKTRNMLIMQHKINKDYQMEVEAVTRKMENLQQDYELKVEQYVHLLDIRAARIHKLEAQLKDIAYGTKQYKFKPEIMPDDSVDEFDETIHLERGENLFEIHINKVTFSSEVLQASGDKEPVTFCTYAFYDFELQTTPVVRGLHPEYNFTSQYLVHVNDLFLQYIQKNTITLEVHQAYSTEYETIAACQLKFHEILEKSGRIFCTASLIGTKGDIPNFGTVEYWFRLRVPMDQAIRLYRERAKALGYITSNFKGPEHMQSLSQQAPKTAQLSSTDSTDGNLNELHITIRCCNHLQSRASHLQPHPYVVYKFFDFADHDTAIIPSSNDPQFDDHMYFPVPMNMDLDRYLKSESLSFYVFDDSDTQENIYIGKVNVPLISLAHDRCISGIFELTDHQKHPAGTIHVILKWKFAYLPPSGSITTEDLGNFIRSEEPEVVQRLPPASSVSTLVLAPRPKPRQRLTPVDKKVSFVDIMPHQSDETSPPPEDRKEISPEVEHIPEIEINMLTVPHVPKVSQEGSVDEVKENTEKMQQGKDDVSLLSEGQLAEQSLASSEDETEITEDLEPEVEEDMSASDSDDCIIPGPISKNIKQPSEKIRIEIIALSLNDSQVTMDDTIQRLFVECRFYSLPAEETPVSLPKPKSGQWVYYNYSNVIYVDKENNKAKRDILKAILQKQEMPNRSLRFTVVSDPPEDEQDLECEDIGVAHVDLADMFQEGRDLIEQNIDVFDARADGEGIGKLRVTVEALHALQSVYKQYRDDLEA

SEQ ID NO: 47881 - protein, 1292 aa, Homo sapiens
MGGLQETSTTRTMKSRQAVSRVSREELEDRFLRLHDENILLKQHARKQEDKIKRMATKLIRLVNDKKRYERVGGGPKRLGRDVEMEEMIEQLQEKVHELEKQNETLKNRLISAKQQLQTQGYRQTPYNNVQSRINTGRRKANENAGLQECPRKGIKFQDADVAETPHPMFTKYGNSLLEEARGEIRNLENVIQSQRGQIEELEHLAEILKTQLRRKENEIELSLLQLREQQATDQRSNIRDNVEMIKLHKQLVEKSNALSAMEGKFIQLQEKQRTLRISHDALMANGDELNMQLKEQRLKCCSLEKQLHSMKFSERRIEELQDRINDLEKERELLKENYDKLYDSAFSAAHEEQWKLKEQQLKVQIAQLETALKSDLTDKTEILDRLKTERDQNEKLVQENRELQLQYLEQKQQLDELKKRIKLYNQENDINADELSEALLLIKAQKEQKNGDLSFLVKVDSEINKDLERSMRELQATHAETVQELEKTRNMLIMQHKINKDYQMEVEAVTRKMENLQQDYELKVEQYVHLLDIRAARIHKLEAQLKDIAYGTKQYKFKPEIMPDDSVDEFDETIHLERGENLFEIHINKVTFSSEVLQASGDKEPVTFCTYAFYDFELQTTPVVRGLHPEYNFTSQYLVHVNDLFLQYIQKNTITLEVHQAYSTEYETIAACQLKFHEILEKSGRIFCTASLIGTKGDIPNFGTVEYWFRLRVPMDQAIRLYRERAKALGYITSNFKGPEHMQSLSQQAPKTAQLSSTDSTDGNLNELHITIRCCNHLQSRASHLQPHPYVVYKFFDFADHDTAIIPSSNDPQFDDHMYFPVPMNMDLDRYLKSESLSFYVFDDSDTQENIYIGKVNVPLISLAHDRCISGIFELTDHQKHPAGTIHVILKWKFAYLPPSGSITTEDLGNFIRSEEPEVVQRLPPASSVSTLVLAPRPKPRQRLTPVDKKVSFVDIMPHQSDETSPPPEDRKEISPEVEHIPEIEINMLTVPHVPKVSQEGSVDEVKENTEKMQQGKDDVSLLSEGQLAEQSLASSEDETEITEDLEPEVEEDMSASDSDDCIIPGPISKNIKQSLALSPGLGCSSAISAHCNFRLPGSSDFPASASQVDGITGACHHTQPSEKIRIEIIALSLNDSQVTMDDTIQRLFVECRFYSLPAEETPVSLPKPKSGQWVYYNYSNVIYVDKENNKAKRDILKAILQKQEMPNRSLRFTVVSDPPEDEQDLECEDIGVAHVDLADMFQEGRDLIEQNIDVFDARADGEGIGKLRVTVEALHALQSVYKQYRDDLEA

SEQ ID NO: 47882 - protein, 1789 aa, Homo sapiens
MQLEVPLDLEVLLLSTFGYDDGFTSQLGAEGKSQPESQLHHGLKRPHQSCGSSPRRKQCKKQQLELAKKYLQLLRTSAQQRYRSQIPGSGQPHAFHQVYVPPILRRATASLDTPEGAIMGDVKVEDGADVSISDLFNTRVNKGPRVTVLLGKAGMGKTTLAHRLCQKWAEGHLNCFQALFLFEFRQLNLITRFLTPSELLFDLYLSPESDHDTVFQYLEKNADQVLLIFDGLDEALQPMGPDGPGPVLTLFSHLCNGTLLPGCRVMATSRPGKLPACLPAEAAMVHMLGFDGPRVEEYVNHFFSAQPSREGALVELQTNGRLRSLCAVPALCQVACLCLHHLLPDHAPGQSVALLPNMTQLYMQMVLALSPPGHLPTSSLLDLGEVALRGLETGKVIFYAKDIAPPLIAFGATHSLLTSFCVCTGPGHQQTGYAFTHLSLQEFLAALHLMASPKVNKDTLTQYVTLHSRWVQRTKARLGLSDHLPTFLAGLASCTCRPFLSHLAQGNEDCVGAKQAAVVQVLKKLATRKLTGPKVVELCHCVDETQEPELASLTAQSLPYQLPFHNFPLTCTDLATLTNILEHREAPIHLDFDGCPLEPHCPEALVGCGQIENLSFKSRKCGDAFAEALSRSLPTMGRLQMLGLAGSKITARGISHLVKALPLCPQLKEVSFRDNQLSDQVVLNIVEVLPHLPRLRKLDLSSNSICVSTLLCLARVAVTCPTVRMLQAREADLIFLLSPPTETTAELQRAPDLQESDGQRKGAQSRSLTLRLQKCQLQVHDAEALIALLQEGPHLEEVDLSGNQLEDEGCRLMAEAASQLHIARKLDLSNNGLSVAGVHCVLRAVSACWTLAELHISLQHKTVIFMFAQEPEEQKGPQERAAFLDSLMLQMPSELPLSSRRMRLTHCGLQEKHLEQLCKALGGSCHLGHLHLDFSGNALGDEGAARLAQLLPGLGALQSLNLSENGLSLDAVLGLVRCFSTLQWLFRLDISFESQHILLRGDKTSRDMWATGSLPDFPAAAKFLGFRQRCIPRSLCLSECPLEPPSLTRLCATLKDCPGPLELQLSCEFLSDQSLETLLDCLPQLPQLSLLQLSQTGLSPKSPFLLANTLSLCPRVKKVDLRSLHHATLHFRSNEEEEGVCCGRFTGCSLSQEHVESLCWLLSKCKDLSQVDLSANLLGDSGLRCLLECLPQVPISGLLDLSHNSISQESALYLLETLPSCPRVREASVNLGSEQSFRIHFSREDQAGKTLRLSECSFRPEHVSRLATGLSKSLQLTELTLTQCCLGQKQLAILLSLVGRPAGLFSLRVQEPWADRARVLSLLEVCAQASGSVTEISISETQQQLCVQLEFPRQEENPEAVALRLAHCDLGAHHSLLVGQLMETCARLQQLSLSQVNLCEDDDASSLLLQSLLLSLSELKTFRLTSSCVSTEGLAHLASGLGHCHHLEELDLSNNQFDEEGTKALMRALEGKWMLKRLDLSHLLLNSSTLALLTHRLSQMTCLQSLRLNRNSIGDVGCCHLSEALRAATSLEELDLSHNQIGDAGVQHLATILPGLPELRKIDLSGNSISSAGGVQLAESLVLCRRLEELMLGCNALGDPTALGLAQELPQHLRVLHLPFSHLGPGGALSLAQALDGSPHLEEISLAENNLAGGVLRFCMELPLLRQIDLVSCKIDNQTAKLLTSSFTSCPALEVILLSWNLLGDEAAAELAQVLPQMGRLKRVDLEKNQITALGAWLLAEGLAQGSSIQVIRLWNNPIPCDMAQHLKSQEPRLDFAFFDNQPQAPWGT

SEQ ID NO: 47883 - protein, 532 aa, Homo sapiens [sequence omitted]

SEQ ID NO: 47884 - protein, 537 aa, Homo sapiens [sequence omitted]

SEQ ID NO: 47885 - protein, 311 aa, Homo sapiens
MKSRKLGIYRRCWLVFRKSSSKGPQRLEKYPDEKSVCLRGCPKVTEISNVKCVTRLPKETKRQAVAIIFTDDSARTFTCDSELEAEEWYKTLSVECLGSRLNDISLGEPDLLAPGVQCEQTDRFNVFLLPCPNLDVYGECKLQITHENIYLWDIHNPRVKLVSWPLCSLRRYGRDATRFTFEAGRMCDAGEGLYTFQTQEGEQIYQRVHSATLAIAEQHKRVLLEMEKNVRLLNKGTEHYSYPCTPTTMLPRSAYWHHITGSQNIAEASSYAGEGYGAAQASSETDLLNRFILLKPKPSQGDSSEAKTPSQ

SEQ ID NO: 47886 - protein, 684 aa, Homo sapiens
MRRCEAELQELRTKPAGPCPGCEHSQESAQLRDKLSQLQLEMAESKGMLSELNLEVQQKTDRLAEVELRLKDCLAEKAQEEERLSRRLRDSHETIASLRAQSPPVKYVIKTVEVESSKTKQALSESQARNQHLQEQVAMQRQVLKEMEQQLQSSHQLTARLRAQIAMYESELERAHGQMLEEMQSLEEDKNRAIEEAFARAQVEMKAVHENLAGVRTNLLTLQPALRTLTNDYNGLKRQVRGFPLLLQEALRSVKAEIGQAIEEVNSNNQELLRKYRRELQLRKKCHNELVRLKGNIRVIARVRPVTKEDGEGPEATNAVTFDADDDSIIHLLHKGKPVSFELDKVFSPQASQQDVFQEVQALVTSCIDGFNVCIFAYGQTGAGKTYTMEGTAENPGINQRALQLLFSEVQEKASDWEYTITVSAAEIYNEVLRDLLGKEPQEKLEIRLCPDGSGQLYVPGLTEFQVQSVDDINKVFEFGHTNRTTEFTNLNEHSSRSHALLIVTVRGVDCSTGLRTTGKLNLVDLAGSERVGKSGAEGSRLREAQHINKSLSALGDVIAALRSRQGHVPFRNSKLTYLLQDSLSGDSKTLMVVQVSPVEKNTSETLYSLKFAERVRSVELGPGLRRAELGSWSSQEHLEWEPACQTPQPSARAHSAPSSGTSSRPGSIRRKLQPSGKSRPLPV

SEQ ID NO: 47887 - protein, 677 aa, Homo sapiens
MRRCEAELQELRTKPAGPCPGCEHSQESAQLRDKLSQLQLEMAESKGMLSELNLEVQQKTDRLAEVELRLKDCLAEKAQEEERLSRRLRDSHETIASLRAQSPPVKYVIKTVEVESSKTKQALSESQARNQHLQEQVAMQRQVLKEMEQQLQSSHQLTARLRAQIAMYESELERAHGQMLEEMQSLEEDKNRAIEEAFARAQVEMKAVHENLAGVRTNLLTLQPALRTLTNDYNGLKRQVRGFPLLLQEALRSVKAEIGQAIEEVNSNNQELLRKYRRELQLRKKCHNELVRLKGNIRVIARVRPVTKEDGEGPEATNAVTFDADDDSIIHLLHKGKPVSFELDKVFSPQASQQDVFQEVQALVTSCIDGFNVCIFAYGQTGAGKTYTMEGTAENPGINQRALQLLFSEVQEKASDWEYTITVSAAEIYNEVLRDLLGKEPQEKLEIRLCPDGSGQLYVPGLTEFQVQSVDDINKVFEFGHTNRTTEFTNLNEHSSRSHALLIVTVRGVDCSTGLRTTGKLNLVDLAGSERVGKSGAEGSRLREAQHINKSLSALGDVIAALRSRQGHVPFRNSKLTYLLQDSLSGDSKTLMVVQVSPVEKNTSETLYSLKFAERVRSVELGPGLRRAELGSWSSQEHLEWEPACQTPQPSARAHSAPSSGTSSRPGSIRRKLQPSA

SEQ ID NO: 47888 - protein, 244 aa, Homo sapiens [sequence omitted]

SEQ ID NO: 47889 - protein, 165 aa, Homo sapiens
MRTRPGDGSHRRGQSPLPRQRFPVPDSVLNMFPGTEEGPEDDSTKHGGRVRTFPHERGNWATHVYVPYEAKEEFLDLLDVLLPHAQTYVPRLVRMKVFHLSLSQSVVLRHHWILPFVQALKARMTSFHSPHPGPHCLIGTKDAPVTQEIPKDLGALRQEPGSQTR

SEQ ID NO: 47890 - protein, 216 aa, Homo sapiens
MISGASSPYQPTTEPVSQRRGLAGLRCDPDYLRGALGRLKVAQVILALIAFICIETIMACSPCEGLYFFEFVSCSAFVVTGVLLIMFSLNLHMRIPQINWNLTDLVNTGLSAFLFFIASIVLAALNHRAGAEIAAVIFGFLATAAYAVNTFLAVQKWRVSVRQQSTNDYIRARTESRDVDSRPEIQRLDTFSYSTNVTVRKKSPTNLLSLNHWQLA

SEQ ID NO: 47891 - protein, 150 aa, Homo sapiens
MAAGQNGHEEWVGSAYLFVESSLDKVVLSDAYAHPQQKVAVYRALQAALAALLAQDPSPVPTLPGPPFPSQGRGHRRLKRVGGSVRGLRAARAPLLPEQWESRLVEAEDLRPLALLCPAGRLPRRLVCPGHTPPFLCFEVPLFCQPSFGA

SEQ ID NO: 47892 - protein, 1218 aa, Homo sapiens
MMSLSVRPQRRLLSARVNRSQSFAGVLGSHERGPRSFPVFSPPGPPRKPPALSRVSRMFSVAHPAAKVPQPERLDLVYTALKRGLTAYLEVHQQEQEKLQGQIRESKRNSRLGFLYDLDKQVKSIERFLRRLEFHASKIDELYEAYCVQRRLRDGAYNMVRAYTTGSPGSREARDSLAEATRGHREYTESMCLLESELEAQLGEFHLRMKGLAGFARLCVGDQYEICMKYGRQRWKLRGRIEGSGKQVWDSEETIFLPLLTEFLSIKVTELKGLANHVVVGSVSCETKDLFAALPQVVAVDINDLGTIKLSLEVTWSPFDKDDQPSAASSVNKASTVTKRFSTYSQSPPDTPSLREQAFYNMLRRQEELENGTAWSLSSESSDDSSSPQLSGTARHSPAPRPLVQQPEPLPIQVAFRRPETPSSGPLDEEGAVAPVLANGHAPYSRTLSHISEASVDAALAEASVEAVGPESLAWGPSPPTHPAPTHGEHPSPVPPALDPGHSATSSTLGTTGSVPTSTDPAPSAHLDSVHKSTDSGPSELPGPTHTTTGSTYSAITTTHSAPSPLTHTTTGSTHKPIISTLTTTGPTLNIIGPVQTTTSPTHTMPSPTHTTASPTHTSTSPTHTPTSPTHKTSMSPPTTTSPTPSGMGLVQTATSPTHPTTSPTHPTTSPILINVSPSTSLELATLSSPSKHSDPTLPGTDSLPCSPPVSNSYTQADPMAPRTPHPSPAHSSRKPLTSPAPDPSESTVQSLSPTPSPPTPAPQHSDLCLAMAVQTPVPTAAGGSGDRSLEEALGALMAALDDYRGQFPELQGLEQEVTRLESLLMRQGLTRSRASSLSITVEHALESFSFLNEDEDEDNDVPGDRPPSSPEAGAEDSIDSPSARPLSTGCPALDAALVRHLYHCSRLLLKLGTFGPLRCQEAWALERLLREARVLEAVCEFSRRWEIPASSAQEVVQFSASRPGFLTFWDQCTERLSCFLCPVERVLLTFCNQYGARLSLRQPGLAEAVCVKFLEDALGQKLPRRPQPGPGEQLTVFQFWSFVETLDSPTMEAYVTETAEEVLLVRNLNSDDQAVVLKALRLAPEGRLRRDGLRALSSLLVHGNNKVMAAVSTQLRSLSLGPTFRERALLCFLDQLEDEDVQTRVAGCLALGCIKAPEGIEPLVYLCQTDTEAVREAARQSLQQCGEEGQSAHRRLEESLDALPRIFGPGSMASTAF

SEQ ID NO: 47893 - protein, 605 aa, Homo sapiens
MLHDKDRVFKPMADAAVKIVEKNGFSDKIKVINKHSTEVTVGPEGDMPCRANILVTELFDTELIGEGALPSYEHAHRHLVEENCEAVPHRATVYAQLVESGRMWSWNKLFPIHVQTSLGEQVIVPPVDVESCPGAPSVCDIQLNQVSPADFTVLSDVLPMFSIDFSKQVSSSAACHSRRFEPLTSGRAQVVLSWWDIEMDPEGKIKCTMAPFWAHSDPEEMQWRDHWMQCVYFLPQEEPVVQGSALYLVAHHDDYCVWYSLQRTSPEKNERVRQMRPVCDCQAHLLWNRPRFGEINDQDRTDRYVQALRTVLKPDSVCLCVSDGSLLSVLAHHLGVEQVFTVESSAASHKLLRKIFKANHLEDKINIIEKRPELLTNEDLQGRKVSLLLGEPFFTTSLLPWHNLYFWYVRTAVDQHLGPGAMVMPQAASLHAVVVEFRDLWRIRSPCGDCEGFDVHIMDDMIKRALDFRESREAEPHPLWEYPCRSLSEPWQILTFDFQQPVPLQPLCAEGTVELRRPGQSHAAVLWMEYHLTPECTLSTGLLEPADPEGGCCWNPHCKQAVYFFSPAPDPRALLGGPRTVSYAVEFHPDTGDIIMEFRHADTPD

SEQ ID NO: 47894 - protein, 418 aa, Homo sapiens
MQALLVRPLGKEHTVSRLLRVMQCLSRIEEGENLDCSFDMEAELTPLESAINVLEMIKTEFTLTEAVVESSRKLVKEAAVIICIKNKEFEKASKILKKHMSKDPTTQKLRNDLLNIIREKNLAHPVIQNFSYETFQQKMLRFLESHLDDAEPYLLTMAKKALKSESAASSTGKEDKQPAPGPVEKPPREPARQLRNPPTTIGMMTLKAAFKTLSGAQDSEAAFAKLDQKDLVLPTQALPASPALKNKRPRKDENESSAPADGEGGSELQPKNKRMTISRLVLEEDSQSTEPSAGLNSSQEAASAPPSKPTVLNQPLPGEKNPKVPKGKWNSSNGVEEKETWVEEDELFQVQAAPDEDSTTNITKKQKWTVEESEWVKAGVQKYGEGNWAAISKNYPFVNRTAVMIKDRWRTMKRLGMN

SEQ ID NO: 47895 - protein, 146 aa, Homo sapiens
MATAEASGSDGKGQEVETSVTYYRLEEVAKRNSLKELWLVIHGRVYDVTRFLNEHPGGEEVLLEQAGVDASESFEDVGHSSDAREMLKQYYIGDIHPSDLKPESGSKDPSKNDTCKSCWAYWILPIIGAVLLGFLYRYYTSESKSS

SEQ ID NO: 47896 - protein, 215 aa, Homo sapiens
MKEAAAAALKKKGWEVVESDLYAMNFNPIISRKDITGKLKDPANFQYPAESVLAYKEGHLSPDIVAEQKKLEAADLVIFQSKKAVLSITTGGSGSMYSLQGIHGDMNVILWPIQSGILHFCGFQVLEPQLTYSIGHTPADARIQILEGWKKRLENIWDETPLYFAPSSLFDLNFQAGFLMKKEVQDEEKNKKFGLSVGHHLGKSIPTDNQIKARK

SEQ ID NO: 47897 - protein, 219 aa, Homo sapiens
MKEAAAAALKKKGWEVVESDLYAMNFNPIISRKDITGKLKDPANFQYPAESVLAYKEGHLSPDIVAEQKKLEAADLVIFQFPLQWFGVPAILKGWFERVFIGEFAYTYAAMYDKGPFRSGILHFCGFQVLEPQLTYSIGHTPADARIQILEGWKKRLENIWDETPLYFAPSSLFDLNFQAGFLMKKEVQDEEKNKKFGLSVGHHLGKSIPTDNQIKARK

SEQ ID NO: 47898 - protein, 354 aa, Homo sapiens
MLAEPPQNLIAQSQSGTGKTAAFVLAMLSQVEPANKYPQCLCLSPTYELALQTGKVIEQMGKFYPELKLAYAVRGNKLERGQKISEQIVIGTPGTVLDWCSKLKFIDPKKIKVFVLDEADVMIATQGHQDQSIRIQRMLPRNCQMLLFSATFEDSVWKFAQKVVPDPNVIKLKREEETLDTIKQYYVLCSSRDEKFQALCNLYGAITIAQAMIFCHTRKTASWLAAELSKEGHQVALLSGEMMVEQRAAVIERFREGKEKVLVTTNVCARGIDVEQVSVVINFDLPVDKDGNPDNETYLHRIGRTGRFGKRGLAVNMVDSKHSMNILNRIQEHFNKKIERLDTDDLDEIEKIAN

SEQ ID NO: 47899 - protein, 343 aa, Homo sapiens
MLSRVEPSDRYPQCLCLSPTYELALQTGKVIEQMGKFYPELKLAYAVRGNKLERGQKISEQIVIGTPGTVLDWCSKLKFIDPKKIKVFVLDEADVMIATQGHQDQSIRIQRMLPRNCQMLLFSATFEDSVWKFAQKVVPDPNVIKLKREEETLDTIKQYYVLCSSRDEKFQALCNLYGAITIAQAMIFCHTRKTASWLAAELSKEGHQVALLSGEMMVEQRAAVIERFREGKEKVLVTTNVCARGEQRTCPTWSARLGVPGPIRARNPCIQGSRMVSGRWVGLVTLFLSRRDCLDFPEVVRTHTCQVRWLMPAIPRQENCLNPGDRGCSEPRMCYSTPSWVTE

SEQ ID NO: 47900 - protein, 249 aa, Homo sapiens
MDLPPDVQRWWMMLQPQFKSHNTNEVLEKLFQIVPGENPYRFRDPHQCRRCAVVGNSGNLRGSGYGQDVDGHNFIMRMNQAPTVGFEQDVGSRTTHHFMYPESAKNLPANVSFVLVPFKVLDLLWIASALSTGQIRFTYAPVKSFLRVDKEKVQIYNPAFFKYIHDRWTEHHGRYPSTGMLVLFFALHVCDEVNVYGFGADSRGNWHHYWENNRYAGEFRKTGVHDADFEAHIIDMLAKASKIEVYRGN

SEQ ID NO: 47901 - protein, 283 aa, Homo sapiens
MEILELYCDLLLARFGLIQSMKELDSGLAESVSTLIWAAPRLQSEVAELKIVADQLCAKYSKEYGKLCRTNQIGTVNDRLMHKLSVEAPPKILVERYLIEIAKNYNVPYEPDSVVMAEAPPGVETDLIDVGFTDDVKKGGPGRGGSGGFTAPVGGPDGTVPMPMPMPMPMPSANTPFSYPLPKGPSDFNGLPMGTYQAFPNIHPPQIPATPPSYESVSPGPKPEASAKLPSRPADNYDNFVLPELPSVPDTLPTASAGASTSASEDIDFDDLSRRFEELKKKT

SEQ ID NO: 47902 - protein, 410 aa, Homo sapiens
MNRFKAALEEANGEIEKFSNRSNICRFLTASQDKILFKDVNRKLSDVWKELSLLLQVEQRMPVSPISQGASWAQEDQQDADEDRRAFQMLRRDNEKIEASLRRLEINMKEIKETLRQYLPPKCMQEIPQEQIKEIKKEQLSGSPWILLRENEVSTLYKGEYHRAPVAIKVFKKLQAGSIAIVRQTFNKEIKTMKKFESPNILRIFGICIDETVTPPQFSIVMEYCELGTLRELLDREKDLTLGKRMVLVLGAARGLYRLHHSEAPELHGKIRSSNFLVTQGYQVKLAGFELRKTQTSMSLGTTREKTDRVKSTAYLSPQELEDVFYQYDVKSEIYSFGIVLWEIATGDIPFQGCNSEKIRKLVAVKRQQEPLGEDCPSELREIIDECRAHDPSVRPSVDEILKKLSTFSK

SEQ ID NO: 47903 - protein, 841 aa, Homo sapiens
MTVLEQDTQGLDGWWLCSLHGRQGIVPGNRLKILVGMYDKKPAGPGPGPPATPAQPQPGLHAPAPPASQYTPMLPNTYQPQPDSVYLVPTPSKAQQGLYQVPGPSPQFQSPPAKQTSTFSKQTPHHPFPSPATDLYQVPPGPGGPAQDIYQVPPSAGMGHDIYQVPPSMDTRSWEGTKPPAKVVVPTRVGQGYVYEAAQPEQDEYDIPRHLLAPGPQDIYDVPPVRGLLPSQYGQEVYDTPPMAVKGPNGRDPLLEVYDVPPSVEKGLPPSNHHAVYDVPPSVSKDVPDGPLLREETYDVPPAFAKAKPFDPARTPLVLAAPPPDSPPAEDVYDVPPPAPDLYDVPPGLRRPGPGTLYDVPRERVLPPEVADGGVVDSGVYAVPPPAEREAPAEGKRLSASSTGSTRSSQSASSLEVAGPGREPLELEVAVEALARLQQGVSATVAHLLDLAGSAGATGSWRSPSEPQEPLVQDLQAAVAAVQSAVHELLEFARSAVGNAAHTSDRALHAKLSRQLQKMEDVHQTLVAHGQALDAGRGGSGATLEDLDRLVACSRAVPEDAKQLASFLHGNASLLFRRTKATAPGPEGGGTLHPNPTDKTSSIQSRPLPSPPKFTSQDSPDGQYENSEGGWMEDYDYVHLQGKEEFEKTQKELLEKGSITRQGKSQLELQQLKQFERLEQEVSRPIDHDLANWTPAQPLAPGRTGGLGPSDRQLLLFYLEQCEANLTTLTNAVDAFFTAVATNQPPKIFVAHSKFVILSAHKLVFIGDTLSRQAKAADVRSQVTHYSNLLCDLLRGIVATTKAAALQYPSPSAAQDMVERVKELGHSTQQFRRVLGQLAAA

SEQ ID NO: 47904 - protein, 859 aa, Homo sapiens
MTVLEQDTQGLDGWWLCSLHGRQGIVPGNRLKILVGMYDKKPAGPGPGPPATPAQPQPGLHAPAPPASQYTPMLPNTYQPQPDSVYLVPTPSKAQQGLYQVPGPSPQFQSPPAKQTSTFSKQTPHHPFPSPATDLYQVPPGPGGPAQDIYQVPPSAGMGHDIYQVPPSMDTRSWEGTKPPAKVVVPTRVGQGYVYEAAQPEQDEYDIPRHLLAPGPQDIYDVPPVRGLLPSQYGQEVYDTPPMAVKGPNGRDPLLEVYDVPPSVEKGLPPSNHHAVSKCQGNARARLRLWGVWVYDVPPSVSKDVPDGPLLREETYDVPPAFAKAKPFDPARTPLVLAAPPPDSPPAEDVYDVPPPAPDLYDVPPGLRRPGPGTLYDVPRERVLPPEVADGGVVDSGVYAVPPPAEREAPAEGKRLSASSTGSTRSSQSASSLEVAGPGREPLELEVAVEALARLQQGVSATVAHLLDLAGSAGATGSWRSPSEPQEPLVQDLQAAVAAVQSAVHELLEFARSAVGNAAHTSDRALHAKLSRQLQKMEDVHQTLVAHGQALDAGRGGSGATLEDLDRLVACSRAVPEDAKQLASFLHGNASLLFRRTKATAPGPEGGGTLHPNPTDKTSSIQSRPLPSPPKFTSQDSPDGQYENSEGGWMEDYDYVHLQGKEEFEKTQKELLEKGSITRQGKSQLELQQLKQFERLEQEVSRPIDHDLANWTPAQPLAPGRTGGLGPSDRQLLLFYLEQCEANLTTLTNAVDAFFTAVATNQPPKIFVAHSKFVILSAHKLVFIGDTLSRQAKAADVRSQVTHYSNLLCDLLRGIVATTKAAALQYPSPSAAQDMVERVKELGHSTQQFRRVLGQLAAA

SEQ ID NO: 47905 - protein, 660 aa, Homo sapiens
MVVVPTRVGQGYVYEAAQPEQDEYDIPRHLLAPGPQDIYDVPPVRGLLPSQYGQEVYDTPPMAVKGPNGRDPLLEVYDVPPSVEKGLPPSNHHAVYDVPPSVSKDVPDGPLLREETYDVPPAFAKAKPFDPARTPLVLAAPPPDSPPAEDVYDVPPPAPDLYDVPPGLRRPGPGTLYDVPRERVLPPEVADGGVVDSGVYAVPPPAEREAPAEGKRLSASSTGSTRSSQSASSLEVAGPGREPLELEVAVEALARLQQGVSATVAHLLDLAGSAGATGSWRSPSEPQEPLVQDLQAAVAAVQSAVHELLEFARSAVGNAAHTSDRALHAKLSRQLQKMEDVHQTLVAHGQALDAGRGGSGATLEDLDRLVACSRAVPEDAKQLASFLHGNASLLFRRTKATAPGPEGGGTLHPNPTDKTSSIQSRPLPSPPKFTSQDSPDGQYENSEGGWMEDYDYVHLQGKEEFEKTQKELLEKGSITRQGKSQLELQQLKQFERLEQEVSRPIDHDLANWTPAQPLAPGRTGGLGPSDRQLLLFYLEQCEANLTTLTNAVDAFFTAVATNQPPKIFVAHSKFVILSAHKLVFIGDTLSRQAKAADVRSQVTHYSNLLCDLLRGIVATTKAAALQYPSPSAAQDMVERVKELGHSTQQFRRVLGQLAAA

SEQ ID NO: 47906 - protein, 395 aa, Homo sapiens [sequence omitted]

SEQ ID NO: 47907 - protein, 378 aa, Homo sapiens
MRAVVLAGFGGLNKLRLFRKAMPEPQDGELKIRVKACGLNFIDLMVRQGNIDNPPKTPLVPGFECSGIVEALGDSVKGYEIGDRVMAFVNYNAWAEVVCTPVEFVYKIPDDMSFSEAAAFPMNFVTAYVMLFEVANLREGMSVLVHSAGGGVGQAVAQLCSTVPNVTVFGTASTFKHEAIKDSVTHLFDRNADYVQEVKRISAEGVDIVLDCLCGDNTGKGLSLLKPLGTYILYGSSNMVTGETKSFFSFAKSWWQVEKVNPIKLYEENKVIAGFSLLNLLFKQGRAGLIRGVVEKLIGLYNQKKIKPVVDSLWALEEVKEAMQRIHDRGNIGKLILDVEKTPTPLMANDSTETSEAGEEEEDHEGDSENKERMPFIQ

SEQ ID NO: 47908 - protein, 421 aa, Homo sapiens [sequence omitted]

SEQ ID NO: 47909 - protein, 175 aa, Homo sapiens
MGLGARMLATRVFSLVGKRAISTSVCVRAHESVVKSEDFSLPAYMDRRDHPLPEVAHVKHLSASQKALKEKEKASWSSLSMDEKVELYRIKFKESFAEMNRGSNEWKTVVGGAMFFIGFTALVIMWQKHYVYGPLPQSFDKEWVAKQTKRMLDMKVNPIQGLASKWDYEKNEWKK

SEQ ID NO: 47910 - protein, 363 aa, Homo sapiens
MESQNLADFPRPVHHRIPNFKGSYLACQNIKDLDVFARTQEVKVDPDKPLEGVRLLVLQSKKTLLVPTPRLRTGLFNKITPPPGATKDILRKCATSQGVRNYSVPIGLDSRVLVDLVVVGSVAVSEKGWRIGKGEGYADLEYAMMVSMGAVSKETPVVTIVHDCQVVDIPEELVEEHDITVDYILTPTRVIATGCKRPKPMGITWFKISLEMMEKIPILRSLRAREQQAGKDVTLQGEHQHLPEPGCQQTVPLSVGRRPPDTPGPETNSMEAAPGSPPGEGAPLAADVYVGNLPGDARVSDLKRALRELGSVPLRLTWQGPRRRAFLHYPDSAAAQQAVSCLQGLRLGTDTLRVALARQQRDK

SEQ ID NO: 47911 - protein, 66 aa, Homo sapiens
MSELIKIIRRRLQLNANQAFFLLVNGHSMVSVSTPISEVYESEKDEDGFLYMVYASQETFGMKLSV

SEQ ID NO: 47912 - protein, 3896 aa, Homo sapiens
MELPEAQPRQARDGELKPPSLRGQAPSSTPGKRGSPQTPPGRSPLQAPSRLAGRAEGSPPQRYILGIASSRTKPTLDETPENPQLEAAQLPEVDTPQGPGTGAPLRPGLPRTEAQPAAEELGFHRCFQEPPSSFTSTNYTSPSATPRPPAPGPPQSRGTSPLQPGSYPEYQASGADSWPPAAENSFPGANFGVPPAEPEPIPKGSRPGGSPRGVSFQFPFPALHGASTKPFPADVAGHAFTNGPLVFAFHQPQGAWPEEAVGTGPAYPLPTQPAPSPLPCYQGQPGGLNRHSDLSGALSSPGAAHSAPRPFSDSLHKSLTKILPERPPSAQDGLGSTRGPPSSLPQRHFPGQAYRASGVDTSPGPPDTELAAPGPPPARLPQLWDPTAAPYPTPPGGPLAATRSMFFNGQPSPGQRLCLPQSAPLPWPQVLPTARPSPHGMEMLSRLPFPAGGPEWQGGSQGALGTAGKTPGPREKLPAVRSSQGGSPALFTYNGMTDPGAQPLFFGVAQPQVSPHGTPSLPPPRVVGASPSESPLPSPATNTAGSTCSSLSPMSSSPANPSSEESQLPGPLGPSAFFHPPTHPQETGSPFPSPEPPHSLPTHYQPEPAKAFPFPADGLGAEGAFQCLEETPFPHEGPEVGRGGLQGFPRAPPPYPTHHFSLSSASLDQLDVLLTCRQCDRNYSSLAAFLAHRQFCGLLLARAKDGHQRSPGPPGLPSPPAAPRVPADAHAGLLSHAKTFLLAGDAQAEGKDDPLRTGFLPSLAATPFPLPASDLDMEDDAKLDSLITEALNGMEYQSDNPEIDSSFIDVFADEEPSGPRGPSSGHPLKSKAGVTPESKAPPPLPAATPDPQTPRPGDRGCPARGRPKTRSLGLAPTEADAPSQGRQQRRGKQLKLFRKDLDSGGAAEGSGSGGGGRASGLRPRRNDGLGERPPPRPRRPRTQAPGSRADPAPRVPRAAALPEETRSSRRRRLPPRKDPRKRKARGGAWGKELILKIVQQKNRRHRRLGRRAGRCGSLAAGRPRPGAEDRRLREYDFASESEEDEQPPPRGPGFRGRRGRGEKRKEVELTQGPREDEPQKPRKAARQEAGGDGAPANPEEPGGSRPGPGRSPQARGPSRSLETGAAAREGGPKCADRPSVAPKDPLQVPTNTETSEETRPSLDFPQEAKEPETAEESAPDSTEFTEALRSPPAACAGEMGASPGLLIPEQPPPSRHDTGTPKPSGSLANTAPHGSSPTPGVGSLLGGPGGTQAPVSHNSKDPPARQPGEFLAPVANPSSTACPKPSVLSSKISSFGCDPAGFNRDPLGVPVAKKGPQPYSSPHSELFLGPKDLAGCFLEELHPKPSARDAPPASSSCLCQDGEDAGSLEPQLPRSPPGTAETEPGRAASPPTLESSSLFPDLPVDRFDPPLYGSLSANRDSGLPFACADPPQKTVPSDPPYPSFLLLEEVSPMLPSHFPDLSGGKVLSKTCPPERTVVPGAAPSLPGKGSGCSVALMSHLSEDELEIQKLVTELESQLQRSKDTRGAPRELAEAESVGRVELGTGTEPPSQRRTCQATVPHEDTFSAADLTRVGESTAHREGAESAVATVEAVQGRPGGTWPCPASFHPGHAALLPCAQEDLVSGAPFSPRGANFHFQPVQKAGASKTGLCQAEGDSRPPQDVCLPEPSKQPGPQLDAGSLAKCSPDQELSFPKNKEAASSQESEDSLRLLPCEQRGGFLPEPGTADQPHRGAPAPEAFGSPAVHLAPDLAFQGDGAPPLDATWPFGASPSHAAQGHSAGRAGGHLHPTAGRPGFEGNEFAPAGASSLTAPRGREAWLVPVPSPACVSNTHPSRRSQDPALSPPIRQLQLPGPGVAKSKDGILGLQELTPAAQSPPRVNPSGLEGGTVEGGKVACGPAQGSPGGVQVTTLPAVAGHQLGLEADGHWGLLGQAEKTQGQGTANQLQPENGVSPGGTDNHASVNASPKTALTGPTEGAVLLEKCKGSRAAMSLQEEAEPTPSPPSPNRESLALALTAAHSRSGSEGRTPERASSPGLNKPLLATGDSPAPSVGDLAACAPSPTSAAHMPCSLGPLPREDPLTSPSRAQGGLGGQLPASPSCRDPPGPQQLLACSPAWAPLEEADGVQATTDTGAEDSPVAPPSLTTSPCDPKEALAGCLLQGEGSPLEDPSSWPPGSVSAVTCTHSGDTPKDSTLRIPEDSRKEKLWESPGRATSPPLAGAVSPSVAVRATGLSSTPTGDEAQAGRGLPGPDPQSRGAPPHTNPDRMPRGHSSYSPSNTARLGHREGQAVTAVPTEPPTLQGAGPDSPACLEGEMGTSSKEPEDPGTPETGRSGATKMPRVTCPSTGLGLGRTTAPSSTASDFQSDSPQSHRNASHQTPQGDPLGPQDLKQRSRGYKKKPASTENGQWKGQAPHGPVTCEVCAASFRSGPGLSRHKARKHRPHPGAPAEPSPAALPAQQPLEPLAQKCQPPRKKSHRVSGKERPNHSRGDPSHVTQPPPAQGSKEVLRAPGSPHSQQLHPPSPTEHEVDVKTPASKPRPDQAREDELHPKQAEKREGRRWRREPTVDSPSHSEGKSNKKRGKLRGRRLREESILPVSADVISDGRGSRPSPAMASYAASPSHCLSVEGGPEADGEQPPRLATLGPGVMEGAAETDQEALCAGETGAQKPPGDRMLCPGRMDGAALGEQPTGQKGASARGFWGPRETKALGVCKESGSEPAEDSSRAHSRSEEGVWEENTPPLGPLGFPETSSSPADSTTSSCLQGLPDNPDTQGGVQGPEGPTPDASGSSAKDPPSLFDDEVSFSQLFPPGGRLTRKRNPHVYGKRCEKPVLPLPTQPSFEEGGDPTLGPARLPTDLSDSSSLCLCHEDPWEDEDPAGLPESFLLDGFLNSRVPGIDPWAPGLSLWALEPSREAGAEKLPSHCPEDDRPEAIPELHMVPAAWRGLEMPAPADDSSSSLGDVSPEPPSLERERCDGGLPGNTHLLPLRATDFEVLSTKFEMQDLCFLGPFEDPVGLPGPSFLDFEGTASSQGPQSRRTEEAAGAGRAQGRGRPAKGRRASYKCKVCFQRFRSLGELDLHKLAHTPAPPPTCYMCVERRFGSRELLRGHLQERHAQSKAGPWACGMCLKEVADVWMYNEHLREHAVRFARRGQARRSLGDLPGGLEGSSAVAHLLNSITEPAPKHHRGKRSAGKAAGSPGDPWGQEGEAKKDSPGERAKPRARSTPSNPDGAATPDSASATALADAGSPGPPRTTPSPSPDPWAGGEPLLQATPVHEACKDPSRDCHHCGKRFPKPFKLQRHLAVHSPQRVYLCPRCPRVYPEHGELLAHLGGAHGLLERPELQHTPLYACELCATVMRIIKKSFACSSCNYTFAKKEQFDRHMNKHLRGGRQPFAFRGVRRPGAPGQKARALEGTLPSKRRRVAMPGSAPGPGEDRPPPRGSSPILSEGSLPALLHLCSEVAPSTTKGWPETLERPVDPVTHPIRGCELPSNHQECPPPSLSPFPAALADGRGDCALDGALERPENEASPGSPGPLLQQALPLGASLPRPGARGQDAEGKRAPLVFSGKRRAPGARGRCAPDHFQEDHLLQKEKEVSSSHMVSEGGPRGAFHKGSATKPAGCQSSSKDRSAASTPSKALKFPVHPRKAVGSLAPGELARGTENGMKPATPKAKPGPSSQGSGSPRPGTKTGGGSQPQPASGQLQSETATTPAKPSFPSRSPAPERLPARAQAKSCTKGPREAGEQGPHGSLGPKEKGESSTKRKKGQVPGPARSESVGSFGRAPSAPDKPPRTPRKQATPSRVLPTKPKPNSQNKPRPPPSEQRKAEPGHTQRKDRLGKAFPQGRPLLRPPKRGTAVHGAEPAEPHTHRTAEAQSDLLSQLFGQRLTGFKIPLKKDASE

SEQ ID NO: 47913 - protein, 188 aa, Homo sapiens
MWANEQALASGLILITGGIVATAGRFTQWYFGAYSIVAGVFVCLLEYPRGKRKKGSTMERWGQKYMTAVVKLFGPFTRNYYVRAVLHLLLSVPAGFLLATILGTACLAIASGIYLLAAVRGEQWTPIEPKPRERPQIGGTIKQPPSNPPPRPPAEARKKPSEEEAAVAAGGPPGGPQVNPIPVTDEVV

SEQ ID NO: 47914 - protein, 71 aa, Homo sapiens
MKDLPSLDPLPPYILAEAQLRTQRYWGPHCRGAWVRGLGAGAHCSFLSRAWGLQEIRDCLIEDSDDEAGQS

SEQ ID NO: 47915 - protein, 659 aa, Homo sapiens
MLENYENLASVEWRLKTKGPALRQDRSWFRASNETQTARSHNGGQLCDRTQCGEAFSEHSGLSTHVRTQNTGDSCVSNHYERDFFIPCQKTLFKIGEQFSVLGQCGKAFSSTPNVVSQQACTRDRSLDYSSCGEVFLNQSYLQARAGSHNGEETWKWKPCGKALTHSMGCATPVEMHAVRNPHVCRECGKAFRYTAYLTGRVQVHPGEKPCELEECGKASPVSSSLTQHVRIHAAEKPCECKECGKAFTGLSGLSKHVQTDPGQKPYECKDCGKACGGFYLLNEHGKTHTREKPFACVVCGKYFRNSSCLNNHVRIHTGIKPYTCSYCGKAFTVRCGLTRHVRTHTGEKPYTCKDCGKAFCTSSGLTEHVRTHTGEKPYECKDCGKSFTVSSSLTEHARIHTGEKPYECKQCGKAFTGRSGLTKHMRTHTGEKPYECKDCGKAYNRVYLLNEHVKTHTEEKPFICTVCRKSFRNSSCLNKHIQIHTGIKPYECKDCGKTFTVSSSLTEHIRTHTGEKPYECKVCGKAFTTSSHLIVHIRTHTGEKPYICKECGKAFASSSHLIEHRRTHTGEKPYICNECGKAFRASSHLHKHGRIHTGQKPYKCKECGKAYNRFYLLKEHLKTYTEEQVFVCKDCGKSFKNSSCLNHHTQIHTDEKPF

SEQ ID NO: 47916 - protein, 615 aa, Homo sapiens
MKLANGAIELDTGNRPREAYTEYLRSIHYISQVLLEEVETTKEAGETVPPDTSKMLKLAQQCLERAQSTAAKLGKTRLKPTMPAAAPIPQPAGRHRRVYSDEGGKLSPFLPPEIFQKLQGAESQSCKKELTPLEEASLQNQKLKAAYEARMARLDPSQAMQKTSLTLSLQRQMMENLVIAKAREETLQRKMEERRLRLQEAANRRFCSQVALTPEEREQRALYAAILEYEQDHDWPKHWKAKLKRNPGDLSLVTSLVSHLLSLPDHPIAQLLRRLQCSVYSALYPAVSRAAAPAPGCCPPTPNPGSRRLRPSQSLHCMLSPPEPSAAPRPQDSPPTPPLQPGPVGSPSPLGDTASGLPDKDSSFEDLEQFLGTSERQGRGRGVQPEPQLQQLKTAVEEIHNAVDRLLSLTLLAFEGLNTAASKDRCLACIEEPFFSPLWPLLLALYRSVHRAREAALSRSMELYRNAPPTAIGIPTKLLPQNPEAKGATGYPYCAAAQELGLLVLESCPQKKLECIVRTLRIICVCAEDYCPTPEATPQAGPPPIAAAAIGADDLLPILSFVVLRSGLPQLVSECAALEEFIHEGYLIGEEGYCLTSLQSALSYVELLPRGGLAK

SEQ ID NO: 47917 - protein, 378 aa, Homo sapiens
MGYKDNDGEEEEREGGAAGPRGSRLPPITGGASELAKRKVKKKKRKKKTKGSGKGDDKHQSQSLKSQPLSSSFHDILSPCKERGPKPEHRQSKVEKKHLPSDSSTVSLPDFAEIENLANRINESLRWDGILADPEAEKERIRIYKLNRRKRYRCLALKGFHPDPEALKGFHPDPDALKGFHPDPEALKGFHPDPEALKGIHPDPEALKGFHPDPEALKGFHPDPEALKGFHTDPEALKGFHIDPEALKGFHPDPKALKGFHPDPKALKGFHTDPEALKGFHPDPKALKGFHPDPEALKGFHPDPEALKGFHPDPEALKGFHTDPNAEEAPENLPYLSDKDGSSSHRQPTSKAECPNLCFEGNLTPKLLHSDLAPTLLE

SEQ ID NO: 47918 - protein, 270 aa, Homo sapiens [sequence omitted]

SEQ ID NO: 47919 - protein, 275 aa, Homo sapiens
MIPCFLKSPLGSDYTRITEDSFSKPYDGKWSKTMVGFGPEDDHFVAELTYNYGVGDYKLGNDFMGITLASSQAVSNARKLEWPLTEVAEGVFETEAPGGYKFYLQNRSLPQSDPVLKVTLAVSDLQKSLNYWCNLLGMKIYEKDEEKQRALLGYADNQCKLELQGVKGGVDHAAAFGRIAFSCPQKELPDLEDLMKRENQKILTPLVSLDTPGKATVQVVILADPDGHEICFVGDEAFRELSKMDPEGSKLLDDAMAADKSDEWFAKHNKPKASG

SEQ ID NO: 47920 - protein, 223 aa, Homo sapiens
MDVELTVEERNLLSVAYKNVIGARRASWRIISSIEQKEENKGGEDKLKMIREYRQMVETELKLICCDILDVLDKHLIPAANTGESKVFYYKMKGDYHRYLAEFATGNDRKEAAENSLVAYKAASDIAMTELPPTHPIRLGLALNFSVFYYEILNSPDRACRLAKAAFDDAIAELDTLSEESYKDSTLIMQLLRDNLTLWTSDMQGDGEEQNKEALQDVEDENQ

SEQ ID NO: 47921 - protein, 2311 aa, Homo sapiens
MSEEKLQEKARKWQQLQAKRYAEKRKFGFVDAQKEDMPPEHVRKIIRDHGDMTNRKFRHDKRVYLGALKYMPHAVLKLLENMPMPWEQIRDVPVLYHITGAISFVNEIPWVIEPVYISQWGSMWIMMRREKRDRRHFKRMRFPPFDDEEPPLDYADNILDVEPLEAIQLELDPEEDAPVLDWFYDHQPLRDSRKYVNGSTYQRWQFTLPMMSTLYRLANQLLTDLVDDNYFYLFDLKAFFTSKALNMAIPGGPKFEPLVRDINLQDEDWNEFNDINKIIIRQPIRTEYKIAFPYLYNNLPHHVHLTWYHTPNVVFIKTEDPDLPAFYFDPLINPISHRHSVKSQEPLPDDDEEFELPEFVEPFLKDTPLYTDNTANGIALLWAPRPFNLRSGRTRRALDIPLVKNWYREHCPAGQPVKVRVSYQKLLKYYVLNALKHRPPKAQKKRYLFRSFKATKFFQSTKLDWVEVGLQVCRQGYNMLNLLIHRKNLNYLHLDYNFNLKPVKTLTTKERKKSRFGNAFHLCREVLRLTKLVVDSHVQYRLGNVDAFQLADGLQYIFAHVGQLTGMYRYKYKLMRQIRMCKDLKHLIYYRFNTGPVGKGPGCGFWAAGWRVWLFFMRGITPLLERWLGNLLARQFEGRHSKGVAKTVTKQRVESHFDLELRAAVMHDILDMMPEGIKQNKARTILQHLSEAWRCWKANIPWKVPGLPTPIENMILRYVKAKADWWTNTAHYNRERIRRGATVDKTVCKKNLGRLTRLYLKAEQERQHNYLKDGPYITAEEAVAVYTTTVHWLESRRFSPIPFPPLSYKHDTKLLILALERLKEAYSVKSRLNQSQREELGLIEQAYDNPHEALSRIKRHLLTQRAFKEVGIEFMDLYSHLVPVYDVEPLEKITDAYLDQYLWYEADKRRLFPPWIKPADTEPPPLLVYKWCQGINNLQDVWETSEGECNVMLESRFEKMYEKIDLTLLNRLLRLIVDHNIADYMTAKNNVVINYKDMNHTNSYGIIRGLQFASFIVQYYGLVMDLLVLGLHRASEMAGPPQMPNDFLSFQDIATEAAHPIRLFCRYIDRIHIFFRFTADEARDLIQRYLTEHPDPNNENIVGYNNKKCWPRDARMRLMKHDVNLGRAVFWDIKNRLPRSVTTVQWENSFVSVYSKDNPNLLFNMCGFECRILPKCRTSYEEFTHKDGVWNLQNEVTKERTAQCFLRVDDESMQRFHNRVRQILMASGSTTFTKIVNKWNTALIGLMTYFREAVVNTQELLDLLVKCENKIQTRIKIGLNSKMPSRFPPVVFYTPKELGGLGMLSMGHVLIPQSDLRWSKQTDVGITHFRSGMSHEEDQLIPNLYRYIQPWESEFIDSQRVWAEYALKRQEAIAQNRRLTLEDLEDSWDRGIPRINTLFQKDRHTLAYDKGWRVRTDFKQYQVLKQNPFWWTHQRHDGKLWNLNNYRTDMIQALGGVEGILEHTLFKGTYFPTWEGLFWEKASGFEESMKWKKLTNAQRSGLNQIPNRRFTLWWSPTINRANVYVGFQVQLDLTGIFMHGKIPTLKISLIQIFRAHLWQKIHESIVMDLCQVFDQELDALEIETVQKETIHPRKSYKMNSSCADILLFASYKWNVSRPSLLADSKDVMDSTTTQKYWIDIQLRWGDYDSHDIERYARAKFLDYTTDNMSIYPSPTGVLIAIDLAYNLHSAYGNWFPGSKPLIQQAMAKIMKANPALYVLRERIRKGLQLYSSEPTEPYLSSQNYGELFSNQIIWFVDDTNVYRVTIHKTFEGNLTTKPINGAIFIFNPRTGQLFLKIIHTSVWAGQKRLGQLAKWKTAEEVAALIRSLPVEEQPKQIIVTRKGMLDPLEVHLLDFPNIVIKGSELQLPFQACLKVEKFGDLILKATEPQMVLFNLYDDWLKTISSYTAFSRLILILRALHVNNDRAKVILKPDKTTITEPHHIWPTLTDEEWIKVEVQLKDLILADYGKKNNVNVASLTQSEIRDIILGMEISAPSQQRQQIAEIEKQTKEQSQLTATQTRTVNKHGDEIITSTTSNYETQTFSSKTEWRVRAISAANLHLRTNHIYVSSDDIKETGYTYILPKNVLKKFICISDLRAQIAGYLYGVSPPDNPQVKEIRCIVMVPQWGTHQTVHLPGQLPQHEYLKEMEPLGWIHTQPNESPQLSPQDVTTHAKIMADNPSWDGEKTIIITCSFTPGSCTLTAYKLTPSGYEWGRQNTDKGNNPKGYLPSHYERVQMLLSDRFLGFFMVPAQSSWNYNFMGVRHDPNMKYELQLANPKEFYHEVHRPSHFLNFALLQEGEVYSADREDLYA

SEQ ID NO: 47922 - protein, 1915 aa, Homo sapiens
MQELLRSVERDLSIDPRQLAPAPGGTHVVALVPARWLASLRDRRLPLGPCPRAEGLGEAEVRTLLQRSVQRLPAGWTRVEVHGLRKRRLSYPLGGGLPFEDGSCGPETLTRFMQEVAAQNYRNLWRHAYHTYGQPYSHSPAPSAVPALDSVRQALQRVYGCSFLPVGETTQCPSYAREGPCPPRGSPACPSLLRAEALLESPEMLYVVHPYVQFSLHDVVTFSPAKLTNSQAKVLFILFRVLRAMDACHRQGLACGALSLYHIAVDEKLCSELRLDLSAYERPEEDENEEAPVARDEAGIVSQEEQGGQPGQPTGQEELRSLVLDWVHGRISNFHYLMQLNRLAGRRQGDPNYHPVLPWVVDFTTPHGRFRDLRKSKFRLNKGDKQLDFTYEMTRQAFVAGGAGGGEPPHVPHHISDVLSDITYYVYKARRTPRSVLCGHVRAQWEPHEYPASMERMQNWTPDECIPEFYTDPSIFRSIHPDMPDLDVPAWCSSSQEFVAAHRALLESREVSRDLHHWIDLTFGYKLQGKEAVKEKNVCLHLVDAHTHLASYGVVQLFDQPHPQRLAGAPALAPEPPLIPKLLVQTIQETTGREDFTENPGQLPNGVGRPVLEATPCEASWTRDRPVAGEDDLEQATEALDSISLAGKAGDQLGSSSQASPGLLSFSVASASRPGRRNKAAGADPGEGEEGRILLPEGFNPMQALEELEKTGNFLAKGLGGLLEVPEQPRVQPAVPLQCLLHRDMQALGVLLAEMVFATRVRTLQPDAPLWVRFQAVRGLCTRHPKEVPVSLQPVLDTLLQMSGPEVPMGAERGKLDQLFEYRPVSQGLPPPCPSQLLSPFSSVVPFPPYFPALHRFILLYQARRVEDEAQGRELVFALWQQLGAVLKDITPEGLEILLPFVLSLMSEEHTAVYTAWYLFEPVAKALGPKNANKYLLKPLIGAYESPCQLHGRFYLYTDCFVAQLMVRLGLQAFLTHLLPHVLQVLAGAEASQEESKDLAGAAEEEESGLPGAGPGSCAFGEEIPMDGEPPASSGLGLPDYTSGVSFHDQADLPETEDFQAGLYVTESPQPQEAEAVSLGRLSDKSSTSETSLGEERAPDEGGAPVDKSSLRSGDSSQDLKQSEGSEEEEEEEDSCVVLEEEEGEQEEVTGASELTLSDTVLSMETVVAGGSGGDGEEEEEALPEQSEGKEQKILLDTACKMVRWLSAKLGPTVASRHVARNLLRLLTSCYVGPTRQQFTVSSGESPPLSAGNIYQKRPVLGDIVSGPVLSCLLHIARLYGEPVLTYQYLPYISYLVAPGSASGPSRLNSRKEAGLLAAVTLTQKIIVYLSDTTLMDILPRISHEVLLPVLSFLTSLVTGFPSGAQARTILCVKTISLIALICLRIGQEMVQQHLSEPVATFFQVFSQLHELRQQDLKLDPAGRGEGQLPQVVFSDGQQRPVDPALLDELQKVFTLEMAYTIYVPFSCLLGDIIRKIIPNHELVGELAALYLESISPSSRNPASVEPTMPGTGPEWDPHGGGCPQDDGHSGTFGSVLVGNRIQIPNDSRPENPGPLGPISGVGGGGLGSGSDDNALKQELPRSVHGLSGNWLAYWQYEIGVSQQDAHFHFHQIRLQSFPGHSGAVKCVAPLSSEDFFLSGSKDRTVRLWPLYNYGDGTSETAPRLVYTQHRKSVFFVGQLEAPQHVVSCDGAVHVWDPFTGKTLRTVEPLDSRVPLTAVAVMPAPHTSITMASSDSTLRFVDCRKPGLQHEFRLGGGLNPGLVRALAISPSGRSVVAGFSSGFMVLLDTRTGLVLRGWPAHEGDILQIKAVEGSVLVSSSSDHSLTVWKELEQKPTHHYKSASDPIHTFDLYGSEVVTGTVSNKIGVCSLLEPPSQATTKLSSENFRGTLTSLALLPTKRHLLLGSDNGVIRLLA

SEQ ID NO: 47923 - protein, 210 aa, Homo sapiens
MAALVVSGAAEQGGRDGPGRGRAPRGRVANQIPPEILKNPQLQAAIRVLPSNYNFEIPKTIWRIQQAQAKKVALQMPEGLLLFACTIVDILESSHGHLGPRLPGAVRLCGHPDRHYTPPGLSPPHLSPSHCPCPGQHHSVCVDLAGSRPGAESRVSCECPTVQAPVPWRDPGLHIPPTVQRGGGRCVSWRWPLPSGVCHDCQPQCPRLPV

SEQ ID NO: 47924 - protein, 1200 aa, Homo sapiens [sequence omitted]

SEQ ID NO: 47925 - protein, 349 aa, Homo sapiens
MKLANRFQLQLLRERCEKGVMSLVNVRNCIRFYQTAEELNASTLMNYCAEIIASHWDDLRKEDFSSMSAQLLYKMIKSKTEYPLHKAIKVEREDVVFLYLIEMDSQLPGKLNEADHNGDLALDLALSRRLESIATTLVSHKADVDMVDKSGWSLLHKGIQRGDLFAATFLIKNGAFVNAATLGAQETPLHLVALYSSKKHSADVMSEMAQIAEALLQAGANPNMQDSKGRTPLHVSIMAGNEYVFSQLLQCKQLDLELKDHEGSTALWLAVQHITVSSDQSVNPFEDVPVVNGTSFDENSFAARLIQRGSHTDAPDTATGKARASRRGDAGVCRRQEMACKCLHPKFRN

SEQ ID NO: 47926 - protein, 1263 aa, Homo sapiens
MKYALKRLITGLGVGRETARPCYSLALAQLLQSFEDLPLCSILQQIQEKYDLHQVKKAMLRPALFANLFGVLALFQSGRLVKDQEALMKSVKLLQALAQYQNHLQEQPRKALVDILSEVSKATLQEILPEVLKADLNIILSSPEQLELFLLAQQKVPSKLKKLVGSVNLFSDENVPRLVNVLKMAASSVKKDRKLPAIALDLLRLALKEDKFPRFWKEVVEQGLLKMQFWPASYLCFRLLGAALPLLTKEQLHLVMQGDVIRHYGEHVCTAKLPKQFKFAPEMDDYVGTFLEGCQDDPERQLAVLVAFSSVTNQGLPVTPTFWRVVRFLSPPALQGYVAWLRAMFLQPDLDSLVDFSTNNQKKAQDSSLHMPERAVFRLRKWIIFRLVSIVDSLHLEMEEALTEQVARFCLFHSFFVTKKPTSQIPETKHPFSFPLENQAREAVSSAFFSLLQTLSTQFKQAPGQTQGGQPWTYHLVQFADLLLNHSHNVTTVTPFTAQQRQAWDRMLQTLKELEAHSAEARAAAFQHLLLLVGIHLLKSPAESCDLLGDIQTCIRKSLGEKPRRSRTKTIDPQEPPWVEVLVEILLALLAQPSHLMRQVARSVFGHICSHLTPRALQLILDVLNPETSEDENDRVVVTDDSDERRLKGAEDKSEEGEDNRSSESEEESEGEESEEEERDGDVDQGFREQLMTVLQAGKALGGEDSENEEELGDEAMMALDQSLASLFAEQKLRIQARRDEKNKLQKEKALRRDFQIRVLDLVEVLVTKQPENALVLELLEPLLSIIRRSLRSSSSKQEQDLLHKTARIFTHHLCRARRYCHDLGERAGALHAQVERLVQQAGRQPDSPTALYHFNASLYLLRVLKGNTAEGCVHETQEKQKAGTDPSHMPTGPQAASCLDLNLVTRVYSTALSSFLTKRNSPLTVPMFLSLFSRHPVLCQSLLPILVQHITGPVRPRHQACLLLQKTLSMREVRSCFEDPEWKQLMGQVLAKVTENLRVLGEAQTKAQHQQALSSLELLNVLFRTCKHEKLTLDLTVLLGVLQGQQQSLQQGAHSTGSSRLHDLYWQAMKTLGVQRPKLEKKDAKEIPSATQSPISKKRKKKGFLPETKKRKKRKSEDGTPAEDGTPAATGGSQPPSMGRKKRNRTKAKVPAQANGTPTTKSPAPGAPTRSPSTPAKSPKLQKKNQKPSQVNGAPGSPTEPAGQKQHQKALPKKGVLGKSPLSALARKKARLSLVIRSPSLLQSGAKKKAQTLRFTISSSKK

SEQ ID NO: 47927 - protein, 1259 aa, Homo sapiens
MKYALKRLITGLGVGRETARPCYSLALAQLLQSFEDLPLCSILQQIQEKYDLHQVKKAMLRPALFANLFGVLALFQSGRLVKDQEALMKSVKLLQALAQYQNHLQEQPRKALVDILSEVSKATLQEILPEVLKADLNIILSSPEQLELFLLAQQKVPSKLKKLVGSVNLFSDENVPRLVNVLKMAASSVKKDRKLPAIALDLLRLALKEDKFPRFWKEVVEQGLLKMQFWPASYLCFRLLGAALPLLTKEQLHLVMQGDVIRHYGEHVCTAKLPKQFKFAPEMDDYVGTFLEGCQDDPERQLAVLVAFSSVTNQGLPVTPTFWRVVRFLSPPALQGYVAWLRAMFLQPDLDSLVDFSTNNQKKAQDSSLHMPERAVFRLRKWIIFRLVSIVDSLHLEMEEALTEQVARFCLFHSFFVTKKPTSQIPETKHPFSFPLENQAREAVSSAFFSLLQTLSTQFKQAPGQTQGGQPWTYHLVQFADLLLNHSHNVTTVTPFTAQQRQAWDRMLQTLKELEAHSAEARAAAFQHLLLLVGIHLLKSPAESCDLLGDIQTCIRKSLGEKPRRSRTKTIDPQEPPWVEVLVEILLALLAQPSHLMRQVARSVFGHICSHLTPRALQLILDVLNPETSEDENDRVVVTDDSDERRLKGAEDKSEEGEDNRSSESEEESEGEESEEEERDGDVDQGFREQLMTVLQAGKALGGEDSENEEELGDEAMMALDQSLASLFAEQKLRIQARRDEKNKLQKEKALRRDFQIRVLDLVEVLVTKQPENALVLELLEPLLSIIRRSLRSSSSKQEQDLLHKTARIFTHHLCRARRYCHDLGERAGALHAQVERLVQQAGRQPDSPTALYHFNASLYLLRVLKGNTAEGCVHETQEKQKAGTDPSHMPTGPQAASCLDLNLVTRVYSTALSSFLTKRNSPLTVPMFLSLFSRHPVLCQSLLPILVQHITGPVRPRHQACLLLQKTLSMREVRSCFEDPEWKQLMGQVLAKVTENLRVLGEAQTKAQHQQALSSLELLNVLFRTCKHEKLTLDLTVLLGVLQGQQQSLQQGAHSTGSSRLHDLYWQAMKTLGVQRPKLEKKDAKEIPSATQSPISKKRKKKGFLPETKKRKKRKSEDGTPAEDGTPAATGGSQPPSMGRKKRNRTKAKVPAQANGTPTTKSPAPGAPTRSPSTPAKSPKLQKKNQKPSQVNGAPGSPTEPAGQKQHQKALPKKGVLGKSPLSALARKKARLSLVIRSPSLLQSGAKKKAQVRKAGKP

SEQ ID NO: 47928 - protein, 901 aa, Homo sapiens
MESDEVDTLKEGEDPADRMHPFLAIYELQSLKVHPLVFAPGVPVTAQVVGTERYTSGSKVGTCTLYSVRLTHGDFSWTTKKKYRHFQELHRDLLRHKVLMSLLPLARFAVAYSPARDAGNREMPSLPRAGPEGSTRHAASKQKYLENYLNRLLTMSFYRNYHAMTEFLEVSQLSFIPDLGRKGLEGMIRKRSGGHRVPGLTCCGRDQVCYRWSKRWLVVKDSFLLYMCLETGAISFVQLFDPGFEVQVGKRSTEARHGVRIDTSHRSLILKCSSYRQARWWAQEITELAQGPGRDFLQLHRHDSYAPPRPGTLARWFVNGAGYFAAVADAILRAQEEIFITDWWLSPEVYLKRPAHSDDWRLDIMLKRKAEEGVRVSILLFKEVELALGINSGYSKRALMLLHPNIKVMRHPDQVTLWAHHEKLLVVDQVVAFLGGLDLAYGRWDDLHYRLTDLGDSSESAASQPPTPRPDSPATPDLSHNQFFWLGKDYSNLITKDWVQLDRPFEDFIDRETTPRMPWRDVGVVVHGLPARDLARHFIQRWNFTKTTKAKYKTPTYPYLLPKSTSTANQLPFTLPGGQCTTVQVLRSVDRWSAGTLENSILNAYLHTIRESQHFLYIENQFFISCSDGRTVLNKVGDEIVDRILKAHKQGWCYRVYVLLPLLPGFEGDISTGGGNSIQAILHFTYRTLCRGEYSILHRLKAAMGTAWRDYISICGLRTHGELGGHPVSELIYIHSKVLIADDRTVIIGSANINDRSLLGKRDSELAVLIEDTETEPSLMNGAEYQAGSVILGANTRPDLDLRDPICDDFFQLWQDMAESNANIYEQIFRCLPSNATRSLRTLREYVAVEPLATVSPPLARSELTQVQGHLVHFPLKFLEDESLLPPLGSKEGMIPLEVWT

SEQ ID NO: 47929 - protein, 266 aa, Homo sapiens [sequence omitted]

SEQ ID NO: 47930 - protein, 236 aa, Homo sapiens
MQKSSLEFHKANECQERPVECKFCKLDMQLSKLELHESYCGSRTELCQGCGQFIMHRMLAQHRDVCRSEQAQLGKGERISAPEREIYCHYCNQMIPENKYFHHMGKCCPDSEFKKHFPVGNPEILPSSLPSQAAENQTSTMEKDVRPKTRSINRFPLHSESSSKKAPRSKNKTLDPLLMSEPKPRTSSPRGDKAAYDILRRCSQCGILLPLPILNQHQEKCRWLASSKGKQVRNFS

SEQ ID NO: 47931 - protein, 236 aa, Homo sapiens
MQKSSLEFHKANECQERPVECKFCKLDMQLSKLELHESYCGSRTELCQGCGQFIMHRMLAQHRDVCRSEQAQLGKGERISAPEREIYCHYCNQMIPENKYFHHMGKCCPDSEFKKHFPVGNPEILPSSLPSQAAENQTSTMEKDVRPKTRSINRFPLHSESSSKKAPRSKNKTLDPLLMSEPKPRTSSPRGDKAAYDILRRCSQCGILLPLPILNQHQVLSLCSLLTFLGTIRTVS

SEQ ID NO: 47932 - protein, 650 aa, Homo sapiens [sequence omitted]

SEQ ID NO: 47933 - protein, 236 aa, Homo sapiens
MLDSLLALGGLVLLRDSVEWEGRSLLKALVKKSALCGEQVHILGCEVSEEEFREGFDSDINNRLVYHDFFRDPLNWSKTEEAFPGGPLGALRAMCKRTDPVPVTIALDSLSWLLLRLPCTTLCQVLHAVSHQDSCPGDSSSVGKVSVLGLLHEELHGPGPVGALSSLAQTEVTLGGTMGQASAHILCRRPRQRPTDQTQWFSILPDFSLDLQEGPSVESQPYSDPHIPPTAGSPAA

SEQ ID NO: 47934 - protein, 175 aa, Homo sapiens
MFGPQVLTTRHYVGSAAAFAGTPEHGQFQGSPGGAYGTAQPPPHYGPTQPAYSPSQQLRAPSAFPAVQYLSQPQPQPYAVHGHFQPTQTGFLQPGGALSLQKQMEHANQQTGFSDSSSLRPMHPQALHPAPGLLASPQLPVQMQPAGKSGFAATSQPGPRLPFIQHSQNPRFYHK

SEQ ID NO: 47935 - protein, 63 aa, Homo sapiens
MEHANQQTGFSDSALHPAPGLLASPQLPVQMQPAGKSGFAATSQPGPRLPFIQHSQNPRFYHK

SEQ ID NO: 47936 - protein, 92 aa, Homo sapiens [sequence omitted]

SEQ ID NO: 47937 - protein, 29 aa, Homo sapiens
MASVRIREAKEGDCGDILRLIRVKTAGRS

SEQ ID NO: 47938 - protein, 449 aa, Homo sapiens
MEEPQSDPSVEPPLSQETFSDLWKLLPENNVLSPLPSQAMDDLMLSPDDIEQWFTEDPGPDEAPRMPEAAPPVAPAPAAPTPAAPAPAPSWPLSSSVPSQKTYQGSYGFRLGFLHSGTAKSVTCTYSPALNKMFCQLAKTCPVQLWVDSTPPPGTRVRAMAIYKQSQHMTEVVRRCPHHERCSDSDGLAPPQHLIRVEGNLRVEYLDDRNTFRHSVVVPYEPPEVGSDCTTIHYNYMCNSSCMGGMNRRPILTIITLEDSSGNLLGRNSFEVRVCACPGRDRRTEEENLRKKGEPHHELPPGSTKRALPNNTSSSPQPKKKPLDGEYFTLQIRGRERFEMFRELNEALELKDAQAGKEPGGSRAHSRECQTLSPGDPDPPLSETFNLNICPYPAGKLELLKLSPCPCLCRQVTLMSFLFFFLIFFYFRLYWGIIDPPKLHTFKVCSVMI

SEQ ID NO: 47939 - protein, 1274 aa, Homo sapiens
MDSSVSPAATTACVPYAPSRPPGLPGTTTSSSSSSSSNTGLRGVEPNPGIPGADHYQTPALEVSHHGRLGPSAHSSRKPFLGAPAATPHLSLPPGPSSPPPPPCPRLLRPPPPPAWLKGPACRAAREDGEILEELFFGTEGPPRPAPPPLPHREGFLGPPASRFSVGTQDSHTPPTPPTPTTSSSNSNSGSHSSSPAGPVSFPPPPYLARSIDPLPRPPSPAQNPQDPPLVPLTLALPPAPPSSCHQNTSGSFRRPESPRPRVSFPKTPEVGPGPPPGPLSKAPQPVPPGVGELPARGPRLFDFPPTPLEDQFEEPAEFKILPDGLANIMKMLDESIRKEEEQQQHEAGVAPQPPLKEPFASLQSPFPTDTAPTTTAPAVAVTTTTTTTTTTTATQEEEKKPPPALPPPPPLAKFPPPSQPQPPPPPPPSPASLLKSLASVLEGQKYCYRGTGAAVSTRPGPLPTTQYSPGPPSGATALPPTSAAPSAQGSPQPSASSSSQFSTSGGPWARERRAGEEPVPGPMTPTQPPPPLSLPPARSESEVLEEISRACETLVERVGRSATDPADPVDTAEPADSGTERLLPPAQAKEEAGGVAAVSGSCKRRQKEHQKEHRRHRRACKDSVGRRPREGRAKAKAKVPKEKSRRVLGNLDLQSEEIQGREKSRPDLGGASKAKPPTAPAPPSAPAPSAQPTPPSASVPGKKAREEAPGPPGVSRADMLKLRSLSEGPPKELKIRLIKVESGDKETFIASEVEERRLRMADLTISHCAADVVRASRNAKVKGKFRESYLSPAQSVKPKINTEEKLPREKLNPPTPSIYLESKRDAFSPVLLQFCTDPRNPITVIRGLAGSLRLNLGLFSTKTLVEASGEHTVEVRTQVQQPSDENWDLTGTRQIWPCESSRSHTTIAKYAQYQASSFQESLQEEKESEDEESEEPDSTTGTPPSSAPDPKNHHIIKFGTNIDLSDAKRWKPQLQELLKLPAFMRVTSTGNMLSHVGHTILGMNTVQLYMKVPGSRTPGHQENNNFCSVNINIGPGDCEWFAVHEHYWETISAFCDRHGVDYLTGSWWPILDDLYASNIPVYRFVQRPGDLVWINAGTVHWVQATGWCNNIAWNVGPLTAYQYQLALERYEWNEVKNVKSIVPMIHVSWNVARTVKISDPDLFKMIKFCLLQSMKHCQVQRESLVRAGKKIAYQGRVKDEPAYYCNECDVEVFNILFVTSENGSRNTYLVHCEGCARRRSAGLQGVVVLEQYRTEELAQAYDAFTLAPASTSR

SEQ ID NO: 47940 - protein, 1832 aa, Homo sapiens
MRPLIAKKNPKIPMSKMMTILGAKWREFSANNPFKGSAAAVAAAAAAAAAAVAEQVSAAVSSATPIAPSGPPALPPPPAADIQPPPIRRAKTKEGKGPGHKRRSKSPRVPDGRKKLRGKKMAPLKIKLGLLGGKRKKGGSYVFQSDEGPEPEAEESDLDSGSVHSASGRPDGPVRTKKLKRGRPGRKKKKVLGCPAVAGEEEVDGYETDHQDYCEVCQQGGEIILCDTCPRAYHLVCLDPELDRAPEGKWSCPHCEKEGVQWEAKEEEEEYEEEGEEEGEKEEEDDHMEYCRVCKDGGELLCCDACISSYHIHCLNPPLPDIPNGEWLCPRCTCPVLKGRVQKILHWRWGEPPVAVPAPQQADGNPDVPPPRPLQGRSEREFFVKWVGLSYWHCSWAKELQLEIFHLVMYRNYQRKNDMDEPPPLDYGSGEDDGKSDKRKVKDPHYAEMEEKYYRFGIKPEWMTVHRIINHSVDKKGNYHYLVKWRDLPYDQSTWEEDEMNIPEYEEHKQSYWRHRELIMGEDPAQPRKYKKKKKELQGDGPPSSPTNDPTVKYETQPRFITATGGTLHMYQLEGLNWLRFSWAQGTDTILADEMGLGKTIQTIVFLYSLYKEGHTKGPFLVSAPLSTIINWEREFQMWAPKFYVVTYTGDKDSRAIIRENEFSFEDNAIKGGKKAFKMKREAQVKFHVLLTSYELITIDQAALGSIRWACLVVDEAHRLKNNQSKFFRVLNGYKIDHKLLLTGTPLQNNLEELFHLLNFLTPERFNNLEGFLEEFADISKEDQIKKLHDLLGPHMLRRLKADVFKNMPAKTELIVRVELSPMQKKYYKYILTRNFEALNSRGGGNQVSLLNIMMDLKKCCNHPYLFPVAAMESPKLPSGAYEGGALIKSSGKLMLLQKMLRKLKEQGHRVLIFSQMTKMLDLLEDFLDYEGYKYERIDGGITGALRQEAIDRFNAPGAQQFCFLLSTRAGGLGINLATADTVIIFDSDWNPHNDIQAFSRAHRIGQANKVMIYRFVTRASVEERITQVAKRKMMLTHLVVRPGLGSKAGSMSKQELDDILKFGTEELFKDENEGENKEEDSSVIHYDNEAIARLLDRNQDATEDTDVQNMNEYLSSFKVAQYVVREEDKIEEIEREIIKQEENVDPDYWEKLLRHHYEQQQEDLARNLGKGKRVRKQVNYNDAAQEDQDNQSEYSVGSEEEDEDFDERPEGRRQSKRQLRNEKDKPLPPLLARVGGNIEVLGFNTRQRKAFLNAVMRWGMPPQDAFTTQWLVRDLRGKTEKEFKAYVSLFMRHLCEPGADGSETFADGVPREGLSRQQVLTRIGVMSLVKKKVQEFEHINGRWSMPELMPDPSADSKRSSRASSPTKTSPTTPEASATNSPCTSKPATPAPSEKGEGIRTPLEKEEAENQEEKPEKNSRIGEKMETEADAPSPAPSLGERLEPRKIPLEDEVPGVPGEMEPEPGYRGDREKSATESTPGERGEEKPLDGQEHRERPEGETGDLGKREDVKGDRELRPGPRDEPRSNGRREEKTEKPRFMFNIADGGFTELHTLWQNEERAAISSGKLNEIWHRRHDYWLLAGIVLHGYARWQDIQNDAQFAIINEPFKTEANKGNFLEMKNKFLARRFKLLEQALVIEEQLRRAAYLNLSQEPAHPAMALHARFAEAECLAESHQHLSKESLAGNKPANAVLHKVLNQLEELLSDMKADVTRLPATLSRIPPIAARLQMSERSILSRLASKGTEPHPTPAYPPGPYATPPGYGAAFSAAPVGALAAAGANYSQMPAGSFITAATNGPPVLVKKEKEMVGALVSDGLDRKEPRAGEVICIDD

SEQ ID NO: 47941 - protein, 94 aa, Homo sapiens
MSPLDMKDGFLAFQTSRYKLHYYETPTGIKVVMNTDLGVGPIRDVLHHIYSALYVELVVKNPLCPLGQTVQSELFRSRLDSYVRSLPFFSARAG

SEQ ID NO: 47942 - protein, 795 aa, Homo sapiens
MLQTSRDTAYRDPLIPGAGSERREEDSFDSDSTATLLNTRPLQDLSPSSSAQALEELFPRYTSLRPGPPLNPPDFQGLRDALDSEHTRRKHCERHIQSLQTRVLELQQQLAVAVAADRKKDTMIEQLDKTLARVVEGWNRHEAERTEVLRGLQEEHQAAELTRSKQQETVTRLEQSLSEAMEALNREQESARLQQRERETLEEERQALTLRLEAEQQRCCVLQEERDAARAGQLSEHRELETLRAALEEERQTWAQQEHQLKEHYQALQEESQAQLEREKEKSQREAQAAWETQHQLALVQSEVRRLEGELDTARRERDALQLEMSLVQARYESQRIQLESELAVQLEQRVTERLAQAQESSLRQAASLREHHRKQLQDLSGQHQQELASQLAQFKVEMAEREERQQQVAEDYELRLAREQARVCELQSGNQQLEEQRVELVERLQAMLQAHWDEANQLLSTTLPPPNPPAPPAGPSSPGPQEPEKEERRVWTMPPMAVALKPVLQQSREARDELPGAPPVLCSSSSDLSLLLGPSFQSQHSFQPLEPKPDLTSSTAGAFSALGAFHPDHRAERPFPEEDPGPDGEGLLKQGLPPAQLEGLKNFLHQLLETVPQNNENPSVDLLPPKSGPLTVPSWEEAPQVPRIPPPVHKTKVPLAMASSLFRVPEPPSSHSQGSGPSSGSPERGGDGLTFPRQLMEVSQLLRLYQARGWGALPAEDLLLYLKRLEHSGTDGRGDNVPRRNTDSRLGEIPRKEIPSQAVPRRLATAPKTEKPPARKKSGHPAPSSMRSRGGVWR

SEQ ID NO: 47943 - protein, 882 aa, Homo sapiens
MPSNSEDKKDPESLVRYSRLLSYSGAVTGVLNEPAGLYELDGQLGLCLAYQQFRGLRRVMRPGVCLQLQDVHLLQSVGGGTRRPVLAPCLRGAVLLQSFSRQKPGAHSSRQAYGASLYEQLVWERQLGLPLYLWATKALEELACKLCPHVLRHHQFLQHSSPGSPSLGLQLLAPTLDLLAPPGSPVRNAHNEILEEPHHCPLQKYTRLQTPSSFPTLATLKEEGQRKAWASFDPKALLPLPEASYLPSCQLNRRLAWSWLCLLPSAFCPAQVLLGVLVASSHKGCLQLRDQSGSLPCLLLAKHSQPLSDPRLIGCLVRAERFQLIVERDVRSSFPSWKELSMPGFIQKQQARVYVQFFLADALILPVPRPCLHSATPSTPQTDPTGPEGPHLGQSRLFLLCHKEALMKRNFCVPPGASPEVPKPALSFYVLGSWLGGTQRKEGTGWGLPEPQGNDDNDQKVHLIFFGSSVRWFEFLHPGQVYRLIAPGPATPMLFEKDGSSCISRRPLELAGCASCLTVQDNWTLELESSQDIQDVLDANKSLPESSLTDLLSDNFTDSLVSFSAEILSRTLCEPLVASLWMKLGNTGAMRRCVKLTVALETAECEFPPHLDVYIEDPHLPPSLGLLPGARVHFSQLEKRVSRSHNVYCCFRSSTYVQVLSFPPETTISIPLPHIYLAELLQGGQSPFQATASCHIVSVFSLQLFWVCAYCTSICRQGKCTRLGSTCPTQTAISQAIIRLLVEDGTAEAVVTCRNHHVAAALGLCPREWASLLDFVQVPGRVVLQFAGPGAQLESSARVDEPMTMFLWTLCTSPSVLRPIVLSFELERKPSKIVPLEPPRLQRFQCGELPFLTHVNPRLRLSCLSIRESEYSSSLGILASSC

SEQ ID NO: 47944 - protein, 1278 aa, Homo sapiens
MWLFGCPLLLDDVARESWLLPGSNDLLLEVGPRLNFSTPTSTNIVSVCRATGLGPVDRVETTRRYRLSFAHPPSAEVEAIALATLHDRMTEQHFPHPIQSFSPESMPEPLNGPINILGEGRLALEKANQELGLALDSWDLDFYTKRFQELQRNPSTVEAFDLAQSNSEHSRHWFFKGQLHVDGQKLVHSLFESIMSTQESSNPNNVLKFCDNSSAIQGKEVRFLRPEDPTRPSRFQQQQGLRHVVFTAETHNFPTGVCPFSGATTGTGGRIRDVQCTGRGAHVVAGTAGYCFGNLHIPGYNLPWEDPSFQYPGNFARPLEVAIEASNGASDYGNKFGEPVLAGFARSLGLQLPDGQRREWIKPIMFSGGIGSMEADHISKEAPEPGMEVVKVGGPVYRIGVGGGAASSVQVQGDNTSDLDFGAVQRGDPEMEQKMNRVIRACVEAPKGNPICSLHDQGAGGNGNVLKELSDPAGAIIYTSRFQLGDPTLNALEIWGAEYQESNALLLRSPNRDFLTHVSARERCPACFVGTITGDRRIVLVDDRECPVRRNGQGDAPPTPLPTPVDLELEWVLGKMPRKEFFLQRKPPMLQPLALPPGLSVHQALERVLRLPAVASKRYLTNKVDRSVGGLVAQQQCVGPLQTPLADVAVVALSHEELIGAATALGEQPVKSLLDPKVAARLAVAEALTNLVFALVTDLRDVKCSGNWMWAAKLPGEGAALADACEAMVAVMAALGVAVDGGKDSLSMAARVGTETVRAPGSLVISAYAVCPDITATVTPDLKHPEGRGHLLYVALSPGQHRLGGTALAQCFSQLGEHPPDLDLPENLVRAFSITQGLLKDRLLCSGHDVSDGGLVTCLLEMAFAGNCGLQVDVPVPRVDVLSVLFAEEPGLVLEVQEPDLAQVLKRYRDAGLHCLELGHTGEAGPHAMVRVSVNGAVVLEEPVGELRALWEETSFQLDRLQAEPRCVAEEERGLRERMGPSYCLPPTFPKASVPREPGGPSPRVAILREEGSNGDREMADAFHLAGFEVWDVTMQDLCSGAIGLDTFRGVAFVGGFSYADVLGSAKGWAAAVTFHPRAGAELRRFRKRPDTFSLGVCNGCQLLALLGWVGGDPNEDAAEMGPDSQPARPGLLLRHNLSGRYESRWASVRVGPGPALMLRGMEGAVLPVWSAHGEGYVAFSSPELQAQIEARGLAPLHWADDDGNPTEQYPLNPNGSPGGVAGICSCDGRHLAVMPHPERAVRPWQWAWRPPPFDTLTTSPWLQLFINARNWTLEGSC

SEQ ID NO: 47945 - protein, 278 aa, Homo sapiens
MPCCVLQLGDIIDGYNAQYNASKKSLELVMDMFKRLKVPVHHTWGNHEFYNFSREYLTHSKLNTKFLEDQIVHHPETMPSEDYYAYHFVPFPKFRFILLDAYDLSVLGVDQSSPKYEQCMKILREHNPNTELNSPQGLSEPQFVQFNGGFSQEQLNWLNEVLTFSDTNQEKVVIVSHLPIYPDASDNVCLAWNYRDALAVIWSHECVVCFFAGHTHDGGYSEDPFGVYHVNLEGVIETAPDSQAFGTVHVYPDKMMLKGRGRVPDRIMNYKKERAFHC

SEQ ID NO: 47946 - protein, 155 aa, Homo sapiens
MDLDVVMRSSDCPYIVQFYGALFREGDCWICMELMSTSFDKFYKYVYSVLDDVIPEEILGKITLATVKALNHLKENLKIIHRDIKPSNILLDRSGNIKLCDFGISGQLVDSIAKTRDAGCRPYMAPERIDPSASRQGYDVRSDVWSLGITLPYEG

SEQ ID NO: 47947 - protein, 811 aa, Homo sapiens
MSQGRTISQAPARRERPRKDPLRHLRTREKRGPSGCSGGPNTVYLQVVAAGSRDSGAALYVFSEFNRYLFNCGEGVQRLMQEHKLKVARLDNIFLTRMHWSNVGGLSGMILTLKETGLPKCVLSGPPQLEKYLEAIKIFSGPLKGIELAVRPHSAPEYEDETMTVYQIPIHSEQRRGKHQPWQSPERPLSRLSPERSSDSESNENEPHLPHGVSQRRGVRDSSLVVAFICKLHLKRGNFLVLKAKEMGLPVGTAAIAPIIAAVKDGKSITHEGREILAEELCTPPDPGAAFVVVECPDESFIQPICENATFQRYQGKADAPVALVVHMAPASVLVDSRYQQWMERFGPDTQHLVLNENCASVHNLRSHKIQTQLNLIHPDIFPLLTSFRCKKEGPTLSVPMVQGECLLKYQLRPRREWQRDAIITCNPEEFIVEALQLPNFQQSVQEYRRSAQDGPAPAEKRSQYPEIIFLGTGSAIPMKIRNVSATLVNISPDTSLLLDCGEGTFGQLCRHYGDQVDRVLGTLAAVFVSHLHADHHTGLPSILLQRERALASLGKPLHPLLVVAPNQLKAWLQQYHNQCQEVLHHISMIPAKCLQEGAEISSPAVERLISSLLRTCDLEEFQTCLVRHCKHAFGCALVHTSGWKVVYSGDTMPCEALVRMGKDATLLIHEATLEDGLEEEAVEKTHSTTSQAISVGMRMNAEFIMLNHFSQRYAKVPLFSPNFSEKVGVAFDHMKVCFGDFPTMPKLIPPLKALFAGDIEEMEERREKRELRQVRAALLSRELAGGLEDGEPQQKRAHTEEPQAKKVRAQ

SEQ ID NO: 47948 - protein, 847 aa, Homo sapiens
MAAVFFSVGRLSPEVTQPDEDLHLQAEETQLVKESVTFKDVAIDFTLEEWRLMDPTQRNLHKDVMLENYRNLVSLGLAVSKPDMISHLENGKGPWVTVREISRIPYPDMEPKPATKKATRTKAISEDLSQEAILEKLTENGLWDSRMEGLWKWNDRILRLQNNQENHLSQRIIPLKKTPTSQRGFRFESILIPEPGIATEELHSRCQTQEENFTENLNLITDTHLGKIICKEMKGSKAIRQTSELTLGKKSNNKEKPYKCSTCEKAFHYRSLLIQHQRTHTKEKPYECNECGKTFSQPSYLSQHKKIHTGEKPYKCNECGKAFIASSSLMVHQRIHTKEKPYQCNVCGKSFSQCARLNQHQRIQTGEKPYKCSECGKAFSDKSKLARHQETHNGEKPYKCDDCGKAFRNKSYLSVHQKTHTEEKPYQCNECGKSFKNTTIFNVHQRIHTGEKPFRCNECGKAYRSNSSLIVHIRTHTGEKPYECNECGKAFNRIANFTEHQRIHTGEKPYKCNECGKAFINYSCLTVHHRMHTGEKPYKCTECGKAFMRSSSLIIHQRIHTEEKPYLCNECGESFRIKSHLTVHQRIHTGEKPYKCTDCERAFTKMVNLKEHQKIHTGVKPYKCYDCGKSFRTKSYLIVHQRTHTGEKPYKCNECEKAFTNTSQLTVHQRRHTGEKPYKCNECGKVFTSNSGFNTHQRTHTGEKPFKCNDCGKAFSQMVHVTEHQKIHSGEKPYKCDVCGKAFRRGSYLTVHWRTHTGEKPYTCKECGKGCITLSQLTLHQRIHTGERPYKCEECGKAFRTNSDFTVHLRMHTGEKPYKCNECGKAFRSSSSLTVHQRIHQRETQLI

SEQ ID NO: 47949 - protein, 937 aa, Homo sapiens
MPTTLPQGTINMNQCTDVVDGEGRTGQKFSLCILTPEKEHFIRAETKEIVSGWLEMLMVYPRTNKQNQKKKRKVEPPTPQEPGPAKVAVTSSSSSSSSSSSIPSAEKVPTTKSTLWQEEMRTKDQPDGSSLSPAQSPSQSQPPAASSLREPGLESKEEESAMSSDRMDCGRKVRVESGYFSLEKTKQDLKAEEQQLPPPLSPPSPSTPNHRRSQVIEKFEALDIEKAEHMETNAVGPSPSSDTRQGRSEKRAFPRKRDFTNEAPPAPLPDASASPLSPHRRAKSLDRRSTEPSVTPDLLNFKKGWLTKQYEDGQWKKHWFVLADQSLRYYRDSVAEEAADLDGEIDLSACYDVTEYPVQRNYGFQIHTKEGEFTLSAMTSGIRRNWIQTIMKHVHPTTAPDVTSSLPEEKNKSSCSFETCPRPTEKQEAELGEPDPEQKRSRARERRREGRSKTFDWAEFRPIQQALAQERVGGVGPADTHEPLRPEAEPGELERERARRREERRKRFGMLDATDGPGTEDAALRMEVDRSPGLPMSDLKTHNVHVEIEQRWHQVETTPLREEKQVPIAPVHLSSEDGGDRLSTHELTSLLEKELEQSQKEASDLLEQNRLLQDQLRVALGREQSAREGYVLQATCERGFAAMEETHQKKIEDLQRQHQRELEKLREEKDRLLAEETAATISAIEAMKNAHREEMERELEKSQRSQISSVNSDVEALRRQYLEELQSVQRELEVLSEQYSQKCLENAHLAQALEAERQALRQCQRENQELNAHNQELNNRLAAEITRLRTLLTGDGGGEATGSPLAQGKDAYELEVLLRVKESEIQYLKQEISSLKDELQTALRDKKYASDKYKDIYTELSIAKAKADCDISRLKEQLKAATEALGEKSPDSATVSGYDIMKSKSNPDFLKKDRSCVTRQLRNIRSKSVIEQVSWDT

SEQ ID NO: 47950 - protein, 793 aa, Homo sapiens
MRTKDQPDGSSLSPAQSPSQSQPPAASSLREPGLESKEEESAMSSDRMDCGRKVRVESGYFSLEKTKQDLKAEEQQLPPPLSPPSPSTPNHRRSQVIEKFEALDIEKAEHMETNAVGPSPSSDTRQGRSEKRAFPRKRPDLLNFKKGWLTKQYEDGQWKKHWFVLADQSLRYYRDSVAEEAADLDGEIDLSACYDVTEYPVQRNYGFQIHTKEGEFTLSAMTSGIRRNWIQTIMKHVHPTTAPDVTSSLPEEKNKSSCSFETCPRPTEKQEAELGEPDPEQKRSRARERRREGRSKTFDWAEFRPIQQALAQERVGGVGPADTHEPLRPEAEPGELERERARRREERRKRFGMLDATDGPGTEDAALRMEVDRSPGLPMSDLKTHNVHVEIEQRWHQVETTPLREEKQVPIAPVHLSSEDGGDRLSTHELTSLLEKELEQSQKEASDLLEQNRLLQDQLRVALGREQSAREGYVLQATCERGFAAMEETHQKKIEDLQRQHQRELEKLREEKDRLLAEETAATISAIEAMKNAHREEMERELEKSQRSQISSVNSDVEALRRQYLEELQSVQRELEVLSEQYSQKCLENAHLAQALEAERQALRQCQRENQELNAHNQELNNRLAAEITRLRTLLTGDGGGEATGSPLAQGKDAYELEVLLRVKESEIQYLKQEISSLKDELQTALRDKKYASDKYKDIYTELSIAKAKADCDISRLKEQLKAATEALGEKSPDSATVSGYDIMKSKSNPDFLKKDRSCVTRQLRNIRSKSLKEGLTVQERLKLFESRDLKKD

SEQ ID NO: 47951 - protein, 440 aa, Homo sapiens
MLALTVLETCVKNCGHRFHILVANRDFIDSVLVKIISPKNNPPTIVQDKVLALIQAWADAFRSSPDLTGVVHIYEELKRKGVEFPMADLDALSPIHTPQRSVPEVDPAATMPRSQSQQRTSAGSYSSPPPAPYSAPQAPALSVTGPITANSEQIARLRSELDVVRGNTKVMSEMLTEMVPGQEDSSDLELLQELNRTCRAMQQRIVELISRVSNEEVTEELLHVNDDLNNVFLRYERFERYRSGRSVQNASNGVLNEVTEDNLIDLGPGSPAVVSPMVGNTAPPSSLSSQLAGLDLGTESVSGTLSSLQQCNPRDGFDMFAQTRGNSLAEQRKTVTYEDPQAVGGLASALDNRKQSSEGIPVAQPSVMDDIEVWLRTDLKGDDLEEGVTSEEFDKFLEERAKAAEMVPDLPSPPMEAPAPASNPSGRKKPERSEDALFAL

SEQ ID NO: 47952 - protein, 416 aa, Homo sapiens
MLALTVLETCVKNCGHRFHILVANRDFIDSVLVKIISPKNNPPTIVQDKVLALIQAWADAFRSSPDLTGVVHIYEELKRKGVEFPMADLDALSPIHTPQRIARLRSELDVVRGNTKVMSEMLTEMVPGQEDSSDLELLQELNRTCRAMQQRIVELISRVSNEEVTEELLHVNDDLNNVFLRYERFERYRSGRSVQNASNGVLNEVTEDNLIDLGPGSPAVVSPMVGNTAPPSSLSSQLAGLDLGTESVSGTLSSLQQCNPRDGFDMFAQTRGNSLAEQRKTVTYEDPQAVGGLASALDNRKQSSEGTFLSSAQKRGRGGESDLEPIDSWLITQGMIPVAQPSVMDDIEVWLRTDLKGDDLEEGVTSEEFDKFLEERAKAAEMVPDLPSPPMEAPAPASNPSGRKKPERSEDALFAL

SEQ ID NO: 47953 - protein, 918 aa, Homo sapiens
MVMTSVSGHLLAHDFQMQFRKWQSCNPLVLFEAEIEKYCPENFVDIKKTLERETRQCQALVIWTDCDREGENIGFEIIHVCKAVKPNLQVLRARFSEITPHAVRTACENLTEPDQRVSDAVDVRQELDLRIGAAFTRFQTLRLQRIFPEVLAEQLISYGSCQFPTLGFVVERFKAIQAFVPEIFHRIKVTHDHKDGIVEFNWKRHRLFNHTACLVLYQLCVEDPMATVVEVRSKPKSKWRPQALDTVELEKLASRKLRINAKETMRIAEKLYTQGYISYPRTETNIFPRDLNLTVLVEQQTPDPRWGAFAQSILERGGPTPRNGNKSDQAHPPIHPTKYTNNLQGDEQRLYEFIVRHFLACCSQDAQGQETTVEIDIAQERFVAHGLMILARNYLDVYPYDHWSDKILPVYEQGSHFQPSTVEMVDGETSPPKLLTEADLIALMEKHGIGTDATHAEHIETIKARMYVGLTPDKRFLPGHLGMGLVEGYDSMGYEMSKPDLRAELEADLKLICDGKKDKFVVLRQQVQKYKQVFIEAVAKAKKLDEALAQYFGNGTELAQQEDIYPAMPEPIRKCPQCNKDMVLKTKKNGGFYLSCMGFPECRSAVWLPDSVLEASRDSSVCPVCQPHPVYRLKLKFKRGSLPPTMPLEFVCCIGGCDDTLREILDLRFSGGPPRASQPSGRLQANQSLNRMDNSQHPQPADSRQTGSSKALAQTLPPPTAAGESNSVTCNCGQEAVLLTVRKEGPNRGRQFFKCNGGSCNFFLWADSPNPGAGGPPALAYRPLGASLGCPPGPGIHLGGFGNPGDGSGSGTSCLCSQPSVTRTVQKDGPNKGRQFHTCAKPREQQCGFFQWVDENTAPGTSGAPSWTGDRGRTLESEARSKRPRASSSDMGSTAKKPRKCSLCHQPGHTRPFCPQNR

SEQ ID NO: 47954 - protein, 338 aa, Homo sapiens
MELSKKIAERLGVEMGKVQVYQEPNRETRVQIQESVRGKDVFIIQTVSKDVNTTIMELLIMVYACKTSCAKSIIGVIPYFPYSKQCKMRKRGSIVSKLLASMMCKAGLTHLITMDLHQKEIQGFFNIPVDNLRASPFLLQYIQEEIPDYRNAVIVAKSPASAKRAQSFAERLRLGIAVIHGEAQDAESDLVDGRHSPPMVRSVAAIHPSLEIPMLIPKEKPPITVVGDVGGRIAIIVDDIIDDVDSFLAAAETLKERGAYKIFVMATHGLLSSDAPRRIEESAIDEVVVTNTIPHEVQKLQCPKIKTVDISMILSEAIRRIHNGESMSYLFRNIGLDD

SEQ ID NO: 47955 - protein, 656 aa, Homo sapiens
MISQAQKVIAVVMDMFTDVDIFKDLLDAGFKRKVAVYIIVDESNVKYFLHMCERACMHLGHLKNLRVRSSGGTEFFTRSATKFKGALAQKFMFVDGDRAVCGSYSFTWSAARTDRNVISVLSGQVVEMFDRQFQELYLMSHSVSLKGIPMEKEPEPEPIVLPSVVPLVPAGTVAKKLVNPKYALVKAKSVDEIAKISSEKQEAKKPLGLKGPALAEHPGELPELLPPIHPGLLHLERANMFEYLPTWVEPDPEPGSDILGYINIIDPNIWNPQPSQMNRIKIRDTSQASAQHQLWKQSQDSRPRPEPCPPPEPSAPQDGVPAENGLPQGDPEPLPPVPKPRTVPVADVLARDSSDIGWVLELPKEEAPQNGTDHRLPRMAGPGHAPLQRQLSVTQDDPESLGVGLPNGLDGVEEEDDDDYVTLSDQDSHSGSSGRGPGPRRPSVASSVSEEYFEVREHSVPLRRRHSEQVANGPTPPPRRQLSAPHITRGTFVGPQGGSPWAQSRGREEADALKRMQAQRSTDKEAQGQQFHHHRVPASGTRDKDGFPGPPRYRSAADSVQSSTRNAGPAMAGPHHWQAKGGQVPRLLPDPGSPRLAQNARPMTDGRATEEHPSPFGIPYSKLSQSKHLKARTGGSQWASSDSKRRAQAPRDRKDP

SEQ ID NO: 47956 - protein, 176 aa, Homo sapiens
MVNGQVESAQFPEYDDLYCKYCFVYGQDWAPTAGLEEGISQITSKSQDVRQALVWNFPIDVTFKSTNPYGCCAAGLLEVQSASGLVATPVKGPQIVLSVYGPDVFGNDVVRGYGAVHVPFSPGRHKRTIPMFVPESTSKLQKFTSWFMGRRPEYTDPKVVAQGEGREATFRAVCQR

SEQ ID NO: 47957 - protein, 440 aa, Homo sapiens [sequence omitted]

SEQ ID NO: 47958 - protein, 292 aa, Homo sapiens
MEAAAKHLTPVTLELGGKSPCYIDKDCDLDIVCRRITWGKYMNCGQTCIAPDYILCEASLQNQIVWKIKETVKEFYGENIKESPDYERIINLRHFKRILSLLEGQKIAFGGETDEATRYIAPTVLTDVDPKTKVMQEEIFGPILPIVPVKNVDEAINFINEREKPLALYVFSHNHKLIKRMIDETSSGGVTGNDVIMHFTLNSFPFGGVGSSGMGAYHGKHSFDTFSHQRPCLLKSLKREGANKLRYPPNSQSKVDWGKFFLLKRFNKEKLGLLLLTFLGIVAAVLVKAEYY

SEQ ID NO: 47959 - protein, 583 aa, Homo sapiens
MDSFSSSRTATLKKQPSHMEAAHFGDLGRSCLDYQTQETKSSLSKTLEQVLHDTIVLPYFIQFMELRRMEHLVKFWLEAESFHSTTWSRIRAHSLNTVKQSSLAEPVSPSKKHETTASFLTDSLDKRLEDSGSAQLFMTHSEGIDLNNRTNSTQNHLLLSQECDSAHSLRLEMARAGTHQVSMETQESSSTLTVASRNSPASPLKELSGKLMKSIEQDAVNTFTKYISPDAAKPIPITEAMRNDIIARICGEDGQVDPNCFVLAQSIVFSAMEQEHFSEFLRSHHFCKYQIEVLTSGTVYLADILFCESALFYFSEYMEKEDAVNILQFWLAADNFQSQLAAKKGQYDGQEAQNDAMILYDKYFSLQATHPLGFDDVVRLEIESNICREGGPLPNCFTTPLRQAWTTMEKVFLPGFLSSNLYYKYLNDLIHSVRGDEFLGGNVSLTAPGSVGPPDESHPGSSDSSASQSSVKKASIKILKNFDEAIIVDAASLDPESLYQRTYAGKMTFGRVSDLGQFIRESEPEPDVRKSKGSMFSQAMKKWVQGNTDEAQEELAWKIAKMIVSDIMQQAQYDQPLEKSTKL

SEQ ID NO: 47960 - protein, 525 aa, Homo sapiens
MDSFSSSRTATLKKQPSHMEAAHFGDLGRSCLDYQTQETKSSLSKTLEQVLHDTIVLPYFIQFMELRRMEHLVKFWLEAESFHSTTWSRIRAHSLNTVKQSSLAEPVSPSKKHETTASFLTDSLDKRLEDSGSAQLFMTHSEGIDLNNRTNSTQNHLLLSQECDSAHSLRLEMARAGTHQVSMETQESSSTLTVASRNSPASPLKELSGKLMKSIEQDAVNTFTKYISPDAAKPIPITEAMRNDIIARICGEDGQVDPNCFVLAQSIVFSAMEQEHFSEFLRSHHFCKYQIEVLTSGTVYLADILFCESALFYFSEYMEKEDAVNILQFWLAADNFQSQLAAKKGQYDGQEAQNDAMILYDKYFSLQATHPLGFDDVVRLEIESNICREGGPLPNCFTTPLRQAWTTMEKSSVKKASIKILKNFDEAIIVDAASLDPESLYQRTYAGKMTFGRVSDLGQFIRESEPEPDVRKSKGSMFSQAMKKWVQGNTDEAQEELAWKIAKMIVSDIMQQAQYDQPLEKSTKL

SEQ ID NO: 47961 - protein, 63 aa, Homo sapiens
MKAIGARNLLKSIAKQREAQQQQLQALIAEKKMQLERYRVEYEALCKVEAEQNEFIDQFIFQK

SEQ ID NO: 47962 - protein, 265 aa, Homo sapiens
MLKAMFSGRMEVLTDKEGWILIDRCGKHFGTILNYLRDDTITLPQNRQEIKELMAEAKYYLIQGLVNMCQSALQDKKDSYQPVCNIPIITSLKEEERLIESSTKPVVKLLYNRSNNKYSYTSNSDDHLLKNIELFDKLSLRFNGRVLFIKDVIGDEICCWSFYGQGRKLAEVCCTSIVYATEKKQTKVEFPEARIYEETLNVLLYETPRVPDNSLLEATSRSRSQASPSEDEETFELRDRVRRIHVKRYSTYDDRQLGHQSTHRD

SEQ ID NO: 47963 - protein, 161 aa, Homo sapiens
MERFEVLGIPFSLQLWDTAGQERFKCIASTYYRGAQAIIIVFNLNDVASLEHTKQWLADALKENDPSSVLLFLTPAQYALMEKDALQVAQEMKAEYWAVSSLTGENVREFFFRVAALTFEANVLAELEKSGARRIGDVVRINSDDSNLYLTASKKKPTCCP

SEQ ID NO: 47964 - protein, 169 aa, Homo sapiens
MERFEVLGIPFSLQLWDTAGQERFKCIASTYYRGAQAIIIVFNLNDVASLEHTKQWLADALKENDPSSVLLFLVGSKKDLSTPAQYALMEKDALQVAQEMKAEYWAVSSLTGENVREFFFRVAALTFEANVLAELEKSGARRIGDVVRINSDDSNLYLTASKKKPTCCP

SEQ ID NO: 47965 - protein, 331 aa, Homo sapiens
MPENSRVLRVVLLGAPNAGKSTLSNQLLGRKVFPVSRKVHTTRCQALGVITEKETQVILLDTPGIISPGKQKRHHLELSLLEDPWKSMESADLVVVLVDVSDKWTRNQLSPQLLRCLTKYSQIPSVLVMNKVDCLKQKSVLLELTAALTEGVVNGKKLKMRQAFHSHPGTHCPSPAVKDPNTQSVGNPQRIGWPHFKEIFMLSALSQEDVKTLKQYLLTQAQPGPWEYHSAVLTSQTPEEICANIIREKLLEHLPQEVPYNVQQKTAVWEEGPGGELVIQQKLLVPKESYVKLLIGPKGHVISQIAQEAGHDLMDIFLCDVDIRLSVKLLK

SEQ ID NO: 47966 - protein, 984 aa, Homo sapiens [sequence omitted]

SEQ ID NO: 47967 - protein, 829 aa, Homo sapiens
MEQIQALLAPPKTDEAEKRSRKPEKEPRRSGRATNHDSCDSCKEGGDLLCCDHCPAAFHLQCCNPPLSEEMLPPGEWMCHRCTVRRKKREQKKELGHVNGLVDKSGKRTTSPSSDTDLLDRSASKTELKAIAHARILERRASRPGTPTSSASTETPTSEQNDVDEDIIDVDEEPVAAEPDYVQPQLRRPFELLIAAAMERNPTQFQLPNELTCTTALPGSSKRRRKEETTGKNVKKTQHELDHNGLVPLPVKVCFTCNRSCRVAPLIQCDYCPLLFHMDCLEPPLTAMPLGRWMCPNHIEHVVLNQKNMTLSNRCQVFDRFQDTVSQHVVKVDFLNRIHKKHPPNRRVLQSVKRRSLKVPDAIKSQYQFPPPLIAPAAIRDGELICNGIPEESQMHLLNSEHLATQAEQQEWLCSVVALQCSILKHLSAKQMPSHWDSEQTEKADIKPVIVTDSSVTTSLQTADKTPTPSHYPLSCPSGISTQNSLSCSPPHQSPALEDIGCSSCAEKSKKTPCGTANGPVNTEVKANGPHLYSSPTDSTDPRRLPGANTPLPGLSHRQGWPRPLTPPAAGGLQNHTVGIIVKTENATGPSSCPQRSLVPVPSLPPSIPSSCASIENTSTLQRKTVQSQIGPPLTDSRPLGSPPNATRVLTPPQAAGDGILATTANQRFSSPAPSSDGKVSPGTLSIGSALTVPSFPANSTAMVDLTNSLRAFMDVNGEIEINMLDEKLIKFLALQRIHQLFPSRVQPSPGSVGTHQLASGGHHIEGAHVHTCHHIIRSPLYVCEWSPCLHGESELPVSQTSLCAFHGLNKAPWFFSEESRNKMATTAF

SEQ ID NO: 47968 - protein, 305 aa, Homo sapiens [sequence omitted]

SEQ ID NO: 47969 - protein, 699 aa, Homo sapiens
MVHTLASNGANSIWEHSLLDPAQVQSGRRKANPQDKVHPIKSEFIRAKYQMLAFVHKLPCRDDDGVTAKDLSKQLHSSVRTGNLETCLRLLSLGAQANFFHPEKGTTPLHVAAKAGQTLQAELLVVYGADPGSPDVNGRTPIDYARQAGHHELAERLVECQYELTDRLAFYLCGRKPDHKNGHYIIPQMADSLDLSELAKAAKKKLQALSNRLFEELAMDVYDEVDRRENDAVWLATQNHSTLVTERSAVPFLPVNPEYSATRNQGRQKLARFNAREFATLIIDILSEAKRRQQGKSLSSPTDNLELSLRSQSDLDDQHDYDSVASDEDTDQEPLRSTGATRSNRARSMDSSDLSDGAVTLQEYLELKKALATSEAKVQQLMKVNSSLSDELRRLQREIHKLQAENLQLRQPPGPVPTPPLPSERAEHTPMAPGGSTHRRDRQAFSMYEPGSALKPFGGPPGDELTTRLQPFHSTELEDDAIYSVHVPAGLYRIRKGVSASAVPFTPSSPLLSCSQEGSRHTSKLSRHGSGADSDYENTQSGDPLLGLEGKRFLELGKEEDFHPELESLDGDLDPGLPSTEDVILKTEQVTKNIQELLRAAQEFKHDSFVPCSEKIHLAVTEMASLFPKRPALEPVRSSLRLLNASAYRLQSECRKTVPPEPGAPVDFQLLTQQVIQCAYDIAKAAKQLVTITTREKKQ

SEQ ID NO: 47970 - protein, 1344 aa, Homo sapiens [sequence omitted]

SEQ ID NO: 47971 - protein, 559 aa, Homo sapiens
MSLVSEEFPEEVPPRAEEITIPADVTPERVPTHIVDYSEAEQSDEQLHQEISQANVICIVYAVNNKHSIDKVTSRWIPLINERTDKDSRLPLILVGNKSDLVEYSSMETILPIMNQYTEIETCVECSAKNLKNISELFYYAQKAVLHPTGPLYCPEEKEMKPACIKALTRIFKISDQDNDGTLNDAELNFFQRICFNTPLAPQALEDVKNVVRKHISDGVADSGLTLKGFLFLHTLFIQRGRHETTWTVLRRFGYDDDLDLTPEYLFPLLKIPPDCTTELNHHAYLFLQSTFDKHDLDRDCALSPDELKDLFKVFPYIPWGPDVNNTVCTNERGWITYQGFLSQWTLTTYLDVQRCLEYLGYLGYSILTEQESQASAVTVTRDKKIDLQKKQTQRNVFRCNVIGVKNCGKSGVLQALLGRNLMRQKKIREDHKSYYAINTVYVYGQEKYLLLHDISESEFLTEAEIICDVVCLVYDVSNPKSFEYCARIFKQHFMDSRIPCLIVAAKSDLHEVKQEYSISPTDFCRKHKMPPPQAFTCNTADAPSKDIFVKLTTMAMYP

SEQ ID NO: 47972 - protein, 523 aa, Homo sapiens
METILPIMNQYTEIETCVECSAKNLKNISELFYYAQKAVLHPTGPLYCPEEKEMKPACIKALTRIFKISDQDNDGTLNDAELNFFQRICFNTPLAPQALEDVKNVVRKHISDGVADSGLTLKGFLFLHTLFIQRGRHETTWTVLRRFGYDDDLDLTPEYLFPLLKIPPDCTTELNHHAYLFLQSTFDKHDLDRDCALSPDELKDLFKVFPYIPWGPDVNNTVCTNERGWITYQGFLSQWTLTTYLDVQRCLEYLGYLGYSILTEQESQASAVTVTRDKKIDLQKKQTQRNVFRCNVIGVKNCGKSGVLQALLGRNLMRQKKIREDHKSYYAINTVYVYGQEKYLLLHDISESEFLTEAEIICDVVCLVYDVSNPKSFEYCARIFKQHFMDSRIPCLIVAAKSDLHEVKQEYSISPTDFCRKHKMPPPQAFTCNTADAPSKDIFVKLTTMAMYPEDHYRDRLSRDMGHTDRIENLRKIWVFLKTALHVTQADLKSSTFWLRASFGATVFAVLGFAMYKALLKQR

SEQ ID NO: 47973 - protein, 73 aa, Homo sapiens
MQAIQDTNNLKRFIRQAEMNHYALFKCYMFLKNCGSGDILLKIVKVEHEEMPEAKNVIAVLEEFMKEALDQSF

SEQ ID NO: 47974 - protein, 174 aa, Homo sapiens
METQSEPSELELDDVVITNPHIEAILENEDWIEDASGLMSHCIAILKICHTLTEKLVAMTMGSGAKMKTSASVSDIIVVAKRISPRVDDVVKSMYPPLDPKLLDARTTALLLSVSHLVLVTRNACHLTGGLDWIDQSLSAAEEHLEVLREAALASEPDKGLPGPEGFLQEQSAI

SEQ ID NO: 47975 - protein, 803 aa, Homo sapiens
MQKENHFLIFVKSWNTEAGVPLATLCSNLYHRERTSTDVMDSQEALAFLKCRTQTPTNINVSNSLGPQAAQGSVQYEGNINVSAAALFDRKRLQYLEKLNLPESTHVEFVMFSTDVSHCVKDRLPKCVSAFANTEGGYVFFGVHDETCQVIGCEKEKIDLTSLRASIDGCIKKLPVHHFCTQRPEIKYVLNFLEVHDKGALRGYVCAIKVEKFCCAVFAKVPSSWQVKDNRVRQLPTREWTAWMMEADPDLSRCPEMVLQLSLSSATPRSKPVCIHKNSECLKEQQKRYFPVFSDRVVYTPESLYKELFSQHKGLRDLINTEMRPFSQGILIFSQSWAVDLGLQEKQGVICDALLISQNNTPILYTIFSKWDAGCKGYSMIVAYSLKQKLVNKGGYTGRLCITPLVCVLNSDRKAQSVYSSYLQIYPESYNFMTPQHMEALLQSLVIVLLGFKSFLSEELGSEVLNLLTNKQYELLSKNLRKTRELFVHGLPGSGKTILALRIMEKIRNVFHCEPANILYICENQPLKKLVSFSKKNICQPVTRKTFMKNNFEHIQHIIIDDAQNFRTEDGDWYGKAKFITQTARDGPGVLWIFLDYFQTYHLSCSGLPPPSDQYPREEINRVVRNAGPIANYLQQVMQEARQNPPPNLPPGSLVMLYEPKWAQGVPGNLEIIEDLNLEEILIYVANKCRFLLRNGYSPKDIAVLFTKASEVEKYKDRLLTAMRKRKLSQLHEESDLLLQIGDASDVLTDHIVLDSVCRFSGLERNIVFGINPGVAPPAGAYNLLLCLASRAKRHLYILKASV

SEQ ID NO: 47976 - protein, 839 aa, Homo sapiens
MAKKVEHPVEMGLDLEQSLRELIQSSDLQAFFETKQQGRCFYIFVKSWSSGPFPEDRSVKPRLCSLSSSLYRRSETSVRSMDSREAFCFLKTKRKPKILEEGPFHKIHKGVYQELPNSDPADPNSDPADLIFQKDYLEYGEILPFPESQLVEFKQFSTKHFQEYVKRTIPEYVPAFANTGGGYLFIGVDDKSREVLGCAKENVDPDSLRRKIEQAIYKLPCVHFCQPQRPITFTLKIVNVLKRGELYGYACMIRVNPFCCAVFSEAPNSWIVEDKYVCSLTTEKWVGMMTDTDPDLLQLSEDFECQLSLSSGPPLSRPVYSKKGLEHKKELQQLLFSVPPGYLRYTPESLWRDLISEHRGLEELINKQMQPFFRGILIFSRSWAVDLNLQEKPGVICDALLIAQNSTPILYTILREQDAEGQDYCTRTAFTLKQKLVNMGGYTGKVCVRAKVLCLSPESSAEALEAAVSPMDYPASYSLAGTQHMEALLQSLVIVLLGFRSLLSDQLGCEVLNLLTAQQYEIFSRSLRKNRELFVHGLPGSGKTIMAMKIMEKIRNVFHCEAHRILYVCENQPLRNFISDRNICRAETRKTFLRENFEHIQHIVIDEAQNFRTEDGDWYGKAKSITRRAKGGPGILWIFLDYFQTSHLDCSGLPPLSDQYPREELTRIVRNADPIAKYLQKEMQVIRSNPSFNIPTGCLEVFPEAEWSQGVQGTLRIKKYLTVEQIMTCVADTCRRFFDRGYSPKDVAVLVSTAKEVEHYKYELLKAMRKKRVVQLSDACDMLGDHIVLDSVRRFSGLERSIVFGIHPRTADPAILPNVLICLASRAKQHLYIFPWGGH

SEQ ID NO: 47977 - protein, 577 aa, Homo sapiens
MADTFYTNAGCTLVALNPFKPVPQLYSPELMREYHAAPQPQKLKPHVFTVGEQTYRNVKSLIEPVNQSIVVSGESGAGKTWTSRCLMKFYAVVATSPASWESHKIAERIEQRILNSNPVMEAFGNACTLRNNNSSRFGKFIQLQLNRAQQMTGAAVQTYLLEKTRVACQASSERNFHIFYQICKGASEDERLQWHLPEGAAFSWLPNPERSLEEDCFEVTREAMLHLGIDTPTQNNIFKVLAGLLHLGNIQFAASEDEAQPCQPMDDAKYSVRTAASLLGLPEDVLLEMVQIRTIRAGRQQQVFRKPCARAECDTRRDCLAKLIYARLFDWLVSVINSSICADTDSWTTFIGLLDVYGFESFPDNSLEQLCINYANEKLQQHFVAHYLRAQQEEYAVEGLEWSFINYQDNQPCLDLIEGSPISICSLINEECRLNRPSSAAQLQTRIETALAGSPCLGHNKLSREPSFIVVHYAGPVRYHTAGLVEKNKDPIPPELTRLLQQSQDPLLMGLFPTNPKEKTQEEPPGQSRAPVLTVVSKFKASLEQLLQVLHSTTPHYIRCIKPNSQGQAQTFLQEEA

SEQ ID NO: 47978 - protein, 491 aa, Homo sapiens
MSSVEAKIEDKKVQRESKLTSGKLENLRKEKINFLRNKHKIHVQGTDLPDPIATFQQLDQEYKINSRLLQNILDAGFQMPTPIQMQAIPVMLHGRELLASAPTGSGKTLAFSIPILMQLKQPANKGFRALIISPTRELASQIHRELIKISEGTGFRIHMIHKAAVAAKKFGPKSSKKFDILVTTPNRLIYLLKQDPPGIDLASVEWLVVDESDKLFEDGKTGFRDQLASIFLACTSHKVRRAMFSATFAYDVEQWCKLNLDNVISVSIGARNSAVETVEQELLFVGSETGKLLAVRELVKKGFNPPVLVFVQSIERAKELFHELIYEGINVDVIHAERTQQQRDNTVHSFRAGKIWVLICTALLARGIDFKGVNLVINYDFPTSSVEYIHRIGRTGRAGNKGKAITFFTEDDKPLLRSVANVIQQAGCPVPEYIKGFQKLLSKQKKKMIKKPLERESISTTPKCFLEKAKDKQKKVTGQNSKKKVALEDKS

SEQ ID NO: 47979 - protein, 991 aa, Homo sapiens
MEPIVLQYVPHDRFNKTCYICEEQGRESKAASGACMTCNRHGCRQAFHVTCAQMAGLLCEEEVLEVDNVKYCGYCKYHFSKMKTSRHSSGGGGGGAGGGGGSMGGGGSGFISGRRSRSASPSTQQEKHPTHHERGQKKSRKDKERLKQKHKKRPESPPSILTPPVVPTADKVSSSASSSSHHEASTQETSESSRESKGKKSSSHSLSHKGKKLSSGKGVSSFTSASSSSSSSSSSSGGPFQPAVSSLQSSPDFSAFPKLEQPEEDKYSKPTAPAPSAPPSPSAPEPPKADLFEQKVVFSGFGPIMRFSTTTSSSGRARAPSPGDYKSPHVTGSGASAGTHKRMPALSATPVPADETPETGLKEKKHKASKRSRHGPGRPKGSRNKEGTGGPAAPSLPSAQLAGFTATAASPFSGGSLVSSGLGGLSSRTFGPSGSLPSLSLESPLLGAGIYTSNKDPISHSGGMLRAVCSTPLSSSLLGPPGTSALPRLSRSPFTSTLPSSSASISTTQVFSLAGSTFSLPSTHIFGTPMGAVNPLLSQAESSHTEPDLEDCSFRCRGTSPQESLSSMSPISSLPALFDQTASAPCGGGQLDPAAPGTTNMEQLLEKQGDGEAGVNIVEMLKALHALQKENQRLQEQILSLTAKKERLQILNVQLSVPFPALPAALPAANGPVPGPYGLPPQAGSSDSLSTSKSPPGKSSLGLDNSLSTSSEDPHSGCPSRSSSSLSFHSTPPPLPLLQQSPATLPLALPGAPAPLPPQPQNGLGRAPGAAGLGAMPMAEGLLGGLAGSGGLPLNGLLGGLNGAAAPNPASLSQAGGAPTLQLPGCLNSLTEQQRHLLQQQEQQLQQLQQLLASPQLTPEHQTVVYQMIQQIQQKRELQRLQMAGGSQLPMASLLAGSSTPLLSAGTPGLLPTASAPPLLPAGALVAPSLGNNTSLMAAAAAAAAVAAAGGPPVLTAQTNPFLSLSGAEGSGGGPKGGTADKGASANQEKG

SEQ ID NO: 47980 - protein, 197 aa, Homo sapiens [sequence omitted]

SEQ ID NO: 47981 - protein, 1505 aa, Homo sapiens [sequence omitted]

SEQ ID NO: 47982 - protein, 137 aa, Homo sapiens
MNSRGIWLSYVLAIGLLHIVLLSIPFVSVPVVWTLTNLIHNMGMYIFLHTVKGTPFETPDQGKARLLTHWEQMDYGVQFTASRKFLTITPIVLYFLTSFYTKYDQIHFVLNTVSLMSVLIPKLPQLHGVRIFGINKY

SEQ ID NO: 47983 - protein, 596 aa, Homo sapiens
MRSAVFKAAAAPAGGNPEQRLDYERAAALGGPEDEPGAAEAHFLPRHRKLKEPGPPLASSQGGSPAPSPAGCGGKGRGLLLPAGAAPGQQEESWGGSVPLPCPPPATKQAGIGGEPAAAGAGCSPRPKYQAVLPIQTGSLVAAAKEPTPWAGDKGGAASPAATASDPAGPPPLPLPGPPPLAPTATAGTLAASEGRWKSMRKSPLGGGGGSGASSQAACLKQILLLQLDLIEQQQQQLQAKEKEIEELKSERDTLLARIERMERRMQLVKKDNEKERHKLFQGYETEEREETELSEKIKLECQPELSETSQTLPPKPFSCGRSGKGHKRKSPFGSTERKTPVKKLAPEFSKVKTKTPKHSPIKEEPCGSLSETVCKRELRSQETPEKPRSSVDTPPRLSTPQKGPSTHPKEKAFSSEIEDLPYLSTTEMYLCRWHQPPPSPLPLRESSPKKEETVAIPSWRDHSVEPLRDPNPSDLLENLDDSVFSKRHAKLELDEKRRKRWDIQRIREQRILQRLQLRMYKKKGIQESEPEVTSFFPEPDDVESLMITPFLPVVAFGRPLPKLTPQNFELPWLDERSRCRLEIQKKQTPHRTCRK

SEQ ID NO: 47984 - protein, 290 aa, Homo sapiens
MQRPSLPDLSRPNTTSSTGMKHSSSAPPPPPPGRRANAPPTPLPMHSSKAPAYNREKPLPPTPGQRLHPGREGPPAPPPVKPPPSPVNIRTGPSGQSLAPPPPPYRQPPGVPNGPSSPTNESAPELPQRHNSLHRKTPGPVRGLAPPPPTSASPSLLSNRPPPPARDPPSRGAAPPPPPPVIRNGARDAPPPPPPYRMHGSEPPSRGKPPPPPSRTPAGPPPPPPPPLRNGHRDSITTVRSFLDDFESKYSFHPVEDFPAPEEYKHFQRIYPSKTNRAARGAPPLPPILR

SEQ ID NO: 47985 - protein, 338 aa, Homo sapiens [sequence omitted]

SEQ ID NO: 47986 - protein, 290 aa, Homo sapiens
MRYSRKVWDQVKASNPDLKLWEIGKIIGGMWRDLTDEEKQEYLNEYEAEKIEYNESMKAYHNSPAYLAYINAKSRAEAALEEESRQRQSRMEKGEPYMSIQPAEDPDDYDDGFSMKHTATARFQRNHRLISEILSESVVPDVRSVVTTARMQVLKRQVQSLMVHQRKLEAELLQIEERHQEKKRKFLESTDSFNNELKRLCGLKVEVDMEKIAAEIAQAEEQARKRQEEREKEAAEQAERSQSSIVPEEEQAANKGEEKKDDENIPMETEKNCQLCPRKTLTSRYTDFPD

SEQ ID NO: 47987 - protein, 317 aa, Homo sapiens [sequence omitted]

SEQ ID NO: 47988 - protein, 286 aa, Homo sapiens
MRQPGRVQEIVGALRKGGGDRLQVISDFDMTLSRFAYNGKRCPSSYNILDNSKIISEECRKELTALLHHYYPIEIDPHRTVKEKLPHMVEWWTKAHNLLCQQKIQKFQIAQVVRESNAMLREGYKTFFNTLYHNNIPLFIFSAGIGDILEEIIRQMKVFHPNIHIVSNYMDFNEDGFLQGFKGQLIHTYNKNSSACENSGYFQQLEGKTNVILLGDSIGDLTMADGVPGVQNILKIGFLNDKVEERRERYMDSYDIVLEKDETLDVVNGLLQHILCQGVQLEMQGP

SEQ ID NO: 47989 - protein, 421 aa, Homo sapiens
MLGRFREALGDAQQSVRLDDSFVRGHLREGKCHLSLGNAMAACRSFQRALELDHKNAQAQQEFKNANAVMEYEKIAETDFEKRDFRKVVFCMDRALEFAPACHRFKILKAECLAMLGRYPEAQSVASDILRMDSTNADALYVRGLCLYYEDCIEKAVQFFVQALRMAPDHEKACIACRNAKALKAKKEDGNKAFKEGNYKLAYELYTEALGIDPNNIKTNAKLYCNRGTVNSKLRKLDDAIEDCTNAVKLDDTYIKAYLRRAQCYMDTEQYEEAVRDYEKVYQTEKTKEHKQLLKNAQLELKKSKRKDYYKILGVDKNASEDEIKKAYRKRALMHHPDRHSGASAEVQKEEEKKFKEVGEAFTILSDPKKKTRYDSGQDLDEEGMNMGDFDPNNIFKAFFGGPGGFSFEASGPGNFFFQFG

SEQ ID NO: 47990 - protein, 321 aa, Homo sapiens
MLGRFREALGDAQQSVRLDDSFVRGHLREGKCHLSLGNAMAACRSFQRALELDHKNAQAQQEFKNANAVMEYEKIAETDFEKRDFRKVVFCMDRALEFAPACHRFKILKAECLAMLGRYPEAQSVASDILRMDSTNADALYVRGLCLYYEDCIEKAVQFFVQALRMAPDHEKACIACRNAKALKAKKEDGNKAFKEGNYKLAYELYTEALGIDPNNIKTNAKLYCNRGTVNSKLRKLDDAIEDCTNAVKLDDTYIKAYLRRAQCYMDTEQYEEAVRDYEKVYQTEKTKDFDPNNIFKAFFGGPGGFSFEASGPGNFFFQFG

SEQ ID NO: 47991 - protein, 337 aa, Homo sapiens
MAATEPELLDDQEAKREAETFKEQGNAYYAKKDYNEAYNYYTKAIDMCPKNASYYGNRAATLMMLGRFREALGDAQQSVRLDDSFVRGHLREGKCHLSLGNAMAACRSFQRALELDHKNAQAQQEFKNANAVMEYEKIAETDFEKRDFRKVVFCMDRALEFAPACHRFKILKAECLAMLGRYPEAQSVASDILRMDSTNADALYVRGLCLYYEDCIEKAVQFFVQALRMAPDHEKACIACRNAKALKAKKEDGNKAFKEGNYKLAYELYTEALGIDPNNIKTNAKLYCNRGTVNSKLRKLDDAIEDCTNAVKLDDTYIKAYLRRAQWWDCSSPRLSL

SEQ ID NO: 47992 - protein, 704 aa, Homo sapiens [sequence omitted]

SEQ ID NO: 47993 - protein, 520 aa, Homo sapiens
MSLEGPAQPQSSPVQATFEVLDFITHLYAGADVHRHLDVRILLTNIRTKSTFLPPLPTSVQNLAHPPEVVLTDFQTLDGSQYNPVKQQLVRYATSCYSCCPRLASVLLYSDYGIGEVPVEPLDVPLPSTIRPASPVAGSPKQPVRGYYRGAVGGTFDRLHNAHKVLLSVACILAQEQLVVGVADKDLLKSKLLPELLQPYTERVEHLSEFLVDIKPSLTFDVIPLLDPYGPAGSDPSLEFLVVSEETYRGGMAINRFRLENDLEELALYQIQLLKDLRHTENEEDKVSSSSFRQRMLGNLLRPPYERPELPTCLYVIGLTGISGSGKSSIAQRLKGLGAFVIDSDHLGHRAYAPGGPAYQPVVEAFGTDILHKDGIINRKVLGSRVFGNKKQLKILTDIMWPIIAKLAREEMDRAVAEGKRVCVIDAAVLLEAGWQNLVHEVWTAVIPETEAVRRIVERDGLSEAAAQSRLQSQMSGQQLVEQSHVVLSTLWEPHITQRQVEKAWALLQKRIPKTHQALD

SEQ ID NO: 47994 - protein, 715 aa, Homo sapiens
MRLRQLKRLQANMGAKALYVANFAKVQEKTQILNEEWKKLRVQPVQSMKPCTIESIFPGFASQHMLMRSLNTVALVPIMYSWSPLQQNFMVEDETVLCNIPYMGDEVKEEDETFIEELINNYDGKVHGEEEMIPGSVLISDAVFLELVDALNQYSDEEEEGHNDTSDGKQDDSKEDLPVTRKRKRHAIEGNKKSSKKQFPNDMIFSAIASMFPENGVPDDMKERYRELTEMSDPNALPPQCTPNIDGPNAKSVQREQSLHSFHTLFCRRCFKYDCFLHPFHATPNVYKRKNKEIKIEPEPCGTDCFLLLEGAKEYAMLHNPRSKCSGRRRRRHHIVSASCSNASASAVAETKEGDSDRDTGNDWASSSSEANSRCQTPTKQKASPAPPQLCVVEAPSEPVEWTGAEESLFRVFHGTYFNNFCSIARLLGTKTCKQVFQFAVKESLILKLPTDELMNPSQKKKRKHRLWAAHCRKIQLKKDNSSTQVYNYQPCDHPDRPCDSTCPCIMTQNFCEKFCQCNPDCQNRFPGCRCKTQCNTKQCPCYLAVRECDPDLCLTCGASEHWDCKVVSCKNCSIQRGLKKHLLLAPSDVAGWGTFIKESVQKNEFISEYCGELISQDEADRRGKVYDKYMSSFLFNLNNDFVVDATRKGNKIRFANHSVNPNCYAKVVMVNGDHRIGIFAKRAIQAGEELFFDYRYSQADALKYVGIERETDVL

SEQ ID NO: 47995 - protein, 540 aa, Homo sapiens
MIPGSVLISDAVFLELVDALNQYSDEEEEGHNDTSDGKQDDSKEDLPVTRKRKRHAIEGNKKSSKKQFPNDMIFSAIASMFPENGVPDDMKERYRELTEMSDPNALPPQCTPNIDGPNAKSVQREQSLHSFHTLFCRRCFKYDCFLHPFHATPNVYKRKNKEIKIEPEPCGTDCFLLLEGAKEYAMLHNPRSKCSGRRRRRHHIVSASCSNASASAVAETKEGDSDRDTGNDWASSSSEANSRCQTPTKQKASPAPPQLCVVEAPSEPVEWTGAEESLFRVFHGTYFNNFCSIARLLGTKTCKQVFQFAVKESLILKLPTDELMNPSQKKKRKHRLWAAHCRKIQLKKDNSSTQVYNYQPCDHPDRPCDSTCPCIMTQNFCEKFCQCNPDCQNRFPGCRCKTQCNTKQCPCYLAVRECDPDLCLTCGASEHWDCKVVSCKNCSIQRGLKKHLLLAPSDVAGWGTFIKESVQKNEFISEYCGELISQDEADRRGKVYDKYMSSFLFNLNNDFVVDATRKGNKIRFANHSVNPNCYAKGESQ

SEQ ID NO: 47996 - protein, 362 aa, Homo sapiens
MSTESANSFTLIGEASDGGTMENLSRRLKVTGDLFDIMSGQTDVDHPLCEECTDTLLDQLDTQLNVTENECQNYKRCLEILEQMNEDDSEQLQMELKELALEEERLIQELEDVEKNRKIVAENLEKVQAEAERLDQEEAQYQREYSEFKRQQLELDDELKSVENQMRYAQTQLDKLKKTNVFNATFHIWHSGQFGTINNFRLGRLPSVPVEWNEINAAWGQTVLLLHALANKMGLKFQRYRLVPYGNHSYLESLTDKSKELPLYCSGGLRFFWDNKFDHAMVAFLDCVQQFKEEVEKGETRFCLPYRMDVEKGKIEDTGGSGGSYSIKTQFNSEEQWTKALKFMLTNLKWGLAWVSSQFYNK

SEQ ID NO: 47997 - protein, 268 aa, Homo sapiens
MRLWDLQQLRKELGDSPKDKVPFSVPKIPLVFRGHTQQDPEVPKSLVSNLRIHCPLLAGSALITFDDPKVAEQVLQQKEHTINMEECRLRVQVQPLELPMVTTIQVMMSSQLSGRRVLVTGFPASLRLSEEELLDKLEIFFGKTRNGGGDVDVRELLPGSVMLGFARDGVAQRLCQIGQFTVPLGGQQVPLRVSPYVNGEIQKAEIRSQPVPRSVLVLNIPDILDGPELHDVLEIHFQKPTRGGGEVEALTVVPQGQQGLAVFTSESG

SEQ ID NO: 47998 - protein, 1792 aa, Homo sapiens
MSLQESTRFSQLVEELLKIICAFQLDTGLEYANSYNFAKKENNSPEHLKDEVSIIQSMGYRNRAKRLLQSEPENPSLETSLSVQLSNLGTVRTLRTKQRIQPQKTSVYIELGSDSSEDTVNKATYCSVGDQELLQITPQGTRDEISLDSAKKAACEFSETDVTNTEHHQPSNNDLNTTEKRAAERHPEKYQGSSVSNLHVEPCGTNTHASSLQHENSSLLLTKDRMNVEKAEFCNKSKQPGLARSQHNRWAGSKETCNDRRTPSTEKKVDLNADPLCERKEWNKQKLPCSENPRDTEDVPWITLNSSIQKVNEWFSRSDELLGSDDSHDGESESNAKVADVLDVLNEVDEYSGSSEKIDLLASDPHEALICKSERVHSKSVESNIEDKIFGKTYRKKASLPNLSHVTENLIIGAFVTEPQIIQERPLTNKLKRKRRPTSGLHPEDFIKKADLAVQKTPEMINQGTNQTEQNGQVMNITNSGHENKTKGDSIQNEKNPNPIESLEKESAFKTKAEPISSSISNMELELNIHNSKAPKKNRLRRKSSTRHIHALELVVSRNLSPPNCTELQIDSCSSSEEIKKKKYNQMPVRHSRNLQLMEGKEPATGAKKSNKPNEQTSKRHDSDTFPELKLTNAPGSFTKCSNTSELKEFVNPSLPREEKEEKLETVKVSNNAEDPKDLMLSGERVLQTERSVESSSISLVPGTDYGTQESISLLEVSTLGKAKTEPNKCVSQCAAFENPKGLIHGCSKDNRNDTEGFKYPLGHEVNHSRETSIEMEESELDAQYLQNTFKVSKRQSFAPFSNPGNAEEECATFSAHSGSLKKQSPKVTFECEQKEENQGKNESNIKPVQTVNITAGFPVVGQKDKPVDNAKCSIKGGSRFCLSSQFRGNETGLITPNKHGLLQNPYRIPPLFPIKSFVKTKCKKNLLEENFEEHSMSPEREMGNENIPSTVSTISRNNIRENVFKEASSSNINEVGSSTNEVGSSINEIGSSDENIQAELGRNRGPKLNAMLRLGVLQPEVYKQSLPGSNCKHPEIKKQEYEEVVQTVNTDFSPYLISDNLEQPMGSSHASQVCSETPDDLLDDGEIKEDTSFAENDIKESSAVFSKSVQKGELSRSPSPFTHTHLAQGYRRGAKKLESSEENLSSEDEELPCFQHLLFGKVNNIPSQSTRHSTVATECLSKNTEENLLSLKNSLNDCSNQVILAKASQEHHLSEETKCSASLFSSQCSELEDLTANTNTQDPFLIGSSKQMRHQSESQGVGLSDKELVSDDEERGTGLEENNQEEQSMDSNLGEAASGCESETSVSEDCSGLSSQSDILTTQQRDTMQHNLIKLQQEMAELEAVLEQHGSQPSNSYPSIISDSSALEDLRNPEQSTSEKAVLTSQKSSEYPISQNPEGLSADKFEVSADSSTSKNKEPGVERSSPSKCPSLDDRWYMHSCSGSLQNRNYPSQEELIKVVDVEEQQLEESGPHDLTETSYLPRQDLEGTPYLESGISLFSDDPESDPSEDRAPESARVGNIPSSTSALKVPQLKVAESAQSPAAAHTTDTAGYNAMEESVSREKPELTASTERVNKRMSMVVSGLTPEEFMLVYKFARKHHITLTNLITEETTHVVMKTDAEFVCERTLKYFLGIAGGKWVVSYFWVTQSIKERKMLNEHDFEVRGDVVNGRNHQGPKRARESQDRKIFRGLEICCYGPFTNMPTDQLEWMVQLCGASVVKELSSFTLGTGVHPIVVVQPDAWTEDNGFHAIGQMCEAPVVTREWVLDSVALYQCQELDTYLIPQIPHSHY

SEQ ID NO: 47999 - protein, 804 aa, Homo sapiens
MVSINSQGEYEEALKMAVKQGNQLQMQVHEGHHVVDEAPPPVVGAKRLAARAGKKPLAHYSSLVRVLGSDMKTPEDPAVQSFPLVPCDTDQPQDKPPDWFTSYLETFREQVVNETVEKLEQKLHEKLVLQNPSLGSCPSEVSMPTSEETLFLPENQFSWHIACNNCQRRIVGVRYQCSLCPSYNICEDCEAGPYGHDTNHVLLKLRRPVVGSSEPFCHSKYSTPRLPAALEQVRLQKQVDKNFLKAEKQRLRAEKKQRKAEVKELKKQLKLHRKIHLWNSIHGLQSPKSPLGRPESLLQSNTLMLPLQPCTSVMPMLSAAFVDENLPDGTHLQPGTKFIKHWRMKNTGNVKWSADTKLKFMWGNLTLASTEKKDVLVPCLKAGHVGVVSVEFIAPALEGTYTSHWRLSHKGQQFGPRVWCSIIVDPFPSEESPDNIEKGMISSSKTDDLTCQQEETFLLAKEERQLGEVTEQTEGTAACIPQKAKNVASERELYIPSVDLLTAQDLLSFELLDINIVQELERVPHNTPVDVTPCMSPLPHDSPLIEKPGLGQIEEENEGAGFKALPDSMVSVKRKAENIASVEEAEEDLSGTQFVCETVIRSLTLDAAPDHNPPCRQKSLQMTFALPEGPLGNEKEEIIHIAEEEAVMEEEEDEEDEEEEDELKDEVQSQSSASSEDYIIILPECFDTSRPLGDSMYSSALSQPGLERGAEGKPGVEAGQEPAEAGERLPGGENQPQEHSISDILTTSQTLETVPLIPEVVELPPSLPRSSPCVHHHGSPGVDLPVTIPEVSSVPDQIRGANNF

SEQ ID NO: 48000 - protein, 897 aa, Homo sapiens
MAVKQGNQLQMQVHEGHHVVDEAPPPVVGAKRLAARAGKKPLAHYSSLVRVLGSDMKTPEDPAVQSFPLVPCDTDQPQDKPPDWFTSYLETFREQVVNETVEKLEQKLHEKLVLQNPSLGSCPSEVSMPTSEETLFLPENQFSWHIACNNCQRRIVGVRYQCSLCPSYNICEDCEAGPYGHDTNHVLLKLRRPVVGSSEPFCHSKYSTPRLPAALEQVRLQKQVDKNFLKAEKQRLRAEKKQRKAEVKELKKQLKLHRKIHLWNSIHGLQSPKSPLGRPESLLQSNTLMLPLQPCTSVMPMLSAAFVDENLPDGTHLQPGTKFIKHWRMKNTGNVKWSADTKLKFMWGNLTLASTEKKDVLVPCLKAGHVGVVSVEFIAPALEGTYTSHWRLSHKGQQFGPRVWCSIIVDPFPSEESPDNIEKGMISSSKTDDLTCQQEETFLLAKEERQLGEVTEQTEGTAACIPQKAKNVASERELYIPSVDLLTAQDLLSFELLDINIVQELERVPHNTPVDVTPCMSPLPHDSPLIEKPGLGQIEEENEGAGFKALPDSMVSVKRKAENIASVEEAEEDLSGTQFVCETVIRSLTLDAAPDHNPPCRQKSLQMTFALPEGPLGNEKEEIIHIAEEEAVMEEEEDEEDEEEEDELKDEVQSQSSASSEDYIIILPECFDTSRPLGDSMYSSALSQPGLERGAEGKPGVEAGQEPAEAGERLPGGENQPQEHSISDILTTSQTLETVPLIPEVVELPPSLPRSSPCVHHHGSPGVDLPVTIPEVSSVPDQIRGEPRGSSGLVNSRQKSYDHSRHHHGSSIAGGLVKGALSVAASAYKALFAGPPVTAQPIISEDQTAALMAHLFEMGFCDRQLNLRLLKKHNYNILQVVTELLQLNNNDWYSQRY

SEQ ID NO: 48001 - protein, 1113 aa, Homo sapiens
MSGREPSLEILPRTSLHSIPVTVEVKPVLPRAMPSSMGGGGGGSPSPVELRGALVGSVDPTLREQQLQQELLALKQQQQLQKQLLFAEFQKQHDHLTRQHEVQLQKHLKQQQEMLAAKQQQEMLAAKRQQELEQQRQREQQRQEELEKQRLEQQLLILRNKEKSKESAIASTEVKLRLQEFLLSKSKEPTPGGLNHSLPQHPKCWGAHHASLDQSSPPQSGPPGTPPSYKLPLPGPYDSRDDFPLRKTASEPNLKVRSRLKQKVAERRSSPLLRRKDGTVISTFKKRAVEITGAGPGASSVCNSAPGSGPSSPNSSHSTIAENGFTGSVPNIPTEMLPQHRALPLDSSPNQFSLYTSPSLPNISLGLQATVTVTNSHLTASPKLSTQQEAERQALQSLRQGGTLTGKFMSTSSIPGCLLGVALEGDGSPHGHASLLQHVLLLEQARQQSTLIAVPLHGQSPLVTGERVATSMRTVGKLPRHRPLSRTQSSPLPQSPQALQQLVMQQQHQQFLEKQKQQQLQLGKILTKTGELPRQPTTHPEETEEELTEQQEVLLGEGALTMPREGSTESESTQEDLEEEDEEDDGEEEEDCIQVKDEEGESGAEEGPDLEEPGAGYKKLFSDAQPLQPLQVYQAPLSLATVPHQALGRTQSSPAAPGGMKSPPDQPVKHLFTTGVVYDTFMLKHQCMCGNTHVHPEHAGRIQSIWSRLQETGLLSKCERIRGRKATLDEIQTVHSEYHTLLYGTSPLNRQKLDSKKLLGPISQKMYAVLPCGGIGVDSDTVWNEMHSSSAVRMAVGCLLELAFKVAAGELKNGFAIIRPPGHHAEESTAMGFCFFNSVAITAKLLQQKLNVGKVLIVDWDIHHGNGTQQAFYNDPSVLYISLHRYDNGNFFPGSGAPEEVGGGPGVGYNVNVAWTGGVDPPIGDVEYLTAFRTVVMPIAHEFSPDVVLVSAGFDAVEGHLSPLGGYSVTARCFGHLTRQLMTLAGGRVVLALEGGHDLTAICDASEACVSALLSVELQPLDEAVLQQKPNINAVATLEKVIEIQSKHWSCVQKFAAGLGRSLREAQAGETEEAETVSAMALLSVGAEQAQAAAAREHSPRPAEEPMEQEPAL

SEQ ID NO: 48002 - protein, 262 aa, Homo sapiens
MLESLLPGIRDLSLPPVDRLGLQNDLFSLARAGIISTVEVLKVMEAFVNEPNYTVWSDLSCNLGILSTLLSHTDFYEEIQEFVKDVFSPIGERLGWDPKPGEGHLDALLRGLVLGKLGKAGHKATLEEARRRFKDHVEGKQILSADLRSPVYLTVLKHGDGTTLDIMLKLHKQADMQEEKNRIERVLGATLLPDLIQKVLTFALSEEVRPQDTVSVIGGVAGGSKHGRKAAWKFIKDNWEELYNRYQGGFLISRLIKVCEKL

SEQ ID NO: 48003 - protein, 138 aa, Homo sapiens
MGILRDKESGICMDSGGFRTTASMVSVLPQDPTQPCVHFLTATPDPSRSVFKPFIFGMGVAQAPQVLSPTFGAQDPVRTLPRFQTQDRGQQLQQKQQDLEQEGLEATQGLLAGEWAPPLWELGSLFQAFVKRESQAYA

SEQ ID NO: 48004 - protein, 606 aa, Homo sapiens
MAATAAVSPSDYLQPAASTTQDSQPSPLALLAATCSKIGPPAVEAAVTPPAPPQPTPRKLVPIKPAPLPLSPGKNSFGILSSKGNILQIQGSQLSASYPGGQLVFAIQNPTMINKGTRSNANIQYQAVPQIQASNSQTIQVQPNLTNQIQIIPGTNQAIITPSPSSHKPVPIKPAPIQKSSTTTTPVQSGANVVKLTGGGGNVTLTLPVNNLVNASDTGAPTQLLTESPPTPLSKTNKKARKKSLPASQPPVAVAEQVETVLIETTADNIIQAGNNLLIVQSPGGGQPAVVQQVQVVPPKAEQQQVVQIPQQALRVVQAASATLPTVPQKPSQNFQIQAAEPTPTQVYIRTPSGEVQTVLVQDSPPATAAATSNTTCSSPASRAPHLSGTSKKHSAAILRKERPLPKIAPAGSIISLNAAQLAAAAQAMQTININGVQVQGVPVTITNTGGQQQLTVQNVSGNNLTISGLSPTQIQLQMEQALAGETQPGEKRRRMACTCPNCKDGEKRSGEQGKKKHVCHIPDCGKTFRKTSLLRAHVRLHTGERPFVCNWFFCGKRFTRSDELQRHARTHTGDKRFECAQCQKRFMRSDHLTKHYKTHLVTKNL

SEQ ID NO: 48005 - protein, 43 aa, Homo sapiens
MSLSPLSPFCLFGGGEICRLPLALGLDVNIYYVCLFSPRRWLR

SEQ ID NO: 48006 - protein, 296 aa, Homo sapiens
MHSPLIHHIGWSRSIGHRFKRSDITKKQDGHFDTPPHLFAKVKEVDQSGEWFKEGMKLEAIDPLNLSTICVATIRKVLADGFLMIGIDGSEAADGSDWFCYHATSPSIFPVGFCEINMIELTPPRGYTKLPFKWFDYLRETGSIAAPVKLFNKDVPNHGFRVGMKLEAVDLMEPRLICVATVTRIIHRLLRIHFDGWEEEYDQWVDCESPDLYPVGWCQLTGYQLQPPASQSSRENQSASSKQKKKAKSQQYKGHKKMTTLQLKEELLDGEDYNFLQGASDQESNGSANFYIKQEP

SEQ ID NO: 48007 - protein, 532 aa, Homo sapiens
MITIAKETGLGLKVLGGINRNEGPLVYIQEIIPGGDCYKDGRLKPGDQLVSVNKESMIGVSFEEAKSIITGAKLRLESAWEIAFIRQKSDNIQPENLSCTSLIEASGEYGPQASTLSLFSSPPEILIPKTSSTPKTNNDILSSCEIKTGYNKTVQIPITSENSTVGLSNTDVASAWTENYGLQEKISLNPSVRFKAEKLEMALNYLGIQPTKEQHQALRQQVQADSKGTVSFGDFVQVARNLFCLQLDEVNVGAHEISNILDSQLLPCDSSEADEMERLKCERDDALKEVNTLKEKLLESDKQRKQLTEELQNVKQEAKAVVEETRALRSRIHLAEAAQRQAHGMEMDYEEVIRLLEAKITELKAQLADYSDQNKESVQDLKKRIMVLDCQLRKSEMARKTFEASTEKLLHFVEAIQEVFSDNSTPLSNLSERRAVLASQTSLTPLGRNGRSIPATLALESKELVKSVRALLDMDCLPYGWEEAYTADGIKYFINHVTQTTSWIHPVMSVLNLSRSEENEEDCSRELPNQKS

SEQ ID NO: 48008 - protein, 276 aa, Homo sapiens
MRDPTTKRSRGFGFVTFADPASVDKVLGQPHHELDSKTIDPKVAFPRRAQPKMVTRTKKIFVGGLSANTVVEDVKQYFEQFGKVEDAMLMFDKTTNRHRGFGFVTFENEDVVEKVCEIHFHEINNKMVECKKAQPKEVMFPPGTRGRARGLPYTMDAFMLGMGMLGYPNFVATYGRGYPGFAPSYGYQFPGFPAAAYGPVAAAAVAAARGSGSNPARPGGFPGANSPGPVADLYGPASQDSGVGNYISAASPQPGSGFGHGIAGPLIATAFTNGYH

SEQ ID NO: 48009 - protein, 223 aa, Homo sapiens
MAHSAYQSNLPHNYTMTVHKNQLAQALRVYSQHARGPAFHKYAMQLHEDCYKFWSNGHQLCEERSLTDQHCVHKFHSLPKSGEKPEADRNPPVLYHNSRARSTGACNCGRKQAPRDDPFDIKAANYDFYQLLEEKCCGKLDHINFPVFEPSTPDPAPAKNESSPAPPDSDADKLKEKEPQTQGESTSLSLALSLGQSTDSLGSARPTTMSGILPRKTRNHPST

SEQ ID NO: 48010 - protein, 1313 aa, Homo sapiens
MVVALLEVWKDNRTDDIPELHMDLSDIVEGILNAHDTTKMGHLTLEDYQIWSVKNVLANEFLNLLFQVCHIVLGLRPATPEEEGQIIRGWLERESRYGLQAGHNWFIISMQWWQQWKEYVKYDANPVVIEPSSVLNGGKYSFGTAAHPMEQVEDRIGSSLSYVNTTEEKFSDNISTASEASETAGSGFLYSATPGADVCFARQHNTSDNNNQCLLGANGNILLHLNPQKPGAIDNQPLVTQEPVKATSLTLEGGRLKRTPQLIHGRDYEMVPEPVWRALYHWYGANLALPRPVIKNSKTDIPELELFPRYLLFLRQQPATRTQQSNIWVNMGNVPSPNAPLKRVLAYTGCFSRMQTIKEIHEYLSQRLRIKEEDMRLWLYNSENYLTLLDDEDHKLEYLKIQDEQHLVIEVRNKDMSWPEEMSFIANSSKIDRHKVPTEKGATGLSNLGNTCFMNSSIQCVSNTQPLTQYFISGRHLYELNRTNPIGMKGHMAKCYGDLVQELWSGTQKNVAPLKLRWTIAKYAPRFNGFQQQDSQELLAFLLDGLHEDLNRVHEKPYVELKDSDGRPDWEVAAEAWDNHLRRNRSIVVDLFHGQLRSQVKCKTCGHISVRFDPFNFLSLPLPMDSYMHLEITVIKLDGTTPVRYGLRLNMDEKYTGLKKQLSDLCGLNSEQILLAEVHGSNIKNFPQDNQKVRLSVSGFLCAFEIPVPVSPISASSPTQTDFSSSPSTNEMFTLTTNGDLPRPIFIPNGMPNTVVPCGTEKNFTNGMVNGHMPSLPDSPFTGYIIAVHRKMMRTELYFLSSQKNRPSLFGMPLIVPCTVHTRKKDLYDAVWIQVSRLASPLPPQEASNHAQDCDDSMGYQYPFTLRVVQKDGNSCAWCPWYRFCRGCKIDCGEDRAFIGNAYIAVDWDPTALHLRYQTSQERVVDEHESVEQSRRAQAEPINLDSCLRAFTSEEELGENEMYYCSKCKTHCLATKKLDLWRLPPILIIHLKRFQFVNGRWIKSQKIVKFPRESFDPSAFLVPRDPALCQHKPLTPQGDELSEPRILAREVKKVDAQSSAGEEDVLLSKSPSSLSANIISSPKGSPSSSRKSGTSCPSSKNSSPNSSPRTLGRSKGRLRLPQIGSKNKLSSSKENLDASKENGAGQICELADALSRGHVLGGSQPELVTPQDHEVALANGFLYEHEACGNGYSNGQLGNHSEEDSTDDQREDTRIKPIYNLYAISCHSGILGGGHYVTYAKNPNCKWYCYNDSSCKELHPDEIDTDSAYILFYEQQGIDYAQFLPKTDGKKMADTSSMDEDFESDYKKYCVLQ

SEQ ID NO: 48011 - protein, 918 aa, Homo sapiens
MESVVTFLQDVVPQAYSGTPLTEEKEKIVWVRFENADLNDTSRNLEFHEIHSTGNEPPLLIMIGYSDGMQVWSIPISGEAQELFSVRHGPIRAARILPAPQFGAQKCDNFAEKRPLLGVCKSIGSSGTSPPYCCVDLYSLRTGEMVKSIQFKTPIYDLHCNKRILVVVLQEKIAAFDSCTFTKKFFVTSCYPCPGPNMNPIALGSRWLAYAENKLIRCHQSRGGACGDNIQSYTATVISAAKTLKSGLTMVGKVVTQLTGTLPSGVTEDDVAIHSNSRRSPLVPGIITVIDTETVGEGQVLVSEDSDSDGIVAHFPAHEKPVCCMAFNTSGMLLVTTDTLGHDFHVFQILTHPWSSSQCAVHHLYTLHRGETEAKVQDICFSHDCRWVVVSTLRGTSHVFPINPYGGQPCVRTHMSPRVVNRMSRFQKSAGLEEIEQELTSKQGGRCSPVPGLSSSPSGSPLHGKLNSQDSYNNFTNNNPGNPRLSPLPSLMVVMPLAQIKQPMTLGTITKRTGPYLFGAGCFSIKAPCKVKPPPQISPSKSMGGEFCVAAIFGTSRSWFANNAGLKREKDQSKQVVVESLYIISCYGTLVEHMMEPRPLSTAPKISDDTPLEMMTSPRASWTLVRTPQWNELQPPFNANHPLLLAADAVQYYQFLLAGLVPPGSPGPITRHGSYDSLASDHSGQEDEEWLSQVEIVTHTGPHRRLWMGPQFQFKTIHPSGQTTVISSSSSVLQSHGPSDTPQPLLDFDTDDLDLNSLRIQPVRSDPVSMPGSSRPVSDRRGVSTVIDAASGTFDRSVTLLEVCGSWPEGFGLRHMSSMEHTEEGLRERLADAMAESPSRDVVGSGTDTALDVAVKTFPPERHVAVKCFELQREGSIETLSNSSGSTSGSIPRNFDGYRSPLPTNESQPLSLFPTGFP

SEQ ID NO: 48012 - protein, 1983 aa, Homo sapiens
MLLTGGKSSRKNRSSDGGSEEPPDRRQSSVDSRQSRSGQGGISTESDCAFEPDYAVPPLPVSEGDAEQELGPPPSVDEAANTLMTRLGFLLGEKVTEVQPGDQYSMEVQDENQTSAITQRISPCSTLTSSTASPPASSPCSTLPPISTNATAKDCSYGAVTSPTSTLESRDSGIIATLTSYSENVERTKYAGESSKELGSGGNIKPWQSQKSSMDSCLYRVDENMTASTYSLNKIPERNLETVLSQSVQSIPLYLMPRPNSVAATSSAHLEDLAYLDEQRHTPLRTSLRMPRQSMGGARTQQDLRVRFAPYRPPDISLKPLLFEVPSITTESVFVGRDWVFHEIDAQLQSSNASVNQGVVIVGNIGFGKTAIISRLVALSCHGTRMRQIASDSPHASPKHVDANRELPLTQPPSAHSSITSGSCPGTPEMRRRQEEAMRRLASQVVAYHYCQADNAYTCLVPEFVHNVAALLCRSPQLTAYREQLLREPHLQSMLSLRSCVQDPMASFRRGVLEPLENLHKERKIPDEDFIILIDGLNEAEFHKPDYGDTIVSFLSKMIGKFPSWLKLIVTVRTSLQEITKLLPFHRIFLDRLEENEAIDQDLQAYILHRIHSSSEIQNNISLNGKMDNTTFGKLSSHLKTLSQGSYLYLKLTFDLIEKGYLVLKSSSYKVVPVSLSEVYLLQCNMKFPTQSSFDRVMPLLNVAVASLHPLTDEHIFQAINAGSIEGTLEWEDFQQRMENLSMFLIKRRDMTRMFVHPSFREWLIWREEGEKTKFLCDPRSGHTLLAFWFSRQEGKLNRQQTIELGHHILKAHIFKGLSKKVGVSSSILQGLWISYSTEGLSMALASLRNLYTPNIKVSRLLILGGANINYRTEVLNNAPILCVQSHLGYTEMVALLLEFGANVDASSESGLTPLGYAAAAGYLSIVVLLCKKRAKVDHLDKNGQCALVHAALRGHLEVVKFLIQCDWTMAGQQQGVFKKSHAIQQALIAAASMGYTEIVSYLLDLPEKDEEEVERAQINSFDSLWGETALTAAAGRGKLEVCRLLLEQGAAVAQPNRRGAVPLFSTVRQGHWQIVDLLLTHGADVNMADKQGRTPLMMAASEGHLGTVDFLLAQGASIALMDKEGLTALSWACLKGHLSVVRSLVDNGAATDHADKNGRTPLDLAAFYGDAEVVQFLVDHGAMIEHVDYSGMRPLDRAVGCRNTSVVVTLLKKGAKIGPATWAMATSKPDIMIILLSKLMEEGDMFYKKGKVKEAAQRYQYALKKFPREGFGEDLKTFRELKVSLLLNLSRCRRKMNDFGMAEEFATKALELKPKSYEAYYARARAKRSSRQFAAALEDLNEAIKLCPNNREIQRLLLRVEEECRQMQQPQQPPPPPQPQQQLPEEAEPEPQHEDIYSVQDIFEEEYLEQDVENVSIGLQTEARPSQGLPVIQSPPSSPPHRDSAYISSSPLGSHQVFDFRSSSSVGSPTRQTYQSTSPALSPTHQNSHYRPSPPHTSPAHQGGSYRFSPPPVGGQGKEYPSPPPSPLRRGPQYRASPPAESMSVYRSQSGSPVRYQQETSVSQLPGRPKSPLSKMAQRPYQMPQLPVAVPQQGLRLQPAKAQIVRSNQPSPAVHSSTVIPTGAYGQVAHSMASKYQSSQGDIGVSQSRLVYQGSIGGIVGDGRPVQHVQASLSAGAICQHGGLTKEDLPQRPSSAYRGGVRYSQTPQIGRSQSASYYPVCHSKLDLERSSSQLGSPDVSHLIRRPISVNPNEIKPHPPTPRPLLHSQSVGLRFSPSSNSISSTSNLTPTFRPSSSIQQMEIPLKPAYERSCDELSPVSPTQGGYPSEPTRSRTTPFMGIIDKTARTQQYPHLHQQNRTWAVSSVDTVLSPTSPGNLPQPESFSPPSSISNIAFYNKTNNAQNGHLLEDDYYSPHGMLANGSRGDLLERVSQASSYPDVKVARTLPVAQAYQDNLYRQLSRDSRQGQTSPIKPKRPFVESNV

SEQ ID NO: 48013 - protein, 435 aa, Homo sapiens
MEDSVTESPQRVIITEDDEDETTVELEGQDENQEGDFEDADTQEGDTESEPYDDEEFEGYEDKPDTSSSKNKDPITIVDVPAHLQNSWESYYLEILMVTGLLAYIMNYIIGKNKNSRLAQAWFNTHRELLESNFTLVGDDGTNKEATSTGKLNQENEHIYNLWCSGRVCCEGMLIQLRFLKRQDLLNVLARMMRPVSDQVQIKVTMNDEDMDTYVFAVGTRKALVRLQKEMQDLSEFCSDKPKSGAKYGLPDSLAILSEMGEVTDGMMDTKMVHFLTHYADKIESVHFSDQFSGPKIMQEEGQPLKLPDTKRTLLFTFNVPGSGNTYPKDMEALLPLMNMVIYSIDKAKKFRLNREGKQKADKNRARVEENFLKLTHVQRQEAAQSRREEKKRAEKERIMNEEDPEKQRRLEVRQTYHWGKTTICKDDCLCSVGC

SEQ ID NO: 48014 - protein, 709 aa, Homo sapiens
MALRLACDFLARGGSFITKVFRSRDYQPLLWIFQQLFRRVQATKPQASRHESAEIFVVCQGFLAPDKVDSKFFDPKFAFKEVEVQAKTVTELVTKKKPKAEGYAEGDLTLYHRTSVTDFLRAANPVDFLSKASEIMVDDEELAQHPATTEDIRVCCQDIRVLGRKELRSLLNWRTKLRRYVAKKLKEQAKALDISLSSGEEDEGDEEDSTAGTTKQPSKEEEEEEEEEQLNQTLAEMKAQEVAELKRKKKKLLREQRKQRERVELKMDLPGVSIADEGETGMFSLSTIRGHQLLEEVTQGDMSAADTFLSDLPRDDIYVSDVEDDGDDTSLDSDLDPEELAGVRGHQGLRDQKRMRLTEVQDDKEEEEEENPLLVPLEEKAVLQEEQANLWFSKGSFAGIEDDADEALEISQAQLLFENRRKGRQQQQKQQLPQTPPSCLKTEIMSPLYQDEAPKGTEASSGTEAATGLEGEEKDGISDSDSSTSSEEEESWEPLRGKKRSRGPKSDDDGFEIVPIEDPAKHRILDPEGLALGAVIASSKKAKRDLIDNSFNRYTFNEDEGELPEWFVQEEKQHRIRQLPVGKKEVEHYRKRWREINARPIKKVAEAKARKKRRMLKRLEQTRKKAEAVVNTVDISEREKVAQLRSLYKKAGLGKEKRHVTYVVAKKGVGRKVRRPAGVRGHFKVVDSRMKKDQRAQQRKEQKKKHKRK

SEQ ID NO: 48015 - protein, 914 aa, Homo sapiens
MKTLVKSLSTDTSRQESDTVSYKPPDSKLNLHLFKQFTQPRNTGGDSKTAPSSPLTSPSDTRSFFKVPEMEAKIEDTKRRLSEVIYEPFQLLSKIIGEESGSHRPKALSSSASELSNLSSLNGHLESNNNYSIKEEECDSEGDGYGSDSNIPRSDHPKSTGEPTREIELKSSQGSSLKDLGLKTSSLVLEKCSLSALVSKEDEEFCELYTEDFDLETEGESKVDKLSDIPLKPEVLAEDGVVLDSEDEVDSAVQHPELPVKTLGFFIMCVYVYLILPLPHYVSGLFLGIGLGFMTAVCVIWFFTPPSAHKYHKLHKNLRHWNTRSLDIKEPEILKGWMNEIYNYDPETYHATLTHSVFVRLEGGTLRLSKPNKNISRRASYNEPKPEVTYISQKIYDLSDSKIYLVPKTLARKRIWNKKYPICIELGQQDDFMSKAQTDKETSEEKPPAEGSEDPKKPPRPQEGTRSSQRDQILYLFGRTGREKEEWFRRFILASKLKSEIKKSSGVSGGKPGLLPAHSRHNSPSGHLTHSRSSSKGSVEEIMSQPKQKELAGSVRQKMLLDYSVYMGRCVPQESRSPQRSPLQSAESSPTAGKKLPEVPPSEEEEQEAWVNALLGRIFWDFLGEKYWSDLVSKKIQMKLSKIKLPYFMNELTLTELDMGVAVPKILQAFKPYVDHQGLWIDLEMSYNGSFLMTLETKMNLTKLGKEPLVEALKVGEIGKEGCRPRAFCLADSDEESSSAGSSEEDDAPEPSGGDKQLLPGAEGYVGGHRTSKIMRFVDKITKSKYFQKATETEFIKKKIEEVSNTPLLLTVEVQECRGTLAVNIPPPPTDRVWYGFRKPPHVELKARPKLGEREVTLVHVTDWIEKKLEQEFQKVFVMPNMDDVYITIMHSAMDPRSTSCLLKDPPVEAADQP

SEQ ID NO: 48016 - protein, 898 aa, Homo sapiens [sequence omitted]

SEQ ID NO: 48017 - protein, 2868 aa, Homo sapiens
MEDDDDDASYCTESSFRSHSTYSSTPGRRKPRVHRPRSPILEEKDIPPLEFPKSSEDLMVPNEHIMNVIAIYEVLRNFGTVLRLSPFRFEDFCAALVSQEQCTLMAEMHVVLLKAVLREEDTSNTTFGPADLKDSVNSTLYFIDGMTWPEVLRVYCESDKEYHHVLPYQEAEDYPYGPVENKIKVLQFLVDQFLTTNIAREELMSEGVIQYDDHCRVCHKLGDLLCCETCSAVYHLECVKPPLEEVPEDEWQCEVCVAHKVPGVTDCVAEIQKNKPYIRHEPIGYDRSRRKYWFLNRRLIIEEDTENENEKKIWYYSTKVQLAELIDCLDKDYWEAELCKILEEMREEIHRHMDITEDLTNKARGSNKSFLAAANEEILESIRAKKGDIDNVKSPEETEKDKNETENDSKDAEKNREEFEDQSLEKDSDDKTPDDDPEQGKSEEPTEVGDKGNSVSANLGDNTTNATSEETSPSEGRSPVGCLSETPDSSNMAEKKVASELPQDVPEEPNKTCESSNTSATTTSIQPNLENSNSSSELNSSQSESAKAADDPENGERESHTPVSIQEEIVGDFKSEKSNGELSESPGAGKGASGSTRIITRLRNPDSKLSQLKSQQVAAAAHEANKLFKEGKEVLVVNSQGEISRLSTKKEVIMKGNINNYFKLGQEGKYRVYHNQYSTNSFALNKHQHREDHDKRRHLAHKFCLTPAGEFKWNGSVHGSKVLTISTLRLTITQLENNIPSSFLHPNWASHRANWIKAVQMCSKPREFALALAILECAVKPVVMLPIWRESLGHTRLHRMTSIEREEKEKVKKKEKKQEEEETMQQATWVKYTFPVKHQVWKQKGEEYRVTGYGGWSWISKTHVYRFVPKLPGNTNVNYRKSLEGTKNNMDENMDESDKRKCSRSPKKIKIEPDSEKDEVKGSDAAKGADQNEMDISKITEKKDQDVKELLDSDSDKPCKEEPMEVDDDMKTESHVNCQESSQVDVVNVSEGFHLRTSYKKKTKSSKLDGLLERRIKQFTLEEKQRLEKIKLEGGIKGIGKTSTNSSKNLSESPVITKAKEGCQSDSMRQEQSPNANNDQPEDLIQGCSESDSSVLRMSDPSHTTNKLYPKDRVLDDVSIRSPETKCPKQNSIENDIEEKVSDLASRGQEPSKSKTKGNDFFIDDSKLASADDIGTLICKNKKPLIQEESDTIVSSSKSALHSSVPKSTNDRDATPLSRAMDFEGKLGCDSESNSTLENSSDTVSIQDSSEEDMIVQNSNESISEQFRTREQDVEVLEPLKCELVSGESTGNCEDRLPVKGTEANGKKPSQQKKLEERPVNKCSDQIKLKNTTDKKNNENRESEKKGQRTSTFQINGKDNKPKIYLKGECLKEISESRVVSGNVEPKVNNINKIIPENDIKSLTVKESAIRPFINGDVIMEDFNERNSSETKSHLLSSSDAEGNYRDSLETLPSTKESDSTQTTTPSASCPESNSVNQVEDMEIETSEVKKVTSSPITSEEESNLSNDFIDENGLPINKNENVNGESKRKTVITEVTTMTSTVATESKTVIKVEKGDKQTVVSSTENCAKSTVTTTTTTVTKLSTPSTGGSVDIISVKEQSKTVVTTTVTDSLTTTGGTLVTSMTVSKEYSTRDKVKLMKFSRPKKTRSGTALPSYRKFVTKSSKKSIFVLPNDDLKKLARKGGIREVPYFNYNAKPALDIWPYPSPRPTFGITWRYRLQTVKSLAGVSLMLRLLWASLRWDDMAAKAPPGGGTTRTETSETEITTTEIIKRRDVGPYGIRSEYCIRKIICPIGVPETPKETPTPQRKGLRSSALRPKRPETPKQTGPVIIETWVAEEELELWEIRAFAERVEKEKAQAVEQQAKKRLEQQKPTVIATSTTSPTSSTTSTISPAQKVMVAPISGSVTTGTKMVLTTKVGSPATVTFQQNKNFHQTFATWVKQGQSNSGVVQVQQKVLGIIPSSTGTSQQTFTSFQPRTATVTIRPNTSGSGGTTSNSQVITGPQIRPGMTVIRTPLQQSTLGKAIIRTPVMVQPGAPQQVMTQIIRGQPVSTAVSAPNTVSSTPGQKSLTSATSTSNIQSSASQPPRPQQGQVKLTMAQLTQLTQGHGGNQGLTVVIQGQGQTTGQLQLIPQGVTVLPGPGQQLMQAAMPNGTVQRFLFTPLATTATTASTTTTTVSTTAAGTGEQRQSKLSPQMQVHQDKTLPPAQSSSVGPAEAQPQTAQPSAQPQPQTQPQSPAQPEVQTQPEVQTQTTVSSHVPSEAQPTHAQSSKPQVAAQSQPQSNVQGQSPVRVQSPSQTRIRPSTPSQLSPGQQSQVQTTTSQPIPIQPHTSLQIPSQGQPQSQPQVQSSTQTLSSGQTLNQVTVSSPSRPQLQIQQPQPQVIAVPQLQQQVQVLSQIQSQVVAQIQAQQSGVPQQIKLQLPIQIQQSSAVQTHQIQNVVTVQAASVQEQLQRVQQLRDQQQKKKQQQIEIKREHTLQASNQSEIIQKQVVMKHNAVIEHLKQKKSMTPAEREENQRMIVCNQVMKYILDKIDKEEKQAAKKRKREESVEQKRSKQNATKLSALLFKHKEQLRAEILKKRALLDKDLQIEVQEELKRDLKIKKEKDLMQLAQATAVAAPCPPVTPAPPAPPAPPPSPPPPPAVQHTGLLSTPTLPAASQKRKREEEKDSSSKSKKKKMISTTSKETKKDTKLYCICKTPYDESKFYIGCDRCQNWYHGRCVGILQSEAELIDEYVCPQCQSTEDAMTVLTPLTEKDYEGLKRVLRSLQAHKMAWPFLEPVDPNDAPDYYGVIKEPMDLATMEERVQRRYYEKLTEFVADMTKIFDNCRYYNPSDSPFYQCAEVLESFFVQKLKGFKASRSHNNKLQSTAS

SEQ ID NO: 48018 - protein, 2783 aa, Homo sapiens
MEDDDDDASYCTESSFRSHSTYSSTPGRRKPRVHRPRSPILEEKDIPPLEFPKSSEDLMVPNEHIMNVIAIYEVLRNFGTVLRLSPFRFEDFCAALVSQEQCTLMAEMHVVLLKAVLREEDTSNTTFGPADLKDSVNSTLYFIDGMTWPEVLRVYCESDKEYHHVLPYQEAEDYPYGPVENKIKVLQFLVDQFLTTNIAREELMSEGVIQYDDHCRVCHKLGDLLCCETCSAVYHLECVKPPLEEVPEDEWQCEVCVAHKVPGVTDCVAEIQKNKPYIRHEPIGYDRSRRKYWFLNRRLIIEEDTENENEKKIWYYSTKVQLAELIDCLDKDYWEAELCKILEEMREEIHRHMDITEDLTNKARGSNKSFLAAANEEILESIRAKKGDIDNVKSPEETEKDKNETENDSKDAEKNREEFEDQSLEKDSDDKTPDDDPEQGKSEEPTEVGDKGNSVSANLGDNTTNATSEETSPSEGRSPVGCLSETPDSSNMAEKKVASELPQDVPEEPNKTCESSNTSATTTSIQPNLENSNSSSELNSSQSESAKAADDPENGERESHTPVSIQEEIVGDFKSEKSNGELSESPGAGKGASGSTRIITRLRNPDSKLSQLKSQQVAAAAHEANKLFKEGKEVLVVNSQGEISRLSTKKEVIMKGNINNYFKLGQEGKYRVYHNQYSTNSFALNKHQHREDHDKRRHLAHKFCLTPAGEFKWNGSVHGSKVLTISTLRLTITQLENNIPSSFLHPNWASHRANWIKAVQMCSKPREFALALAILECAVKPVVMLPIWRESLGHTRLHRMTSIEREEKEKVKKKEKKQEEEETMQQATWVKYTFPVKHQVWKQKGEEYRVTGYGGWSWISKTHVYRFVPKLPGNTNVNYRKSLEGTKNNMDENMDESDKRKCSRSPKKIKIEPDSEKDEVKGSDAAKGADQNEMDISKITEKKDQDVKELLDSDSDKPCKEEPMEVDDDMKTESHVNCQESSQVDVVNVSEGFHLRTSYKKKTKSSKLDGLLERRIKQFTLEEKQRLEKIKLEGGIKGIGKTSTNSSKNLSESPVITKAKEGCQSDSMRQEQSPNANNDQPEDLIQGCSESDSSVLRMSDPSHTTNKLYPKDRVLDDVSIRSPETKCPKQNSIENDIEEKVSDLASRGQEPSKSKTKGNDFFIDDSKLASADDIGTLICKNKKPLIQEESDTIVSSSKSALHSSVPKSTNDRDATPLSRAMDFEGKLGCDSESNSTLENSSDTVSIQDSSEEDMIVQNSNESISEQFRTREQDVEVLEPLKCELVSGESTGNCEDRLPVKGTEANGKKPSQQKKLEERPVNKCSDQIKLKNTTDKKNNENRESEKKGQRTSTFQINGKDNKPKIYLKGECLKEISESRVVSGNVEPKVNNINKIIPENDIKSLTVKESAIRPFINGDVIMEDFNERNSSETKSHLLSSSDAEGNYRDSLETLPSTKESDSTQTTTPSASCPESNSVNQVEDMEIETSEVKKVTSSPITSEEESNLSNDFIDENGLPINKNENVNGESKRKTVITEVTTMTSTVATESKTVIKVEKGDKQTVVSSTENCAKSTVTTTTTTVTKLSTPSTGGSVDIISVKEQSKTVVTTTVTDSLTTTGGTLVTSMTVSKEYSTRDKVKLMKFSRPKKTRSGTALPSYRKFVTKSSKKSIFVLPNDDLKKLARKGGIREVPYFNYNAKPALDIWPYPSPRPTFGITWRYRLQTVKSLAGVSLMLRLLWASLRWDDMAAKAPPGGGTTRTETSETEITTTEIIKRRDVGPYGIRSEYCIRKIICPIGVPETPKETPTPQRKGLRSSALRPKRPETPKQTGPVIIETWVAEEELELWEIRAFAERVEKEKAQAVEQQAKKRLEQQKPTVIATSTTSPTSSTTSTISPAQKVMVAPISGSVTTGTKMVLTTKVGSPATVTFQQNKNFHQTFATWVKQGQSNSGVVQVQQKVLGIIPSSTGTSQQTFTSFQPRTATVTIRPNTSGSGGTTSNSQVITGPQIRPGMTVIRTPLQQSTLGKAIIRTPVMVQPGAPQQVMTQIIRGQPVSTAVSAPNTVSSTPGQKSLTSATSTSNIQSSASQPPRPQQGQVKLTMAQLTQLTQGHGGNQGLTVVIQGQGQTTGQLQLIPQGVTVLPGPGQQLMQAAMPNGTVQRFLFTPLATTATTASTTTTTVSTTAAGTGEQRQSKLSPQMQVHQDKTLPPAQSSSVGPAEAQPQTAQPSAQPQPQTQPQSPAQPEVQTQPEVQTQTTVSSHVPSEAQPTHAQSSKPQVAAQSQPQSNVQGQSPVRVQSPSQTRIRPSTPSQLSPGQQSQVQTTTSQPIPIQPHTSLQIPSQGQPQSQPQVVMKHNAVIEHLKQKKSMTPAEREENQRMIVCNQVMKYILDKIDKEEKQAAKKRKREESVEQKRSKQNATKLSALLFKHKEQLRAEILKKRALLDKDLQIEVQEELKRDLKIKKEKDLMQLAQATAVAAPCPPVTPAPPAPPAPPPSPPPPPAVQHTGLLSTPTLPAASQKRKREEEKDSSSKSKKKKMISTTSKETKKDTKLYCICKTPYDESKFYIGCDLCTNWYHGECVGITEKEAKKMDVYICNDCKRAQEGSSEELYCICRTPYDESQFYIGCDRCQNWYHGRCVGILQSEAELIDEYVCPQCQSTEDAMTVLTPLTEKDYEGLKRVLRSLQAHKMAWPFLEPVDPNDAPDYYGVIKEPMDLATMEERVQRRYYEKLTEFVADMTKIFDNCRYYNPSDSPFYQCAEVLESFFVQKLKGFKASRSHNNKLQSTAS

SEQ ID NO: 48019 - protein, 2725 aa, Homo sapiens
MEDDDDDASYCTESSFRSHSTYSSTPGRRKPRVHRPRSPILEEKDIPPLEFPKSSEDLMVPNEHIMNVIAIYEVLRNFGTVLRLSPFRFEDFCAALVSQEQCTLMAEMHVVLLKAVLREEDTSNTTFGPADLKDSVNSTLYFIDGMTWPEVLRVYCESDKEYHHVLPYQEAEDYPYGPVENKIKVLQFLVDQFLTTNIAREELMSEGVIQYDDHCRVCHKLGDLLCCETCSAVYHLECVKPPLEEVPEDEWQCEVCVAHKVPGVTDCVAEIQKNKPYIRHEPIGYDRSRRKYWFLNRRLIIEEDTENENEKKIWYYSTKVQLAELIDCLDKDYWEAELCKILEEMREEIHRHMDITEDLTNKARGSNKSFLAAANEEILESIRAKKGDIDNVKSPEETEKDKNETENDSKDAEKNREEFEDQSLEKDSDDKTPDDDPEQGKSEEPTEVGDKGNSVSANLGDNTTNATSEETSPSEGRSPVGCLSETPDSSNMAEKKVASELPQDVPEEPNKTCESSNTSATTTSIQPNLENSNSSSELNSSQSESAKAADDPENGERESHTPVSIQEEIVGDFKSEKSNGELSESPGAGKGASGSTRIITRLRNPDSKLSQLKSQQVAAAAHEANKLFKEGKEVLVVNSQGEISRLSTKKEVIMKGNINNYFKLGQEGKYRVYHNQYSTNSFALNKHQHREDHDKRRHLAHKFCLTPAGEFKWNGSVHGSKVLTISTLRLTITQLENNIPSSFLHPNWASHRANWIKAVQMCSKPREFALALAILECAVKPVVMLPIWRESLGHTRLHRMTSIEREEKEKVKKKEKKQEEEETMQQATWVKYTFPVKHQVWKQKGEEYRVTGYGGWSWISKTHVYRFVPKLPGNTNVNYRKSLEGTKNNMDENMDESDKRKCSRSPKKIKIEPDSEKDEVKGSDAAKGADQNEMDISKITEKKDQDVKELLDSDSDKPCKEEPMEVDDDMKTESHVNCQESSQVDVVNVSEGFHLRTSYKKKTKSSKLDGLLERRIKQFTLEEKQRLEKIKLEGGIKGIGKTSTNSSKNLSESPVITKAKEGCQSDSMRQEQSPNANNDQPEDLIQGCSESDSSVLRMSDPSHTTNKLYPKDRVLDDVSIRSPETKCPKQNSIENDIEEKVSDLASRGQEPSKSKTKGNDFFIDDSKLASADDIGTLICKNKKPLIQEESDTIVSSSKSALHSSVPKSTNDRDATPLSRAMDFEGKLGCDSESNSTLENSSDTVSIQDSSEEDMIVQNSNESISEQFRTREQDVEVLEPLKCELVSGESTGNCEDRLPVKGTEANGKKPSQQKKLEERPVNKCSDQIKLKNTTDKKNNENRESEKKGQRTSTFQINGKDNKPKIYLKGECLKEISESRVVSGNVEPKVNNINKIIPENDIKSLTVKESAIRPFINGDVIMEDFNERNSSETKSHLLSSSDAEGNYRDSLETLPSTKESDSTQTTTPSASCPESNSVNQVEDMEIETSEVKKVTSSPITSEEESNLSNDFIDENGLPINKNENVNGESKRKTVITEVTTMTSTVATESKTVIKVEKGDKQTVVSSTENCAKSTVTTTTTTVTKLSTPSTGGSVDIISVKEQSKTVVTTTVTDSLTTTGGTLVTSMTVSKEYSTRDKVKLMKFSRPKKTRSGTALPSYRKFVTKSSKKSIFVLPNDDLKKLARKGGIREVPYFNYNAKPALDIWPYPSPRPTFGITWRYRLQTVKSLAGVSLMLRLLWASLRWDDMAAKAPPGGGTTRTETSETEITTTEIIKRRDVGPYGIRSEYCIRKIICPIGVPETPKETPTPQRKGLRSSALRPKRPETPKQTGPVIIETWVAEEELELWEIRAFAERVEKEKAQAVEQQAKKRLEQQKPTVIATSTTSPTSSTTSTISPAQKVMVAPISGSVTTGTKMVLTTKVGSPATVTFQQNKNFHQTFATWVKQGQSNSGVVQVQQKVLGIIPSSTGTSQQTFTSFQPRTATVTIRPNTSGSGGTTSNSQVITGPQIRPGMTVIRTPLQQSTLGKAIIRTPVMVQPGAPQQVMTQIIRGQPVSTAVSAPNTVSSTPGQKSLTSATSTSNIQSSASQPPRPQQGQVKLTMAQLTQLTQGHGGNQGLTVVIQGQGQTTGQLQLIPQGVTVLPGPGQQLMQAAMPNGTVQRFLFTPLATTATTASTTTTTVSTTAAGTGEQRQSKLSPQMQVHQDKTLPPAQSSSVGPAEAQPQTAQPSAQPQPQTQPQSPAQPEVQTQPEVQTQTTVSSHVPSEAQPTHAQSSKPQVAAQSQPQSNVQGQSPVRVQSPSQTRIRPSTPSQLSPGQQSQVQTTTSQPIPIQPHTSLQIPSQGQPQSQPQVVMKHNAVIEHLKQKKSMTPAEREENQRMIVCNQVMKYILDKIDKEEKQAAKKRKREESVEQKRSKQNATKLSALLFKHKEQLRAEILKKRALLDKDLQIEVQEELKRDLKIKKEKDLMQLAQATAVAAPCPPVTPAPPAPPAPPPSPPPPPAVQHTGLLSTPTLPAASQKRKREEEKDSSSKSKKKKMISTTSKETKKDTKLYCICKTPYDESKFYIGCDRCQNWYHGRCVGILQSEAELIDEYVCPQCQSTEDAMTVLTPLTEKDYEGLKRVLRSLQAHKMAWPFLEPVDPNDAPDYYGVIKEPMDLATMEERVQRRYYEKLTEFVADMTKIFDNCRYYNPSDSPFYQCAEVLESFFVQKLKGFKASRSHNNKLQSTAS

SEQ ID NO: 48020 - protein, 2926 aa, Homo sapiens
MEDDDDDASYCTESSFRSHSTYSSTPGRRKPRVHRPRSPILEEKDIPPLEFPKSSEDLMVPNEHIMNVIAIYEVLRNFGTVLRLSPFRFEDFCAALVSQEQCTLMAEMHVVLLKAVLREEDTSNTTFGPADLKDSVNSTLYFIDGMTWPEVLRVYCESDKEYHHVLPYQEAEDYPYGPVENKIKVLQFLVDQFLTTNIAREELMSEGVIQYDDHCRVCHKLGDLLCCETCSAVYHLECVKPPLEEVPEDEWQCEVCVAHKVPGVTDCVAEIQKNKPYIRHEPIGYDRSRRKYWFLNRRLIIEEDTENENEKKIWYYSTKVQLAELIDCLDKDYWEAELCKILEEMREEIHRHMDITEDLTNKARGSNKSFLAAANEEILESIRAKKGDIDNVKSPEETEKDKNETENDSKDAEKNREEFEDQSLEKDSDDKTPDDDPEQGKSEEPTEVGDKGNSVSANLGDNTTNATSEETSPSEGRSPVGCLSETPDSSNMAEKKVASELPQDVPEEPNKTCESSNTSATTTSIQPNLENSNSSSELNSSQSESAKAADDPENGERESHTPVSIQEEIVGDFKSEKSNGELSESPGAGKGASGSTRIITRLRNPDSKLSQLKSQQVAAAAHEANKLFKEGKEVLVVNSQGEISRLSTKKEVIMKGNINNYFKLGQEGKYRVYHNQYSTNSFALNKHQHREDHDKRRHLAHKFCLTPAGEFKWNGSVHGSKVLTISTLRLTITQLENNIPSSFLHPNWASHRANWIKAVQMCSKPREFALALAILECAVKPVVMLPIWRESLGHTRLHRMTSIEREEKEKVKKKEKKQEEEETMQQATWVKYTFPVKHQVWKQKGEEYRVTGYGGWSWISKTHVYRFVPKLPGNTNVNYRKSLEGTKNNMDENMDESDKRKCSRSPKKIKIEPDSEKDEVKGSDAAKGADQNEMDISKITEKKDQDVKELLDSDSDKPCKEEPMEVDDDMKTESHVNCQESSQVDVVNVSEGFHLRTSYKKKTKSSKLDGLLERRIKQFTLEEKQRLEKIKLEGGIKGIGKTSTNSSKNLSESPVITKAKEGCQSDSMRQEQSPNANNDQPEDLIQGCSESDSSVLRMSDPSHTTNKLYPKDRVLDDVSIRSPETKCPKQNSIENDIEEKVSDLASRGQEPSKSKTKGNDFFIDDSKLASADDIGTLICKNKKPLIQEESDTIVSSSKSALHSSVPKSTNDRDATPLSRAMDFEGKLGCDSESNSTLENSSDTVSIQDSSEEDMIVQNSNESISEQFRTREQDVEVLEPLKCELVSGESTGNCEDRLPVKGTEANGKKPSQQKKLEERPVNKCSDQIKLKNTTDKKNNENRESEKKGQRTSTFQINGKDNKPKIYLKGECLKEISESRVVSGNVEPKVNNINKIIPENDIKSLTVKESAIRPFINGDVIMEDFNERNSSETKSHLLSSSDAEGNYRDSLETLPSTKESDSTQTTTPSASCPESNSVNQVEDMEIETSEVKKVTSSPITSEEESNLSNDFIDENGLPINKNENVNGESKRKTVITEVTTMTSTVATESKTVIKVEKGDKQTVVSSTENCAKSTVTTTTTTVTKLSTPSTGGSVDIISVKEQSKTVVTTTVTDSLTTTGGTLVTSMTVSKEYSTRDKVKLMKFSRPKKTRSGTALPSYRKFVTKSSKKSIFVLPNDDLKKLARKGGIREVPYFNYNAKPALDIWPYPSPRPTFGITWRYRLQTVKSLAGVSLMLRLLWASLRWDDMAAKAPPGGGTTRTETSETEITTTEIIKRRDVGPYGIRSEYCIRKIICPIGVPETPKETPTPQRKGLRSSALRPKRPETPKQTGPVIIETWVAEEELELWEIRAFAERVEKEKAQAVEQQAKKRLEQQKPTVIATSTTSPTSSTTSTISPAQKVMVAPISGSVTTGTKMVLTTKVGSPATVTFQQNKNFHQTFATWVKQGQSNSGVVQVQQKVLGIIPSSTGTSQQTFTSFQPRTATVTIRPNTSGSGGTTSNSQVITGPQIRPGMTVIRTPLQQSTLGKAIIRTPVMVQPGAPQQVMTQIIRGQPVSTAVSAPNTVSSTPGQKSLTSATSTSNIQSSASQPPRPQQGQVKLTMAQLTQLTQGHGGNQGLTVVIQGQGQTTGQLQLIPQGVTVLPGPGQQLMQAAMPNGTVQRFLFTPLATTATTASTTTTTVSTTAAGTGEQRQSKLSPQMQVHQDKTLPPAQSSSVGPAEAQPQTAQPSAQPQPQTQPQSPAQPEVQTQPEVQTQTTVSSHVPSEAQPTHAQSSKPQVAAQSQPQSNVQGQSPVRVQSPSQTRIRPSTPSQLSPGQQSQVQTTTSQPIPIQPHTSLQIPSQGQPQSQPQVQSSTQTLSSGQTLNQVTVSSPSRPQLQIQQPQPQVIAVPQLQQQVQVLSQIQSQVVAQIQAQQSGVPQQIKLQLPIQIQQSSAVQTHQIQNVVTVQAASVQEQLQRVQQLRDQQQKKKQQQIEIKREHTLQASNQSEIIQKQVVMKHNAVIEHLKQKKSMTPAEREENQRMIVCNQVMKYILDKIDKEEKQAAKKRKREESVEQKRSKQNATKLSALLFKHKEQLRAEILKKRALLDKDLQIEVQEELKRDLKIKKEKDLMQLAQATAVAAPCPPVTPAPPAPPAPPPSPPPPPAVQHTGLLSTPTLPAASQKRKREEEKDSSSKSKKKKMISTTSKETKKDTKLYCICKTPYDESKFYIGCDLCTNWYHGECVGITEKEAKKMDVYICNDCKRAQEGSSEELYCICRTPYDESQFYIGCDRCQNWYHGRCVGILQSEAELIDEYVCPQCQSTEDAMTVLTPLTEKDYEGLKRVLRSLQAHKMAWPFLEPVDPNDAPDYYGVIKEPMDLATMEERVQRRYYEKLTEFVADMTKIFDNCRYYNPSDSPFYQCAEVLESFFVQKLKGFKASRSHNNKLQSTAS

SEQ ID NO: 48021 - protein, 140 aa, Homo sapiens
MNLTSLDPPLQLRLEASWVQFHLGINRHGLYSRSSPVVSKLLQDMRHFPTISADYSQDEKALLGACDCTQIVKPSGVHLKLVLRFSDFGKAMFKPMSSEMRRHQWTSSTSLTFRDTMLRSQLSIWTGFWTSDGCRQQWGG

SEQ ID NO: 48022 - protein, 500 aa, Homo sapiens
MTDEQEKGLSGAPSPTMSEDSAGSPCPSGSGSDTENTRPQENTFPKGEPDLKKESEEDKFPVCIREAVSQVLKGYDWTLVPMPVRVNGSSKNKPHVKRPMNAFMVWAQAARRKLADQYPHLHNAELSKTLGKLWRLLNESEKRPFVEEAERLRVQHKKDHPDYKYQPRRRKSVKNGQAEAEEATEQTHISPNAIFKALQADSPHSSSGMSEVHSPGEHSGQSQGPPTPPTTPKTDVQPGKADLKREGRPLPEGGRQPPIDFRDVDIGELSSDVISNIETFDVNEFDQYLPPNGHPGVPATHGQVTYTGSYGISSTAATPASAGHVWMSKQQAPPPPPQQPPQAPPAPQAPPQPQAAPPQQPAAPPQQPQAHTLTTLSSEPGQSQRTHIKTEQLSPSHYSEQQQHSPQQIAYSPFNLPHYSPSYPPITRSQYDYTDHQNSSSYYSHAAGQGTGLYSTFTYMNPAQRPMYTPIADTSGVPSIPQTHSPQHWEQPVYTQLTRP

SEQ ID NO: 48023 - protein, 912 aa, Homo sapiens
MRRCAVGLVDAVKATDQYCARLRQAGSAAPRPPRAQQPQQPSQEKFYSMAAQIKLLLEIPEKIWSSMEASQCLHATQLYLLCCHLHSLLQLDSSSSRYSPVLSRFPILIRQVAAASHFRSTILHESKMLLKCQGVSDQAVAEALCSIMLLEESSPRQALTDFLLARKATIQKLLNQPHHGAGIKAQICSLVELLATTLKQAHALFYTLPEGLLPDPALPCGLLFSTLETITGQHPAGKGTGVLQEEMKLCSWFKHLPASIVEFQPTLRTLAHPISQEYLKDTLQKWIHMCNEDIKNGITNLLMYVKSMKGLAGIRDAMWELLTNESTNHSWDVLCRRLLEKPLLFWEDMMQQLFLDRLQTLTKEGFDSISSSSKELLVSALQELESSTSNSPSNKHIHFEYNMSLFLWSESPNDLPSDAAWVSVANRGQFASSGLSMKAQAISPCVQNFCSALDSKLKVKLDDLLAYLPSDDSSLPKDVSPTQAKSSAFDRYADAGTVQEMLRTQSVACIKHIVDCIRAELQSIEEGVQGQQDALNSAKLHSVLFMARLCQSLGELCPHLKQCILGKSESSEKPAREFRALRKQGKVKTQEIIPTQAKWQEVKEVLLQQSVMGYQVWSSAVVKVLIHGFTQSLLLDDAGSVLATATSWDELEIQEEAESGSSVTSKIRLPAQPSWYVQSFLFSLCQEINRVGGHALPKVTLQEMLKSCMVQVVAAYEKLSEEKQIKKEGAFPVTQNRALQLLYDLRYLNIVLTAKGDEVKSGRSKPDSRIEKVTDHLEALIDPFDLDVFTPHLNSNLHRLVQRTSVLFGLVTGTENQLAPRSSTFNSQEPHNILPLASSQIRFGLLPLSMTSTRKAKSTRNIETKAQVVPPARSTAGDPTVPGSLFRQLVSEEDNTSAPSLFKLGWLSSMTK

SEQ ID NO: 48024 - protein, 894 aa, Homo sapiens
MRRCAVGLVDAVKATDQYCARLRQAGSAAPRPPRAQQPQQPSQEKFYSMAAQIKLLLEIPEKIWSSMEASQCLHATQLYLLCCHLHSLLQLDSSSSRYSPVLSRFPILIRQVAAASHFRSTILHESKMLLKCQGVSDQAVAEALCSIMLLEESSPRQALTDFLLARKATIQKLLNQPHHGAGIKAQICSLVELLATTLKQAHALFYTLPEGLLPDPALPCGLLFSTLETITGQHPAGKGTGVLQEEMKLCSWFKHLPASIVEFQPTLRTLAHPISQEYLKDTLQKWIHMCNEDIKNGITNLLMYVKSMKGLAGIRDAMWELLTNESTNHSWDVLCRRLLEKPLLFWEDMMQQLFLDRLQTLTKEGFDSISSSSKELLVSALQELESSTSNSPSNKHIHFEYNMSLFLWSESPNDLPSDAAWVSVANRGQFASSGLSMKAQAISPCVQNFCSALDSKLKVKLDDLLAYLPSDDSSLPKDVSPTQAKSSAFDRYADAGTVQEMLRTQSVACIKHIVDCIRAELQSIEEGVQGQQDALNSAKLHSVLFMARLCQSLGELCPHLKQCILGKSESSEKPAREFRALRKQGKVKTQEIIPTQAKWQEVKEVLLQQSVMGYQVWSSAVVKVLIHGFTQSLLLDDAGSVLATATSWDELEIQEEAESGSSVTSKIRLPAQPSWYVQSFLFSLCQEINRVGGHALPKVTLQEMLKSCMVQVVAAYEKLSEEKQIKKEGAFPVTQNRALQLLYDLRYLNIVLTAKGDEVKSGRSKPDSRIEKVTDHLEALIDPFDLDVFTPHLNSNLHRLVQRTSVLFGLVTGTENQLAPRSSTFNSQEPHNILPLASSQIRFGLLPLSMTSTRKAKSTRNIETKAQVGAKSKRLIRGWVPTSHRATHDQLPFK

SEQ ID NO: 48025 - protein, 566 aa, Homo sapiens
MEVCPYCKKPFKRLKSHLPYCKMIGPTIPTDQKVYQSKPATLPRAKKMKGPIKDLIKAKGKELETENEERNSKLVVDKPEQTVKTFPLPAVGLERAATTKADKDIKNPIQPSFKMLKNTKPMTTFQEETKAQFYASEKTSPKRELAKDLPKSGESRCNPSEAGASLLVGSIEPSLSNQDRKYSSTLPNDVQTTSGDLKLDKIDPQRQELLVKLLDVPTGDCHISPKNVSDGVKRVRTLLSNERDSKGRDHLSGVPTDVTVTETPEKNTESLILSLKMSSLGKIQVMEKQEKGLTLGVETCGSKGNAEKSMSATEKQERTVMSHGCENFNTRDSVTGKESQGERPHLSLFIPRETTYQFHSVSQSSSQSLASLATTFLQEKKAEAQNHHCVPDVKALMESPEGQLSLEPKSDSQFQASHTGCQSPLCSAQRHTPQSPFTNHAAAAGRKTLRSCMGLEWFPELYPGYLGLGVLPGKPQCWNAMTQKPQLISPQGERLSQGWIRCNTTIRKSGFGGITMLFTGYFVLCCSWSFRRLKKLCRPLPWKSTVPPCIGVAKTTGDCRSKTCLD

SEQ ID NO: 48026 - protein, 464 aa, Homo sapiens
MPKAFATAGWLVSLVLLVFLGFMSFVTTTFVIEAMAAANAQLHWKRMENLKEEEDDDSSTASDSDVLIRDNYERAEKRPILSVQRRGSPNPFEITDRVEMGQMASMFFNKVGVNLFYFCIIVYLYGDLAIYAAAVPFSLMQVTCSATGNDSCGVEADTKYNDTDRCWGPLRRVDAYRIYLAIFTLLLGPFTFFDVQKTKYLQILTSLMRWIAFAVMIVLALIRIGHGQGEGHPPLADFSGVRNLFGVCVYSFMCQHSLPSLITPVSSKRHLTRLVFLDYVLILAFYGLLSFTAIFCFRGDSLMDMYTLNFARCDVVGLAAVRFFLGLFPVFTISTNFPIIAVTLRNNWKTLFHREGGTYPWVVDRVVFPTITLVPPVLVAFCTHDLESLVGITGAYAGTGIQYVIPAFLVYHCRRDTQLAFGCGVSNKHRSPFRHTFWVGFVLLWAFSCFIFVTANIILSETKL

SEQ ID NO: 48027 - protein, 248 aa, Homo sapiens
MIQLPGARPILDPVDFLGLQDKIKEVPRPRKRLTELLLRTATEKPGPAEAARQASASRAWGLRFFRSPQQVLPSPDGRRAAGVRLAVTRLEGVDEATRAVPTGDMEDLPCGLVLSSIGYKSRPVDPSVPFDSKLGVIPNVEGRVMDVPGLYCSGWVKRGPTGVIATTMTDSFLTGQMLLQDLKAGLLPSGPRPGYAAIQALLSSRGVRPVSFSDWEKLDAEEVARGQGTGKPREKLVDPQEMLRLLGH

SEQ ID NO: 48028 - protein, 172 aa, Homo sapiens
MDGVLADFEAGLLRGFRRRFPEEPHVPLEQRRGFLAREQYRALRPDLADKVASVYEAPGFFLDLEPIPGALDAVREMNDLPDTQVFICTSPLLKYHHCVGEKYRWVEQHLGPQFVERIILTRDKTVVLGDLLIDDKDTVRGGDPKLGAHLVHLLPQSAPGPAPDKETAALLE

SEQ ID NO: 48029 - protein, 169 aa, Homo sapiens [sequence omitted]

SEQ ID NO: 48030 - protein, 526 aa, Homo sapiens [sequence omitted]

SEQ ID NO: 48031 - protein, 183 aa, Homo sapiens
MEIERRERSEELSEAERKAVQAMWARLYANCEDVGVAILVRFFVNFPSAKQYFSQFKHMEDPLEMERSPQLRKHACRVMGALNTVVENLHDPDKVSSVLALVGKAHALKHKVEPVYFKILSGVILEVVAEEFASDFPPETQRAWAKLRGLIYSHVTAAYKEVGWVQQVPNATTPPATLPSSGP

SEQ ID NO: 48032 - protein, 292 aa, Homo sapiens
MKMKYYIEYMESTRDDSPLYIFDSSYGEHPKRRKLLEDYKVPKFFTDDLFQYAGEKRRPPYRWFVMGPPRSGTGIHIDPLGTSAWNALVQGHKRWCLFPTSTPRELIKVTRDEGGNQQDEAITWFNVIYPRTQLPTWPPEFKPLEILQKPGETVFVPGGWWHVVLNLDTTIAITQNFASSTNFPVVWHKTVRGRPKLSRKWYRILKQEHPELAVLADSVDLQESTGIASDSSSDSSSSSSSSSSDSDSECESGSEGDGTVHRRKKRRTCSMVGNGDTTSQDDCVSKERSSSR

SEQ ID NO: 48033 - protein, 429 aa, Homo sapiens
MFTAFQTCGNVAQTVIRSLNRTDFHGSGYTSMAIIYGVFSASNLITPSVVAIVGPQLSMFASGLFYSMYIAVFIQPFPWSFYTASVFIGIAAAVLWTAQGNCLTINSDEHSIGRNSGIFWALLQSSLFFGNLYIYFAWQGKTQISESDRRTVFIALTVISLVGTVLFFLIRKPDSENVLGEDESSDDQDMEVNESAQNNLTKAVDAFKKSFKLCVTKEMLLLSITTAYTGLELTFFSGVYGTCIGATNKFGAEEKSLIGLSGIFIGIGEILGGSLFGLLSKNNRFGRNPVVLLGILVHFIAFYLIFLNMPGDAPIAPVKGTDSSAYIKSSKEVAILCSFLLGLGDSCFNTQLLSILGFLYSEDSAPAFAIFKFVQSICAAVAFFYSNYLLLHWQLLVMVIFGFFGTISFFTVEWEAAAFVARGSDYRSI

SEQ ID NO: 48034 - protein, 700 aa, Homo sapiens
MAAYERRFPTCPLIPMFVGSDTVNEFKSEDGAIHVIERRCKLDVDAPRLLKKIAGVDYVYFVQKNSLNSRERTLHIEAYNETFSNRVIINEHCCYTVHPENEDWTCFEQSASLDIKSFFGFESTVEKIAMKQYTSNIKKGKEIIEYYLRQLEEEGITFVPRWSPPSITTSSETSSSSSKKQAASMAVVIPEAALKEGLSGDALSSPSAPEPVVGTPDDKLDADYIKRYLGDLTPLQESCLIRLRQWLQETHKGKIPKDEHILRFLRARDFNIDKAREIMCQSLTWRKQHQVDYILETWTPPQVLQDYYAGGWHHHDKDGRPLYVLRLGQMDTKGLVRALGEEALLRYVLSINEEGLRRCEENTKVFGRPISSWTCLVDLEGLNMRHLWRPGVKALLRIIEVVEANYPETLGRLLILRAPRVFPVLWTLVSPFIDDNTRRKFLIYAGNDYQGPGGLLDYIDKEIIPDFLSGECMCEVPEGGLVPKSLYRTAEELENEDLKLWTETIYQSASVFKGAPHEILIQIVDASSVITWDFDVCKGDIVFNIYHSKRSPQPPKKDSLGAHSITSPGGNNVQLIDKVWQLGRDYSMVESPLICKEGESVQGSHVTRWPGFYILQWKFHSMPACAASSLPRVDDVLASLQVSSHKCKVMYYTEVIGSEDFRGSMTSLESSHSGFSQLSAATTSSSQSHSSSMISRWRFC

SEQ ID NO: 48035 - protein, 1345 aa, Homo sapiens
MNSWAKAASSGTTASEGSSDGSGNHNEGSTGREGTGEGRRRDKGIIDQGHIQLPRNDLDPRVLSNTGWGQTPVKQNTAWEFEESPRSERKNDNGTEAWGCAATQASNSGGKNDGSIMNSTNTSSVSGWVNAPPAAVPANTGWGDSNNKAPSGPGVWGDSISSTAVSTAAAAKSGHAWSGAANQEDKSPTWGEPPKPKSQHWGDGQRSNPAWSAGGGDWADSSSVLGHLGDGKKNGSGWDADSNRSGSGWNDTTRSGNSGWGNSTNTKANPGTNWGETLKPGPQQNWASKPQDNNVSNWGGAASVKQTGTGWIGGPVPVKQKDSSEATGWEEPSPPSIRRKMEIDDGTSAWGDPSNYNNKTVNMWDRNNPVIQSSTTTNTTTTTTTTTSNTTHRVETPPPHQAGTQLNRSPLLGPVSSGWGEMPNVHSKTENSWGEPSSPSTLVDNGTAAWGKPPSSGSGWGDHPAEPPVAFGRAGAPVAASALCKPASKSMQEGWGSGGDEMNLSTSQWEDEEGDVWNNAASQESTSSCSSWGNAPKKGLQKGMKTSGKQDEAWIMSRLIKQLTDMGFPREPAEEALKSNNMNLDQAMSALLEKKVDVDKRGLGVTDHNGMAAKPLGCRPPISKESSVDRPTFLDKDGGLVEEPTPSPFLPSPSLKLPLSHSALPSQALGGIASGLGMQNLNSSRQIPSGNLGMFGNSGAAQARTMQQPPQPPVQPLNSSQPSLRAQVPQFLSPQVQAQLLQFAAKNIGLNPALLTSPINPQHMTMLNQLYQLQLAYQRLQIQQQMLQAQRNVSGSMRQQEQQVARTITNLQQQIQQHQRQLAQALLVKQPPPPPPPPHLSLHPSAGKSAMDSFPSHPQTPGLPDLQTKEQQSSPNTFAPYPLAGLNPNMNVNSMDMTGGLSVKDPSQSQSRLPQWTHPNSMDNLPSAASPLEQNPSKHGAIPGGLSIGPPGKSSIDDSYGRYDLIQNSESPASPPVAVPHSWSRAKSDSDKISNGSSINWPPEFHPGVPWKGLQNIDPENDPDVTPGSVPTGPTINTTIQDVNRYLLKSGGSSPPSSQNATLPSSSAWPLSASGYSSSFSSIASAPSVAGKLSDIKSTWSSGPTSHTQASLSHELWKVPRNSTAPTRPPPGLTNPKPSSTWGASPLGWTSSYSSGSAWSTDTSGRTSSWLVLRNLTPQIDGSTLRTLCLQHGPLITFHLNLTQGNAVVRYSSKEEAAKAQKSLHMCVLGNTTILAEFAGEEEVNRFLAQGQALPPTSSWQSSSASSQPRLSAAGSSHGLVRSDAGHWNAPCLGGKGSSELLWGGVPQYSSSLWGPPSADDSRVIGSPTPLTTLLPGDLLSGESL

SEQ ID NO: 48036 - protein, 421 aa, Homo sapiens
MKVDCLESTLEKSLQAKFPSNLKVSILLDFTRGSRGRKNSRTMLLPLLRRFPEQVRVSLFHTPHLRGLLRLLIPERFNETIGLQHIKVYLFDNSVILSGANLSDSYFTNRQDRYVFLQDCAEIADFFTELVDAVGDVSLQLQGDDTVQVVDGMVHPYKGDRAEYCKAANKRVMDVINSARTRQQMLHAQTFHSNSLLTQEDAAAAGDRRPAPDTWIYPLIQMKPFEIQIDEIVTETLLTEAERGAKVYLTTGYFNLTQAYMDLVLGTRAEYQILLASPEVNGFFGAKGVAGAIPAAYVHIERQFFSEVCSLGQQERVQLQEYWRRGWTFHAKGLWLYLAGSSLPCLTLIGSPNFGYRSVHRDLEAQIAIVTENQALQQQLHQEQEQLYLRSGVVSSATFEQPSRQVKLWVKMVTPLIKNFF

SEQ ID NO: 48037 - protein, 517 aa, Homo sapiens
MPASSAGPWASRTPPRLWAELPSGKVGPAASLADCKSLGWLKSNCRHERDAGVVCTNETRSTHTLDLSRELSEALGQIFDSQRGCDLSISVNVQGEDALGFCGHTVILTANLEAQALWKEPGSNVTMSVDAECVPMVRDLLRYFYSRRIDITLSSVKCFHKLASAYGARQLQGYCASLFAILLPQDPSFQMPLDLYAYAVATGDALLEKLCLQFLAWNFEALTQAEAWPSVPTDLLQLLLPRSDLAVPSELALLKAVDTWSWGERASHEEVEGLVEKIRFPMMLPEELFELQFNLSLYWSHEALFQKKTLQALEFHTVPFQLLARYKGLNLTEDTYKPRIYTSPTWSAFVTDSSWSARKSQLVYQSRRGPLVKYSSDYFQAPSDYRYYPYQSFQTPQHPSFLFQDKRVSWSLVYLPTIQSCWNYGFSCSSDELPVLGLTKSGGSDRTIAYENKALMLCEGLFVADVTDFEGWKAAIPSALDTNSSKSTSSFPCPAGHFNGFRTVIRPFYLTNSSGVD

SEQ ID NO: 48038 - protein, 371 aa, Homo sapiens
MTKAADPRFRPRWKVILTFFVGAAILWLLCSHRPAPGRPPTHNAHNWRLGQAPANWYNDTYPLSPPQRTPAGIRYRIAVIADLDTESRAQEENTWFSYLKKGYLTLSDSGDKVAVEWDKDHGVLESHLAEKGRGMELSDLIVFNGKLYSVDDRTGVVYQIEGSKAVPWVILSDGDGTVEKGFKAEWLAVKDERLYVGGLGKEWTTTTGDVVNENPEWVKVVGYKGSVDHENWVSNYNALRAAAGIQPPGYLIHESACWSDTLQRWFFLPRRASQERYSEKDDERKGANLLLSASPDFGDIAVSHVGAVVPTHGFSSFKFIPNTDDQIIVALKSEEDSGRVASYIMAFTLDGRFLLPETKIGSVKYEGIEFI

SEQ ID NO: 48039 - protein, 494 aa, Homo sapiens
MGYRKRGPKPKPLVVQVPTFARRSNVLTGLQDSSTDNRAKLDLGAQGKGQGHQYELNSKKHHQYQPHSKERAGKPPPPGKSGKYYYQLNSKKHHPYQPDPKMYDLQYQGGHKEAPSPTCPDLGAKSHPPDKWAQGAGAKGYLGAVKPLAGAAGAPGKGSEKGPPNGMMPAPKEAVTGNGIGGKMKIVKNKNKNGRIVIVMSKYMENGMQAVKIKSGEVAEGEARSPSHKKRAADERHPPADRTFKKAAGAEEKKVEAPPKRREEEVSGVSDPQPQDAGSRKLSPTKEAFGEQPLQLTTKPDLLAWDPARNTHPPSHHPHPHPHHHHHHHHHHHHAVGLNLSHVRKRCLSETHGEREPCKKRLTARSISTPTCLGGSPAAERPADLPPAAALPQPEVILLDSDLDEPIDLRCVKTRSEAGEPPSSLQVKPETPASAAVAVAAAAAPTTTAEKPPAEAQDEPAESLSEFKPFFGNIIITDVTANCLTVTFKEYVTV

SEQ ID NO: 48040 - protein, 100 aa, Homo sapiens
MERSSTPRTMSACTRRRGCRGWGSTTQVTCACTWRRMRCWEPPSSWHGSPTLASRGRTRRPCATSHPRAPPFARHPALGAGAPGAQEPPTSPPRRSCGLP

SEQ ID NO: 48041 - protein, 405 aa, Homo sapiens
MATSGSARKRLLKEEDMTKVEFETSEEVDVTPTFDTMGLREDLLRGIYAYGFEKPSAIQQRAIKQIIKGRDVIAQSQSGTGKTATFSISVLQCLDIQVRETQALILAPTRELAVQIQKGLLALGDYMNVQCHACIGGTNVGEDIRKLDYGQHVVAGTPGRVFDMIRRRSLRTRAIKMLVLDEADEMLNKGFKEQIYDVYRYLPPATQVVLISATLPHEILEMTNKFMTDPIRILVKRDELTLEGIKQFFVAVEREEWKFDTLCDLYDTLTITQAVIFCNTKRKVDWLTEKMREANFTVSSMHGDMPQKERESIMKEFRSGASRVLISTDVWARGLDVPQVSLIINYDLPNNRELYIHRIGRSGRYGRKGVAINFVKNDDIRILRDIEQYYSTQIDEMPMNVADLI

SEQ ID NO: 48042 - protein, 415 aa, Homo sapiens
MYGLHQDVHHFNSFDKVRSLPLLLSQAGVRTGIIGKKHVGPETVYPFDFAYTEENGSVLQVGRNITRIKLLVRKFLQTQDDRPFFLYVAFHDPHRCGHSQPQYGTFCEKFGNGESGMGRIPDWTPQAYDPLDVLVPYFVPNTPAARADLAAQYTTVGRMDQGVGLVLQELRDAGVLNDTLVIFTSDNGIPFPSGRTNLYWPGTAEPLLVSSPEHPKRWGQVSEAYVSLLDLTPTILDWFSIPYPSYAIFGSKTIHLTGRSLLPALEAEPLWATVFGSQSHHEVTMSYPMRSVQHRHFRLVHNLNFKMPFPIDQDFYVSPTFQDLLNRTTAGQPTGWYKDLRHYYYRARWELYDRSRDPHETQNLATDPRFAQLLEMLRDQLAKWQWETHDPWVCAPDGVLEEKLSPQCQPLHNEL

SEQ ID NO: 48043 - protein, 708 aa, Homo sapiens
MRQPAQELSPTPGGTAHQALKANNTGGGLPAAGPGDRCLPTSDSSPEPQQPPEDRTQDVLAQDAAGDNLEMMAPSRGSAKSRGPLEELLHTLQLLEKEPDVLPRPRTHHRGRYAWASEEDDASSLTADNLEKFGKLSAFPEPPEDGTLLSEAKLQSIMSFLDEMEKSGQDQLDSQQEGWVPEAGPGPLELGSEVSTSVMRLKLEVEEKKQAMLLLQRALAQQRDLTARRVKETEKALSRQLQRQREHYEATIQRHLAFIDQLIEDKKVLSEKCEAVVAELKQEDQRCTERVAQAQAQHELEIKKLKELMSATEKARREKWISEKTKKIKEVTVRGLEPEIQKLIARHKQEVRRLKSLHEAELLQSDERASQRCLRQAEELREQLEREKEALGQQERERARQRFQQHLEQEQWALQQQRQRLYSEVAEERERLGQQAARQRAELEELRQQLEESSSALTRALRAEFEKGREEQERRHQMELNTLKQQLELERQAWEAGRTRKEEAWLLNREQELREEIRKGRDKEIELVIHRLEADMALAKEESEKAAESRIKRLRDKYEAELSELEQSERKLQERCSELKGQLGEAEGENLRLQGLVRQKERALEDAQAVNEQLSSERSNLAQVIRQEFEDRLAASEEETRQAKAELATLQARQQLELEEVHRRVKTALARKEEAVSSLRTQHEAAVKRADHLEELLEQHRRPTPSTK

SEQ ID NO: 48044 - protein, 710 aa, Homo sapiens
MESVVKNCGQTVHDEVANKQTMEELKDLLKRQVEVNVRNKILYLIQAWAHAFRNEPKYKVVQDTYQIMKVEGHVFPEFKESDAMFAAERAPDWVDAEECHRCRVQFGVMTRKHHCRACGQIFCGKCSSKYSTIPKFGIEKEVRVCEPCYEQLNRKAEGKATSTTELPPEYLTSPLSQQSQLPPKRDETALQEEEELQLALALSQSEAEEKERLRQKSTYTSYPKAEPMPSASSAPPASSLYSSPVNSSAPLAEDIDPELARYLNRNYWEKKQEEARKSPTPSAPVPLTEPAAQPGEGHAAPTNVVENPLPETDSQPIPPSGGPFSEPQFHNGESEESHEQFLKALQNAVTTFVNRMKSNHMRGRSITNDSAVLSLFQSINGMHPQLLELLNQLDERRLYYEGLQDKLAQIRDARGALSALREEHREKLRRAAEEAERQRQIQLAQKLEIMRQKKQEYLEVQRQLAIQRLQEQEKERQMRLEQQKQTVQMRAQMPAFPLPYAQLQAMPAAGGVLYQPSGPASFPSTFSPAGSVEGSPMHGVYMSQPAPAAGPYPSMPSTAADPSMVSAYMYPAGATGAQAAPQAQAGPTASPAYSSYQPTPTAGYQNVASQAPQSLPAISQPPQSSTMGYMGSQSVSMGYQPYNMQNLMTTLPSQDASLPPQQPYIAGQQPMYQQMAPSGGPPQQQPPVAQQPQAQGPPAQGSEAQLISFD

SEQ ID NO: 48045 - protein, 249 aa, Homo sapiens
MAEQEPTAEQLAQIAAENEEDEHSVNYKPPAQKSIQEIQELDKDDESLRKYKEALLGRVAVSADPNVPNVVVTGLTLVCSSAPGPLELDLTGECPAAAGVRAAPGGDLGKCSQGAAQGWGFAQGCWAVIEGEVPPTGDLESFKKQSFVLKEGVEYRIKISFRVNREIVSGMKYIQHTYRKGVKIDKTDYMVGSYGPRAEEYEFLTPVEEAPKGMLARGSYSIKSRFTDDDKTDHLSWEWNLTIKKDWKD

SEQ ID NO: 48046 - protein, 211 aa, Homo sapiens
MYIEVCTSCVPNREYVRVFDVTERTALHRHQTGRTCHKCGTQLRDTIVHFGERGTLGQPLNWEAATEAASRADTILCLGSSLKVLKKYPRLWCMTKPPSRRPKLYIVNLQWTPKDDWAALKLHGKCDDVMRLLMAELGLEIPAYSRWQDPIFSLATPLRAGEEGSHSRKSLCRSREEAPPGDRGAPLSSAPILGGWFGRGCTKRTKRKKVT

SEQ ID NO: 48047 - protein, 150 aa, Homo sapiens
MDLATVSALRKMGVKLTPHNKETVQHSDVLFLAVKPHIIPFILDEIGADIEDRHIVVSCAAGVTISSIEKKLSAFRPAPRVIRCMTNTPVVVREGATVYATGTHAQVEDGRLMEQLLSSVGFCTEVEEDLIDAVTGLSGSGPAYGAAVHG

SEQ ID NO: 48048 - protein, 254 aa, Homo sapiens
MASLTAILKTNTVKVPKPIKVLDAPGGGSVLVMEHMDMRHLSSHAAKLGAQLADLHLDNKKLGEMRLKEAGTVGRGGGQEERPFVARFGFDVVTCCGYLPQVNDWQEDWVVFYARQRIQPQMDMVEKESGDREALQLWSALQLKIPDLFRDLEIIPALLHGDLWGGNVAEDSSGPVIFDPASFYGHSEYELAIAGMFGGFSSSFYSAYHGKIPKAPGFEKRLQLYQLFHYLNHWNHFGSGYRGSSLNIMRNLVK

SEQ ID NO: 48049 - protein, 349 aa, Homo sapiens
MVFKAQLFALTGVQPARQKVMVKGGTLKDDDWGNIKIKNMELPCGLTNLGNTCYMNATVQCIRSVPELKDALKRYAGALRASGEMASAQYITAALRDLFDSMDKTSSSIPPIILLQFLHMAFPQFAEKGEQGQYLQQDANECWIQMMRVLQQKLEAIEDDSVKETDSSSASAATPSKKKSLIDQFFGVEFETTMKCTESEEEEVTKGKENQLQLSCFINQEVKYLFTGLKLRLQEEITKQSPTLQRNALYIKSSKISRLPAYLTIQMVRFFYKEKESVNAKVLKDVKFPLMLDMYELCTPELQEKMVSFRSKFKDLEDKKVNQQPNTSDKKSSPQKEVKYEPFSFADGK

SEQ ID NO: 48050 - protein, 433 aa, Homo sapiens [sequence omitted]

SEQ ID NO: 48051 - protein, 975 aa, Homo sapiens [sequence omitted]

SEQ ID NO: 48052 - protein, 443 aa, Homo sapiens
MSETIKYNDDDHKTLFLKTLNEQRLEGEFCDIAIVVEDVKFRAHRCVLAACSTYFKKLFKKLEVDSSSVIEIDFLRSDIFEEVLNYMYTAKISVKKEDVNLMMSSGQILGIRFLDKLCSQKRDVSSPDENNGQSKSKYCLKINRPIGDAADTQDDDVEEIGDQDDSPSDDTVEGTPPSQEDGKSPTTTLRVQEAILKELGSEEVRKVNCYGQEVESMETPESKDLGSQTPQALTFNDGMSEVKDEQTPGWTTAASDMKFEYLLYGHHREQIACQACGKTFSDEGRLRKHEKLHTADRPFVCEMCTKGFTTQAHLKEHLKIHTGYKPYSCEVCGKSFIRAPDLKKHERVHSNERPFACHMCDKAFKHKSHLKDHERRHRGEKPFVCGSCTKAFAKASDLKRHENNMHSERKQVTPSAIQSETEQLQAAAMAAEAEQQLETIACS

SEQ ID NO: 48053 - protein, 2807 aa, Homo sapiens
MCICYGHASSCPWDETTKKLQCQCEHNTCGESCNRCCPGYHQQPWRPGTVSSGNTCEACNCHNKAKDCYYDESVAKQKKSLNTAGQFRGGGVCINCLQNTMGINCETCIDGYYRPHKVSPYEDEPCRPCNCDPVGSLSSVCIKDDLHSDLHNGKQPGQCPCKEGYTGEKCDRCQLGYKDYPTCVSCGCNPVGSASDEPCTGPCVCKENVEGKACDRCKPGFYNLKEKNPRGCSECFCFGVSDVCSSLSWPVGQVNSMSGWLVTDLISPRKIPSQQDALGGRHQVSINNTAVMQRLAPKYYWAAPEAYLGNKLTAFGGFLKYTVSYDIPVETVDSNLMSHADVIIKGNGLTLSTQAEGLSLQPYEEYLNVVRLVPENFQDFHSKRQIDRDQLMTVLANVTHLLIRANYNSAKMALYRLESVSLDIASSNAIDLVVAADVEHCECPQGYTGTSCESCLSGYYRVDGILFGGICQPCECHGHAAECNVHGVCIACAHNTTGVHCEQCLPGFYGEPSRGTPGDCQPCACPLTIASNNFSPTCHLNDGDEVVCDWCAPGYSGAWCERCADGYYGNPTVPGESCVPCDCSGNVDPSEAGHCDSVTGECLKCLGNTDGAHCERCADGFYGDAVTAKNCRACECHVKGSHSAVCHLETGLCDCKPNVTGQQCDQCLHGYYGLDSGHGCRPCNCSVAGSVSDGCTDEGQCHCVPGVAGKRCDRCAHGFYAYQDGSCTPCDCPHTQNTCDPETGECVCPPHTQGVKCEECEDGHWGYDAEVGCQACNCSLVGSTHHRCDVVTGHCQCKSKFGGRACDQCSLGYRDFPDCVPCDCDLRGTSGDACNLEQGLCGCVEETGACPCKENVFGPQCNECREGTFALRADNPLGCSPCFCSGLSHLCSELEDYVRTPVTLGSDQPLLRVVSQSNLRGTTEGVYYQAPDFLLDAATVRQHIRAEPFYWRLPQQFQGDQLMAYGGKLKYSVAFYSLDGVGTSNFEPQVLIKGGRIRKQVIYMDAPAPENGVRQEQEVAMRENFWKYFNSVSEKPVTREDFMSVLSDIEYILIKASYGQGLQQSRISDISMEVGRKAEKLHPEEEVASLLENCVCPPGTVGFSCQDCAPGYHRGKLPAGSDRGPRPLVAPCVPCSCNNHSDTCDPNTGKCLNCGDNTAGDHCDVCTSGYYGKVTGSASDCALCACPHSPPASFSPTCVLEGDHDFRCDACLLGYEGKHCERCSSSYYGNPQTPGGSCQKCDCNPHGSVHGDCDRTSGQCVCRLGASGLRCDECEPRHILMETDCVSCDDECVGVLLNDLDEIGDAVLSLNLTGIIPVPYGILSNLENTTKYLQESLLKENMQKDLGKIKLEGVAEETDNLQKKLTRMLASTQKVNRATERIFKESQDLAIAIERLQMSITEIMEKTTLNQTLDEDFLLPNSTLQNMQQNGTSLLEIMQIRDFTQLHQNATLELKAAEDLLSQIQENYQKPLEELEVLKEAASHVLSKHNNELKAAEALVREAEAKMQESNHLLLMVNANLREFSDKKLHVQEEQNLTSELIVQGRGLIDAAAAQTDAVQDALEHLEDHQDKLLLWSAKIRHHIDDLVMHMSQRNAVDLVYRAEDHAAEFQRLADVLYSGLENIRNVSLNATSAAYVHYNIQSLIEESEELARDAHRTVTETSLLSESLVSNGKAAVQRSSRFLKEGNNLSRKLPGIALELSELRNKTNRFQENAVEITRQTNESLLILRAIPKGIRDKGAKTKELATSASQSAVSTLRDVAGLSQELLNTSASLSRVNTTLRETHQLLQDSTMATLLAGRKVKDVEIQANLLFDRLKPLKMLEENLSRNLSEIKLLISQARKQAASIKVAVSADRDCIRAYQPQISSTNYNTLTLNVKTQEPDNLLFYLGSSTASDFLAVEMRRGRVAFLWDLGSGSTRLEFPDFPIDDNRWHSIHVARFGNIGSLSVKEMSSNQKSPTKTSKSPGTANVLDVNNSTLMFVGGLGGQIKKSPAVKVTHFKGCLGEAFLNGKSIGLWNYIEREGKCRGCFGSSQNEDPSFHFDGSGYSVVEKSLPATVTQIIMLFNTFSPNGLLLYLGSYGTKDFLSIELFRGRVKVMTDLGSGPITLLTDRRYNNGTWYKIAFQRNRKQGVLAVIDAYNTSNKETKQGETPGASSDLNRLDKDPIYVGGLPRSRVVRRGVTTKSFVGCIKNLEISRSTFDLLRNSYGVRKGCLLEPIRSVSFLKGGYIELPPKSLSPESEWLVTFATTNSSGIILAALGGDVEKRGDREEAHVPFFSVMLIGGNIEVHVNPGDGTGLRKALLHAPTGTCSDGQAHSISLVRNRRIITVQLDENNPVEMKLGTLVESRTINVSNLYVGGIPEGEGTSLLTMRRSFHGCIKNLIFNLELLDFNSAVGHEQVDLDTCWLSERPKLAPDAEDSKLLPEPRAFPEQCVVDAALEYVPGAHQFGLTQNSHFILPFNQSAVRKKLSVELSIRTFASSGLIYYMAHQNQADYAVLQLHGGRLHFMFDLGKGRTKVSHPALLSDGKWHTVKTDYVKRKGFITVDGRESPMVTVVGDGTMLDVEGLFYLGGLPSQYQARKIGNITHSIPACIGDVTVNSKQLDKDSPVSAFTVNRCYAVAQEGTYFDGSGYAALVKEGYKVQSDVNITLEFRTSSQNGVLLGISTAKVDAIGLELVDGKVLFHVNNGAGRITAAYEPKTATVLCDGKWHTLQANKSKHRITLIVDGNAVGAESPHTQSTSVDTNNPIYVGGYPAGVKQKCLRSQTSFRGCLRKLALIKSPQVQSFDFSRAFELHGVFLHSCPGTES

SEQ ID NO: 48054 - protein, 48 aa, Homo sapiens
MSIHQCKISCESMGASKYRWFHNACCECIGPECIDYGSKTVKCMNCMF

SEQ ID NO: 48055 - protein, 907 aa, Homo sapiens
MLTPLGRLDKYAASENIFNRQMVARSLLDTLREVCDDERDCIAVLERISRLADDSEPTVRAELMEQVPHIALFCQENRPSIPYAFSKFLLPIVVRYLADQNNQVRKTSQAALLALLEQELIERFDVETKVCPVLIELTAPDSNDDVKTEAVAIMCKMAPMVGKDITERLILPRFCEMCCDCRMFHVRKVCAANFGDICSVVGQQATEEMLLPRFFQLCSDNVWGVRKACAECFMAVSCATCQEIRRTKLSALFINLISDPSRWVRQAAFQSLGPFISTFANPSSSGQYFKEESKSSEEMSVENKNRTRDQEAPEDVQVRPEDTPSDLSVSNSSVILENTMEDHAAEASGKPLGEISVPLDSSLLCTLSSESHQEAASNENDKKPGNYKSMLRPEVGTTSQDSALLDQELYNSFHFWRTPLPEIDLDIELEQNSGGKPSPEGPEEESEGPVPSSPNITMATRKELEEMIENLEPHIDDPDVKAQVEVLSAALRASSLDAHEETISIEKRSDLQDELDINELPNCKINQEDSVPLISDAVENMDSTLHYIHSDSDLSNNSSFSPDEERRTKVQDVVPQALLDQYLSMTDPSRAQTVDTEIAKHCAYSLPGVALTLGRQNWHCLRETYETLASDMQWKVRRTLAFSIHELAVILGDQLTAADLVPIFNGFLKDLDEVRIGVLKHLHDFLKLLHIDKRREYLYQLQEFLVTDNSRNWRFRAELAEQLILLLELYSPRDVYDYLRPIALNLCADKVSSVRWISYKLVSEMVKKLHAATPPTFGVDLINELVENFGRCPKWSGRQAFVFVCQTVIEDDCLPMDQFAVHLMPHLLTLANDRVPNVRVLLAKTLRQTLLEKDYFLASASCHQEAVEQTIMALQMDRDSDVKYFASIHPASTKISEDAMSTASSTY

SEQ ID NO: 48056 - protein, 152 aa, Homo sapiens [sequence omitted]

SEQ ID NO: 48057 - protein, 199 aa, Homo sapiens
MVQTIFAPPNTSDMEAVWKEAKPDELMDSKLRCVFEMPNENDKLGITPPGNAPTVTSMSSINNTVATPASYHTKDDPRGLSVLKQEKQKNDMEPSKAVPLNASKQDGPMPKPHSVSLNDTETRKLMEECKRLQGEMMKLSEENRHLRDEGLRLRKVAHSDKPGSTSTASFRDNVTSPLPSLLVVIAAIFIGFFLGKFIL

SEQ ID NO: 48058 - protein, 154 aa, Homo sapiens
MVQTIFAPPNTSDMEAVWKEAKPDELMDSKLRCVFEMPNENDKLNDMEPSKAVPLNASKQDGPMPKPHSVSLNDTETRKLMEECKRLQGEMMKLSEENRHLRDEGLRLRKVAHSDKPGSTSTASFRDNVTSPLPSLLVVIAAIFIGFFLGKFIL

SEQ ID NO: 48059 - protein, 209 aa, Homo sapiens
MYLENGTPDTAAMALERAGKLIENVDPEKAVQLYQQTANVFENEERLRQAVELLGKASRLLVRGRRFDEAALSIQKEKNIYKEIENYPTCYKKTIAQVLVHLHRNDYVAAERCVRESYSIPGFNGSEDCAALEQLLEGYDQQDQDQVSDVCNSPLFKYMDNDYAKLGLSLVVPGGGIKKKSPATPQAKPDGVTATAADEEEDEYSGGLC

SEQ ID NO: 48060 - protein, 199 aa, Homo sapiens
MFRHPSHVQLKVVAGNHDIGFHYEMNTYKVERFEKVFSSERLFSWKGINFVMVNSVALNGDGCGICSETEAELIEVSHRLNCSREARGSSRCGPGPLLPTSAPVLLQHYPLYRRSDANCSGEDAAPAEERDIPFKENYDVLSREASQKLLWWLQPRLVLSGHTHSACEVHHGGRVPELSVPSFSWRNRNNPSFIMGTDA

SEQ ID NO: 48061 - protein, 705 aa, Homo sapiens [sequence omitted]

SEQ ID NO: 48062 - protein, 144 aa, Homo sapiens
MNPSVLGVDVLQRRVDGRGRLHSLRLLSTEWGLPSLVRAILGTSRTLTYIREHSVVDPVEKKMELCSTNITLTNLVSVNERLVYTPHPENPEMTVLTQEAIITVKGISLGSYLESLMANTISSNAKKGWAAIEWIIEHSESAVS

SEQ ID NO: 48063 - protein, 583 aa, Homo sapiens
MANTVEADGSNDEGYEAAEEGLGDEDEKRKISAIRSYRDVMKLCAAHLPTESDAPNHYQAVCRALFAETMELHTFLTKIKSAKENLKKIQEMEKSDESSTDLEELKNADWARFWVQVMRDLRNGVKLKKVQERQYNPLPIEYQLTPYEMLMDDIRCKRYTLRKVMVNGDIPPRLKKSAHEIILDFIRSRPPLNPVSARKLKPTPPRPRSLHERILEEIKAERKLRPVSPEEIRRSRLDVTTPESTKNLVESSMVNGGLTSQTKENGLSTSQQVPAQRKKLLRAPTLAELDSSESEEETLHKSTSSSSVSPSFPEEPVLEAVSTRKKPPKFLPISSTPQPERRQPPQRRHSIEKETPTNVRQFLPPSRQSSRSLEEFCYPVECLALTVEEVMHIRQVLVKAELEKYQQYKDIYTALKKGKLCFCCRTRRFSFFTWSYTCQFCKRPVCSQCCKKMRLPSKPYSTLPIFSLGPSALQRGESSMRSEKPSTAHHRPLRSIARFSSKSKSMDKSDEELQFPKELMEDWSTMEVCVDCKKFISEIISSSRRSLVLANKRARLKRKTQSFYMSSPGPSEYCPSERTISEI

SEQ ID NO: 48064 - protein, 473 aa, Homo sapiens
MLSISDPIHMVLIKTDIFGETTLVASYFLEWRSVLGSENGVTSLTVELMGVGTESKVSVGILNIKLEMYPPLNQTLSQEVVNTQLALERQKTAEKERLFLVYAKQWWREYLQIRPSHNSRLVKIFAQDENGINRPVCSYVKPLRAGRLLDTPRQAARFVNVLGYERAPVIGGGGKQEQWCTLLAFLCRNKGDCEDHANLLCSLLLGYGLEAFVCVGTKAKGVPHAWVMTCGTDGAITFWESLTGHRYIHKPTNPDEPPVAEQPKPLYPYRTIGCVFNHQMFLGNCQPSDAVETCVFDLNDESKWKPMSEEAIKSVCAPGATTSLPPFPPLCASTIDASVTSNEIEMQLRLLVSEHRKDLGLTTVWEDQLSYLLSPALASYEFERTTSISAGNEEFQDAIRRAVPDGHTFKGFPIHFVYRNARRAFATCLRSPFCEEIICCRGDQVRLAVRVRVFTYPESACAVWIMFACECAS

SEQ ID NO: 48065 - protein, 254 aa, Homo sapiens
MLFKETGFSVKLLSEDVKSYYTVHLLQLENINSGETRTISHFHYTTWPDFGVPESPASFLNFLFKVRESGSLNPDHGPAVIHCSAGIGRSGTFSLVDTCLVLMEKGDDINIKQVLLNMRKYRMGLIQTPDQLRFSYMAIIEGAKCIKGDSSIQKRWKELSKEDLSPAFDHSPNKIMTEKYNGNRIGLEEEKLTGDRCTGLSSKMQDTMEENSESALRKRIREDRKATTAQKVQQMKQRLNENERKRKRPRLTDT

SEQ ID NO: 48066 - protein, 282 aa, Homo sapiens
MLFKETGFSVKLLSEDVKSYYTVHLLQLENINSGETRTISHFHYTTWPDFGVPESPASFLNFLFKVRESGSLNPDHGPAVIHCSAGIGRSGTFSLVDTCLVLMEKGDDINIKQVLLNMRKYRMGLIQTPDQLRFSYMAIIEGAKCIKGDSSIQKRWKELSKEDLSPAFDHSPNKIMTEKYNGNRIGLEEEKLTGDRCTGLSSKMQDTMEENSESALRKRIREDRKATTAQKVQQMKQRLNENERKRKRWLYWQPILTKMGFMSVILVGAFVGWTLFFQQNAL

SEQ ID NO: 48067 - protein, 347 aa, Homo sapiens
MLSRELSLYLEHQVRVGFFGSGVGLSLILGFSVAYAFYYLSSIAKKPQLVTGGESFSRFLQDHCPVVTETYYPTVWCWEGRGQTLLRPFITSKPPVQYRNELIKTADGGQISLDWFDNDNSTCYMDASTRPTILLLPGLTGTSKESYILHMIHLSEELGYRMLLLNYLGKIGSKTPLMAAATFSVGWNTFACSESLEKPLNWLLFNYYLTTCLQSSVNKHRHMFVKQVDMDHVMKAKSIREFDKRFTSVMFGYQTIDDYYTDASPSPRLKSVGIPVLCLNSVDDVFSPSHAIPIETAKQNPNVALVLTSYGGHIGFLEGIWPRQSTYMDRVFKQFVQAMVEHGHELS

SEQ ID NO: 48068 - protein, 577 aa, Homo sapiens [sequence omitted]

SEQ ID NO: 48069 - protein, 545 aa, Homo sapiens [sequence omitted]

SEQ ID NO: 48070 - protein, 581 aa, Homo sapiens
MGQNVKKLVEQLLDAKIEAEEFTRKLYVELKSSPQPHLVPFLKKSVVALRQLLPNSQSFIQQCVQQTSSDMVIATCTTTVTTSPVVTTTVSSSQSEKSIIVSGATAPRTVSVQTLNPLAGPVGAKAGVVTLHSVGPTAATGGTTAGTGLLQTSKPLVTSVANTVTTVSLQPEKPVVSGTAVTLSLPAVTFGETSGAAICLPSVKPVVSSAGTTSDKPVIGTPVQIKLAQPGPVLSQPAGIPQAVQVKQLVVQQPSGGNEKQVTTISHSSTLTIQKCGQKTMPVNTIIPTSQFPPASILKQITLPGNKILSLQASPTQKNRIKENVTSCFRDEDDINDVTSMAGVNLNEENACILATNSELVGTLIQSCKDEPFLFIGALQKRILDIGKKHDITELNSDAVNLISQATQERLRGLLEKLTAIAQHRMTTYKASENYILCSDTRSQLKFLEKLDQLEKQRKDLEEREMLLKAAKSRSNKEDPEQLRLKQKAKELQQLELAQIQHRDANLTALAAIGPRKKRPLESGIEGLKDNLLASGTSSLTATKQLHRPRITRICLRDLIFCMEQEREMKYSRALYLALLK

SEQ ID NO: 48071 - protein, 741 aa, Homo sapiens
MDQSAALEPEAPPRLLAPRARGGPPGDGSELDPDVLQRPERARLSENTRLATRYAVRIFREYLSEKAQSPDFETMDKGALCRVLRSFYAEARSKSGQLYSKSSLISIRSSLNRYLNEPPYCRTLDLTKDPELRSANLTLAAVIRKLEEQGAGPVVQKQAITRADLRKLYTSSVFSTNTPFGLLNKVWFETCMYFCTRGRENQRELEEDSFGLAMDEDGRKFVYFKSLGPYHKSRSSSWSKKRAESSDEENLPRMYETGTEFCPYASFVKYLSKRNPLCKAFFQRPRDHCSEGDVTWYENKAIGKNLLGTRMQMLSKAAKLSKTYTNHCIGAVSIATLNSIAGIGTKLGSPAPQGCYAEALNGAARHHSHHPPTHPSHHHRPQPPSLGNTYILPKDSQVGPDVKSEAAPKRALYESVFGSGEICGPTSPKRLCIRPSEPVDAVVVVSVKHDPLPLLPEANGHRSTNSPTIVSPAIVSPTQDSRPNMSRPLITRSPASPLNNQGIPTPAQLTKSNAPVHIDVGGHMYTSSLATLTKYPESRIGRLFDGTEPIVLDSLKQHYFIDRDGQMFRYILNFLRTSKLLIPDDFKDYTLLYEEAKYFQLQPMLLEMERWKQDRETGRFSRPCECLVVRVAPDLGERITLSGDKSLIEEVFPEIGDVMCNSVNAGWNHDSTHVIRFPLNGYCHLNSVQVLERLQQRGFEIVGSCGGGVDSSQFSEYVLRRELRRTPRVPSVIRIKQEPLD

SEQ ID NO: 48072 - skipped

SEQ ID NO: 48073 - protein, 148 aa, Homo sapiens [sequence omitted]

SEQ ID NO: 48074 - protein, 168 aa, Homo sapiens
MPVKKQLQGASWELQSLRPHDEDIKTTNVKSASRQKTSLGIELHCNVSNILHMNGSQSSTYRGTYEQDGRFEKRQGNPSWKKQQKCDECGKIFSQSSALILHQRIHSGKKPYACDECAKAFSRSAILIQHRRTHTGEKPYKCHDCGKAFSQSSNLFRHRKRHIRKKVP

SEQ ID NO: 48075 - protein, 677 aa, Homo sapiens
MCLQTLNFGNGFALALCLSFLPNTDVPILACGNDDCRIHIFAQQNDQFQKVLSLCGHEDWIRGVEWAAFGRDLFLASCSQDCLIRIWKLYIKSTSLETQDDDNIRLKENTFTIENESVKIAFAVTLETVLAGHENWVNAVHWQPVFYKDGVLQQPVRLLSASMDKTMILWAPDEESGVWLEQVRVGEVGGNTLGFYDCQFNEDGSMIIAHAFHGALHLWKQNTVNPREWTPEIVISGHFDGVQDLVWDPEGEFIITVGTDQTTRLFAPWKRKDQSQVTWHEIARPQIHGYDLKCLAMINRFQFVSGADEKVLRVFSAPRNFVENFCAITGQSLNHVLCNQDSDLPEGATVPALGLSNKAVFQGDIASQPSDEEELLTSTGFEYQQVAFQPSILTEPPTEDHLLQNTLWPEVQKLYGHGYEIFCVTCNSSKTLLASACKAAKKEHAAIILWNTTSWKQVQNLVFHSLTVTQMAFSPNEKFLLAVSRDRTWSLWKKQDTISPEFEPVFSLFAFTNKITSVHSRIIWSCDWSPDSKYFFTGSRDKKVVVWGECDSTDDCIEHNIGPCSSVLDVGGAVTAVSVCPVLHPSQRYVVAVGLECGKICLYTWKKTDQVPEINDWTHCVETSQSQSHTLAIRKLCWKNCSGKTEQKEAEGAEWLHFASCGEDHTVKIHRVNKCAL

SEQ ID NO: 48076 - protein, 742 aa, Homo sapiens
MCLQTLNFGNGFALALCLSFLPNTDVTWKTGQVERGRAWKPPASLALCSRSCDSMVSCYASILCKALWKEKLHTFWHHNRISFLPSAFRPIPILACGNDDCRIHIFAQQNDQFQKVLSLCGHEDWIRGVEWAAFGRDLFLASCSQDCLIRIWKLYIKSTSLETQDDDNIRLKENTFTIENESVKIAFAVTLETVLAGHENWVNAVHWQPVFYKDGVLQQPVRLLSASMDKTMILWAPDEESGVWLEQVRVGEVGGNTLGFYDCQFNEDGSMIIAHAFHGALHLWKQNTVNPREWTPEIVISGHFDGVQDLVWDPEGEFIITVGTDQTTRLFAPWKRKDQSQVTWHEIARPQIHGYDLKCLAMINRFQFVSGADEKVLRVFSAPRNFVENFCAITGQSLNHVLCNQDSDLPEGATVPALGLSNKAVFQGDIASQPSDEEELLTSTGFEYQQVAFQPSILTEPPTEDHLLQNTLWPEVQKLYGHGYEIFCVTCNSSKTLLASACKAAKKEHAAIILWNTTSWKQVQNLVFHSLTVTQMAFSPNEKFLLAVSRDRTWSLWKKQDTISPEFEPVFSLFAFTNKITSVHSRIIWSCDWSPDSKYFFTGSRDKKVVVWGECDSTDDCIEHNIGPCSSVLDVGGAVTAVSVCPVLHPSQRYVVAVGLECGKICLYTWKKTDQVPEINDWTHCVETSQSQSHTLAIRKLCWKNCSGKTEQKEAEGAEWLHFASCGEDHTVKIHRVNKCAL

SEQ ID NO: 48077 - protein, 583 aa, Homo sapiens
MRALHLLKSGCSPAVQIKIRELYRRRYPRTLEGLSDLSTIKSSVFSLDGGSSPVEPDLAVAGIHSLPSTSVTPHSPSSPVGSVLLQDTKPTFEMQQPSPPIPPVHPDVQLKNLPFYDVLDVLIKPTSLVQSSIQRFQEKFFIFALTPQQVREICISRDFLPGGRRDYTVQVQLRLCLAETSCPQEDNYPNSLCIKVNGKLFPLPGYAPPPKNGIEQKRPGRPLNITSLVRLSSAVPNQISISWASEIGKNYSMSVYLVRQLTSAMLLQRLKMKGIRNPDHSRALIKEKLTADPDSEIATTSLRVSLMCPLGKMRLTIPCRAVTCTHLQCFDAALYLQMNEKKPTWICPVCDKKAAYESLILDGLFMEILNDCSDVDEIKFQEDGSWCPMRPKKEAMKVSSQPCTKIESSSVLSKPCSVTVASEASKKKVDVIDLTIESSSDEEEDPPAKRKCIFMSETQSSPTKGVLMYQPSSVRVPSVTSVDPAAIPPSLTDYSVPFHHTPISSMSSDLPGLDFLSLIPVDPQYCPPMFLDSLTSPLTASSTSVTTTSSHESSTHVSSSSSRSETGVITSSGSNIPDIISLD

SEQ ID NO: 48078 - protein, 507 aa, Homo sapiens
MLGTDIWAANTFDSFSGATWDLQPEKLDFTQFHRKVRHTPKQPLPHIDREGCGKGKLEDGDGINLNDIEKVLPAWQGYHPMPHEVEIAHTKKLFRRRRNDRRRQQRPPGGNKPQQHGDHQPGSAKHNRDHQKSYQGGSAPHPSGRPTHHGYSQNRRWHHGNMKHPPGDKGEAGAHRNAKETMTIENPKLEDTAGDTGHSSLEAPRSPDTLAPVASERLPPQQSGGPEVETKRKDSILPERIGERPKITLLQSSKDRLRRRLKEKVPDEVAVETTTPQQNKMDKLIEILNSMRNNSSDVDTKLTTFMEEAQNSTNSEEMLGEIVRTIYQKAVSDRSFAFTAAKLCDKMALFMVEGTKFRSLLLNMLQKDFTVREELQQQDVERWLGFITFLCEVFGTMRSSTGEPFRVLVCPIYTCLRELLQSQDVKEDAVLCCSMELQSTGRLLEEQLPEMMTELLASARDKMLCPSESMLTRSLLLEVIELHANSWNPLTPPITQYYNRTIQKLTA

SEQ ID NO: 48079 - protein, 460 aa, Homo sapiens
MLSHAYGPGGCGAAAAALNGEQAALLRRKSVNTTECVPVPSSEHVAEIVGRQGCKIKALRAKTNTYIKTPVRGEEPIFVVTGRKEDVAMAKREILSAAEHFSMIRASRNKNGPALGGLSCSPNLPGQTTVQVRVPYRVVGLVVGPKGATIKRIQQQTHTYIVTPSRDKEPVFEVTGMPENVDRAREEIEMHIAMRTGNYIELNEENDFHYNGTDVSFEGGTLGSAWLSSNPVPPSRARMISNYRNDSSSSLGSGSTDSYFGSNRLADFSPTSPFSTGNFWFGDTLPSVGSEDLAVDSPAFDSLPTSAQTIWTPFEPVNPLSGFGSDPSGNMKTQRRGSQPSTPRLSPTFPESIEHPLARRVRSDPPSTGNHVGLPIYIPAFSNGTNSYSSSNGGSTSSSPPESRRKHDCVICFENEVIAALVPCGHNLFCMECANKICEKRTPSCPVCQTAVTQAIQIHS

SEQ ID NO: 48080 - protein, 672 aa, Homo sapiens
MISNPELKDKPLGVQQKYLVVTCNYEARKLGVKKLMNVRDAKEKCPQLVLVNGEDLTRYREMSYKVTELLEEFSPVVERLGFDENFVDLTEMVEKRLQQLQSDELSAVTVSGHVYNNQSINLLDVLHIRLLVGSQIAAEMREAMYNQLGLTGCAGVASNKLLAKLVSGVFKPNQQTVLLPESCQHLIHSLNHIKEIPGIGYKTAKCLEALGINSVRDLQTFSPKILEKELGISVAQRIQKLSFGEDNSPVILSGPPQSFSEEDSFKKCSSEVEAKNKIEELLASLLNRVCQDGRKPHTVRLIIRRYSSEKHYGRESRQCPIPSHVIQKLGTGNYDVMTPMVDILMKLFRNMVNVKMPFHLTLLSVCFCNLKALNTAKKGLIDYYLMPSLSTTSRSGKHSFKMKDTHMEDFPKDKETNRDFLPSGRIESTRTRESPLDTTNFSKEKDINEFPLCSLPEGVDQEVFKQLPVDIQEEILSGKSREKFQGKGSVSCPLHASRGVLSFFSKKQMQDIPINPRDHLSSSKQVSSVSPCEPGTSGFNSSSSSYMSSQKDYSYYLDNRLKDERISQGPKEPQGFHFTNSNPAVSAFHSFPNLQSEQLFSRNHTTDSHKQTVATDSHEGLTENREPDSVDEKITFPSDIDPQVFYELPEAVQKELLAEWKRAGSDFHIGHK

SEQ ID NO: 48081 - protein, 642 aa, Homo sapiens
MFSPPVSSGKNGPTSLASGHFTGSNVEDRSSSGSWGNGGHPSPSRNYGDGTPYDHMTSRDLGSHDNLSPPFVNSRIQSKTERGSYSSYGRESNLQGCHQQSLLGGDMDMGNPGTLSPTKPGSQYYQYSSNNPRRRPLHSSAMEVQTKKVRKVPPGLPSSVYAPSASTADYNRDSPGYPSSKPATSTFPSSFFMQDGHHSSDPWSSSSGMNQPGYAGMLGNSSHIPQSSSYCSLHPHERLSYPSHSSADINSSLPPMSTFHRSGTNHYSTSSCTPPANGTDSIMANRGSGAAGSSQTGDALGKALASIYSPDHTNNSFSSNPSTPVGSPPSLSGTAVWSRNGGQASSSPNYEGPLHSLQSRIEDRLERLDDAIHVLRNHAVGPSTAMPGGHGDMHGIIGPSHNGAMGGLGSGYGTGLLSANRHSLMVGTHREDGVALRGSHSLLPNQVPVPQLPVQSATSPDLNPPQDPYRGMPPGLQGQSVSSGSSEIKSDDEGDENLQDTKSSEDKKLDDDKKDIKSITSNNDDEDLTPEQKAEREKERRMANNARERLRVRDINEAFKELGRMVQLHLKSDKPQTKLLILHQAVAVILSLEQQVRERNLNPKAACLKRREEEKVSSEPPPLSLAGPHPGMGDASNHMGQM

SEQ ID NO: 48082 - protein, 1299 aa, Homo sapiens
MGDMKTPDFDDLLAAFDIPDMVDPKAAIESGHDDHESHMKQNAHGEDDSHAPSSSDVGVSVIVKNVRNIDSSEGGEKDGHNPTGNGLHNGFLTASSLDSYSKDGAKSLKGDVPASEVTLKDSTFSQFSPISSAEEFDDDEKIEVDDPPDKEDMRSSFRSNVLTGSAPQQDYDKLKALGGENSSKTGLSTSGNVEKNKAVKRETEASSINLSVYEPFKVRKAEDKLKESSDKVLENRVLDGKLSSEKNDTSLPSVAPSKTKSSSKLSSCIAAIAALSAKKAASDSCKEPVANSRESSPLPKEVNDSPRAADKSPESQNLIDGTKKPSLKQPDSPRSISSENSSKGSPSSPAGSTPAIPKVRIKTIKTSSGEIKRTVTRVLPEVDLDSGKKPSEQTASVMASVTSLLSSPASAAVLSSPPRAPLQSAVVTNAVSPAELTPKQVTIKPVATAFLPVSAVKTAGSQVINLKLANNTTVKATVISAASVQSASSAIIKAANAIQQQTVVVPASSLANAKLVPKTVHLANLNLLPQGAQATSELRQVLTKPQQQIKQAIINAAASQPPKKVSRVQVVSSLQSSVVEAFNKVLSSVNPVPVYIPNLSPPANAGITLPTRGYKCLECGDSFALEKSLTQHYDRRSVRIEVTCNHCTKNLVFYNKCSLLSHARGHKEKGVVMQCSHLILKPVPADQMIVSPSSNTSTSTSTLQSPVGAGTHTVTKIQSGITGTVISAPSSTPITPAMPLDEDPSKLCRHSLKCLECNEVFQDETSLATHFQQAADTSGQKTCTICQMLLPNQCSYASHQRIHQHKSPYTCPECGAICRSVHFQTHVTKNCLHYTRRVGFRCVHCNVVYSDVAALKSHIQGSHCEVFYKCPICPMAFKSAPSTHSHAYTQHPGIKIGEPKIIYKCSMCDTVFTLQTLLYRHFDQHIENQKVSVFKCPDCSLLYAQKQLMMDHIKSMHGTLKSIEGPPNLGINLPLSIKPATQNSANQNKEDTKSMNGKEKLEKKSPSPVKKSMETKKVASPGWTCWECDCLFMQRDVYISHVRKEHGKQMKKHPCRQCDKSFSSSHSLCRHNRIKHKGIRKVYACSHCPDSRRTFTKRLMLEKHVQLMHGIKDPDLKEMTDATNEEETEIKEDTKVPSPKRKLEEPVLEFRPPRGAITQPLKKLKINVFKVHKCAVCGFTTENLLQFHEHIPQHKSDGSSYQCRECGLCYTSHVSLSRHLFIVHKLKEPQPVSKQNGAGEDNQQENKPSHEDESPDGAVSDRKCKVCAKTFETEAALNTHMRTHGMAFIKSKRMSSAEK

SEQ ID NO: 48083 - protein, 162 aa, Homo sapiens
MRTSQKDVRCPWCRGVTKLPPGFSVSQLPDDPEVLAVIAIPHTSEHTPVFIKLPSNGCYMLPLPISKERALLPGDMGCRLLPGSQQKSVTVVTIPAEQQPLQGGAPQEAVEEEQDRRGVVKSSTWSGVCTVILVACVLVFLLGIVLHNMSCISKRFTVISCG

SEQ ID NO: 48084 - protein, 900 aa, Homo sapiens [sequence omitted]

SEQ ID NO: 48085 - protein, 939 aa, Homo sapiens
MTPQFTPLPPPARRLVLFVADGLRADALYELDENGNSRAPFIRNIIMHEGSWGISHTRVPTESRPGHVALIAGFYEDVSAVAKGWKENPVEFDSLFNESKYTWSWGSPDILPMFAKGASGDHVYTYSYDAKREDFGAQDATKLDTWVFDNVKDFFHHARNNQSLFSKINEEKIVFFLHLLGIDTNGHAHRPSSRDYKHNIKKVDDGVKEIVSMFNHFYGNDGKTTFIFTSDHGMTDWGSHGAGHPSETLTPLVTWGAGIKYPQRVSAQQFDDAFLKEWRLENWKRLDVNQADIAPLMTSLIGVPFPLNSVGILPVDYLNNTDLFKAESMFTNAVQILEQFKVKMTQKKEVTLPFLFTPFKLLSDSKQFNILRKARSYIKHRKFDEVVSLCKELIHLALKGLSYYHTYDRFFLGVNVVIGFVGWISYASLLIIKSHSNLIKGVSKEVKKPSHLLPCSFVAIGILVAFFLLIQACPWTYYVYGLLPLPIWYAVLREFQVIQDLVVSVLTYPLSHFVGYLLAFTLGIEVLVLSFFYRYMLTAGLTAFAAWPFLTRLWTRAKMTSLSWTFFSLLLAVFPLMPVVGRKPDISLVMGAGLLVLLLSLCVVTSLMKRKDSFIKEELLVHLLQVLSTVLSMYVVYSTQSSLLRKQGLPLMNQIISWATLASSLVVPLLSSPVLFQRLFSILLSLMSTYLLLSTGYEALFPLVLSCLMFVWINIEQETLQQSGVCCKQKLTSIQFSYNTDITQFRQLYLDDIRRAFFLVFFLVTAFFGTGNIASINSFDLASVYCFLTVFSPFMMGALMMWKILIPFVLVMCAFEAVQLTTQLSSKSLFLIVLVISDIMALHFFFLVKDYGSWLDIGTRQLLACTAWLFMYISASPNRLWMLSDPGLDLNLLHAIRACISHYVIVMSMTIFLVFLNGLAQLLTTKKLRLCGKPKSHFM

SEQ ID NO: 48086 - protein, 44 aa, Homo sapiens
MTTESTHSKNVSTSSSSLGKHTQMHHTCVVSLSPVMVFCARNDS

SEQ ID NO: 48087 - protein, 1314 aa, Homo sapiens
MRVSLSQQSSLLTVLFRVSLIFHEDCSVVTEVGALFCLLLFDEVSRMDMWSVNPSNKPSLPSVFSLPVSVFRRYHLPVHVIGHHAVSPYSIVLPLSADCLALKPVSDMLRIAWNLSWYHGSDNLLKQMNSETKTQEILDALKLSTEDILTLKITHMASGLQDCLHSIVQAATHREVRAAVTRMSFYLLNDRLSLKGCPGPCGVTLKSLAWHTALNRFLQVLPACTEDEKLLIDIIHFLNKLIKEQRKNSSLELLNWILELLLRHSANPLLDLLVLTESQAREETDDIRTAVRQQLQKELIALFDTLLLNFMEVTDRKCSELLYVFQTQLALKLLQCLKVTDAPHFYGLPSLERTLRGMANLTAFPGWSSHSPLTKPLDICVKYLSGLLEVITSFYVERGGNAMSFMGKGVTKSTILCLLHLSHEMMAQAGSLEWMSLWFLPLGSHSEEHIPTQQGLAWLIPLWVDRDPEVRFTSLGLGSALTTLETGCVALANSCQNISGGLWGTVVNILLDQSECSMVRREAAFILQNLLVIPMPTEIIKDYTWQGPCVHDEDSGLSLIGKPALQALLYHCHFYEHLNQMVKHCYLGRCMFDLNFSAFDRNSESNDLNGLDDSFKFWRAPSRTSQDRDPSSLSTSETTVAPSLGSTEFQPLVQSTTLLPEASHDQFVAQGHQESTSPRPPHDSSLSAPLPKLCVFVTPSLLSAMCSLLDNLLTIAPRDTAKAFRQAHLIELLCSIADATLIQTCVQELRALLPSSPPAEHTQAQVSFLLEYLSSLSRLLQSCLLVEPDLVIQDELVKPLITNIIGILTICTKDVLDKELISAFYHTWTHLFNLLAMLLRKAGAITLPFVTVALAKHWTAAIDMFCTCAGLSATCPALYTASLQFLSVLLTEEAKGHLQAKSKTHLCCSPTVASLLDDSQENQKSLEQLSDVILQCYEGKSSKDILKRVAANALMSLLAVSRRAQKHALKANLIDNCMEQMKHINAQLNLDSLRPGKAALKKKEDGVIKELSIAMQLLRNCLYQNEECKEAALEAHLVPVLHSLWPWILMDDSLMQISLQLLCVYTANFPNGCSSLCWSSCGQHPVQATHRGAVSNSLMLCILKLASQMPLENTTVQQMVFMLLSNLALSHDCKGVIQKSNFLQNFLSLALPKGGNKHLSNLTILWLKLLLNISSGEDGQQMILRLDGCLDLLTEMSKYKHKSSPLLPLLIFHNVCFSPANKPKILANEKVITVLAACLESENQNAQRIGAAALWALIYNYQKAKTALKSPSVKRRVDEAYSLAKKTFPNSEANPLNAYYLKCLENLVQLLNSS

SEQ ID NO: 48088 - protein, 237 aa, Homo sapiens [sequence omitted]

SEQ ID NO: 48089 - protein, 405 aa, Homo sapiens
MEVAVCTDSAAPMWSCIVWELHSGANLLTYRGGQAGPRGLALLNGEYLLAAQLGKNYISAWELQRKDQLQQKIMCPGPVTCLTASPNGLYVLAGVAESIHLWEVSTGNLLVILSRHYQDVSCLQFTGDSSHFISGGKDCLVLVWSLCSVLQADPSRIPAPRHVWSHHALPITDLHCGFGGPLARVATSSLDQTVKLWEVSSGELLLSVLFDVSIMAVTMDLAEHHMFCGGSEGSIFQVDLFTWPGQRERSFHPEQDAGKVFKGHRNQVTCLSVSTDGSVLLSGSHDETVRLWDVQSKQCIRTVALKGPVTNAAILLAPVSMLSSDFRPSLPLPHFNKHLLGAEHGDEPRHGGLTLRLGLHQQSVLGGQDQLRVRVTELEDEVRNLRKINRDLFDFSTRFITRPAK

SEQ ID NO: 48090 - protein, 144 aa, Homo sapiens
MVNLDKYRGFVCIVTNVASQGKTEVNYTQLVDLHARYAECGLRILAFPCNQFGKQEPGSNEEIKEFAAGYNVKFDMFSKICVNGDDAHPLWKWMKIQPKGKGILGNAIKWNFTKFLIDKNGCVVKRYGPMEEPLVIEKDLPHYF

SEQ ID NO: 48091 - protein, 383 aa, Homo sapiens [sequence omitted]

SEQ ID NO: 48092 - protein, 66 aa, Homo sapiens
MQRLAQLLGEPAETQGTTEARDLHCLLVTNPHTDAWKSHGLVEVASYCEESRGNNQWVPYISLQER

SEQ ID NO: 48093 - protein, 82 aa, Homo sapiens
MQRLAQLLGEPAETQGTTEARDLHCLLVTVSRASALPRHARAPGPVFVNKVGLTGPAQLSAQPRLACPVGSRAGASSPRKLF

SEQ ID NO: 48094 - protein, 227 aa, Homo sapiens
MTVFLEQLILTFRKEKPSFIDLETFNAGSDVGSDSEYESPFMGGARGHALYVEPHGHGPSLSVQGLSRASPVRLLSLAFALSAHSVFEGLALGLQEEGEKVVSLFVGVAVHETLVAVALGISMARSAMPLRDAAKLAVTVSAMIPLGIGLGLGIESAQGVPGSVASVLLQGLAGGTFLFITFLEILAKELEEKSDRLLKVLFLVLGYTVLAGMVFLKWISPPEPRVS

SEQ ID NO: 48095 - protein, 576 aa, Homo sapiens [sequence omitted]

SEQ ID NO: 48096 - protein, 476 aa, Homo sapiens
MHRRTSLKSPITVHTGHKPYQCQECGQAYSCRSHLRMHVRTHNGERPYVCKLCGKTFPRTSSLNRHVRIHTAEKTYECKQCGKAFIDFSSLTSHLRSHTGEKPYKCKECGKAFSYSSTFRRHTITHTGEKPYKCKECAEAFSYSSTFRRHMISHTGEKPHKCKECGEAFSYSSAFRRHMITHTGEKPYECKQCGKTFIYLQSFRRHERIHTGEKPYECKQCGKTFIYPQSFRRHERTHGGEKPYECNQCGKAFSHPSSFRGHMRVHTGEKPYECKQCGKTFNWPISLRKHMRTHTREKPYECKQCGKAFSLSACFREHVRMHPEDKSYECKLCGKAFYCHISLQKHMRRHTAEKLYKCKQCGKAFSWPELLQQHVRTHTVEKPYECKECGKVFKWPSSLPIHMRLHTGEKPYQCKHCGKAFNCSSSLRRHVRIHTTEKQYKCNVGHPPANEFMCSASEKSHQERDLIKVVNMVLPL

SEQ ID NO: 48097 - protein, 163 aa, Homo sapiens
MDVRSRVDSKTLTRNTRIIAEALTRVIYNLTEKGTPPDMPVFTEQMIQQEQLDSVMDWLTNQPRAAQLVDKDSTFLSTLEHHLSRYLKDVKQHHVKADKRDPEFVFYDQLKQVMNAYRVKPAVFDLLLAVGIAAYLGMAYVAVQHFSLLYKTVQRLLVKAKTQ

SEQ ID NO: 48098 - protein, 473 aa, Homo sapiens
MPRVTEMRRTLTPASSPVSSPSKHGDRFIPSRAGANWSVNFHRINENEKSPSQNRKAKDATSDNGKDGLAYSALLKNELLGAGIEKVQDPQTEDRRLQPSTPEKKGLFTYSLSTKRSSPDDGNDVSPYSLSPVSNKSQKLLRSPRKPTRKISKIPFKVLDAPELQDDFYLNLVDWSSLNVLSVGLGTCVYLWSACTSQVTRLCDLSVEGDSVTSVGWSERGNLVAVGTHKGFVQIWDAAAGKKLSMLEGHTARVGALAWNAEQLSSGSRDRMILQRDIRTPPLQSERRLQGHRQEVCGLKWSTDHQLLASGGNDNKLLVWNHSSLSPVQQYTEHLAAVKAIAWSPHQHGLLASGGGTADRCIRFWNTLTGQPLQCIDTGSQVCNLAWSKHANELVSTHGYSQNQILVWKYPSLTQVAKLTGHSYRVLYLAMSPDGEAIVTGAGDETLRFWNVFSKTRSTKESVSVLNLFTRIR

SEQ ID NO: 48099 - protein, 199 aa, Homo sapiens
MGLKATGRLCTVAKARGLRACRGELRDTILDWEDSLPDRDLALADEASRNADLSITLGTSLQIRPSGNLPLATKRRGGRLVIVNLQPTKHDRHADLRIHGYVDEVMTRLMKHLGLEIPAWDGPRVLERALPPLPRPPTPKLEPKEESPTRINGSIPAGPKQEPCAQHNGSEPASPKRERPTSPAPHRPPKRVKAKAVPS

SEQ ID NO: 48100 - protein, 283 aa, Homo sapiens [sequence omitted]

SEQ ID NO: 48101 - protein, 657 aa, Homo sapiens
MKGYPHWPARIDDIADGAVKPPPNKYPIFFFGTHETAFLGPKDLFPYDKCKDKYGKPNKRKGFNEGLWEIQNNPHASYSAPPPVSSSDSEAPEANPADGSDADEDDEDRGVMAVTAVTATAASDRMESDSDSDKSSDNSGLKRKTPALKMSVSKRARKASSDLDQASVSPSEEENSESSSESEKTSDQDFTPEKKAAVRAPRRGPLGGRKKKKAPSASDSDSKADSDGAKPEPVAMARSASSSSSSSSSSDSDVSVKKPPRGRKPAEKPLPKPRGRKPKPERPPSSSSSDSDSDEVDRISEWKRRDEARRRELEARRRREQEEELRRLREQEKEEKERRRERADRGEAERGSGGSSGDELREDDEPVKKRGRKGRGRGPPSSSDSEPEAELEREAKKSAKKPQSSSTEPARKPGQKEKRVRPEEKQQAKPVKVERTRKRSEGFSMDRKVEKKKEPSVEEKLQKLHSEIKFALKVDSPDVKRCLNALEELGTLQVTSQILQKNTDVVATLKKIRRYKANKDVMEKAAEVYTRLKSRVLGPKIEAVQKVNKAGMEKEKAEEKLAGEELAGEEAPQEKAEDKPSTDLSAPVNGEATSQKGESAEDKEHEEGRDSEEGPRCGSSEDLHDSVREGPDLDRPGSDRQERERARGDSEALDEES

SEQ ID NO: 48102 - protein, 656 aa, Homo sapiens
MKGYPHWPARIDDIADGAVKPPPNKYPIFFFGTHETAFLGPKDLFPYDKCKDKYGKPNKRKGFNEGLWEIQNNPHASYSAPPPVSSSDSEAPEANPADGSDADEDDEDRGVMAVTAVTATAASDRMESDSDSDKSSDNSGLKRKTPALKMSVSKRARKASSDLDQASVSPSEEENSESSSESEKTSDQDFTPEKKAAVRAPRRGPLGGRKKKKAPSASDSDSKADSDGAKPEPVAMARSASSSSSSSSSSDSDVSVKKPPRGRKPAEKPLPKPRGRKPKPERPPSSSSSDSDSDEVDRISEWKRRDEARRRELEARRRREQEEELRRLREQEKEEKERRRERADRGEAERGSGGSSGDELREDDEPVKKRGRKGRGRGPPSSSDSEPEAELEREAKKSAKKPQSSSTEPARKPGQKEKRVRPEEKQQAKPVKVERTRKRSEGFSMDRKVEKKKEPSVEEKLQKLHSEIKFALKVDSPDVKRCLNALEELGTLQVTSQILQKNTDVVATLKKIRRYKANKDVMEKAAEVYTRLKSRVLGPKIEAVQKVNKAGMEKEKAEEKLAGEELAGEEAPQEKAEDKPSTDLSAPVNGEATSQKGESAEDKEHEEGRDSEEGPRCGSSEDLHDVREGPDLDRPGSDRQERERARGDSEALDEES

SEQ ID NO: 48103 - protein, 460 aa, Homo sapiens [sequence omitted]

SEQ ID NO: 48104 - protein, 860 aa, Homo sapiens
MERLKKAIEDEGGNPDEIEITSEGNKKTSKRSSKGRKPEEEGVEDNGLEENSGDGQEDVETSLENLQDIDIMDISVLDEAEIDNGSVADCVEDDDADNLQESLSDSRELVEGEMKELPEQLQEHAIEDKETINNLDTSSSDFTILQEIEEPSLEPENEKILDILGETCKSEPVKEESSELEQPFAQDTSSVGPDRKLAEEEDLFDSAHPEEGDLDLASESTAHAQSSKADSLLAVVKREPAEQPGDGERTDCEPVGLEPAVEQSSAASELAEASSEELAEAPTEAPSPEARDSKEDGRKFDFDACNEVPPAPKESSTSEGADQKMSSPEDDSDTKRLSKEEKGRSSCGRNFWVSGLSSTTRATDLKNLFSKYGKVVGAKVVTNARSPGARCYGFVTMSTAEEATKCINHLHKTELHGKMISVEKAKNEPVGKKTSDKRDSDGKKEKSSNSDRSTNLKRDDKCDRKDDAKKGDDGSGEKSKDQDDQKPGPSERSRATKSGSRGTERTVVMDKSKGVPVISVKTSGSKERASKSQDRKSASREKRSVVSFDKVKEPRKSRDSESHSRVRERSEREQRMQAQWEREERERLEIARERLAFQRQRLERERMERERLERERMHVEHERRREQERIHREREELRRQQELRYEQERRPAVRRPYDLDRRDDAYWPEAKRAALDERYHSDFNRQDRFHDFDHRDRGRYPDHSVDRREGSRSMMGEREGQHYPERHGGPERHGRDSRDGWGGYGSDKRMSEGRGLPPPPRGRRDWGDHGRREDDRSWQGTADGGMMDRDHKRWQGGERSMSGHSGPGHMMNRGGMSGRGSFAPGGASRGHPIPHGGMQGGFGGQSRGSRPSDARFTRRY

SEQ ID NO: 48105 - protein, 937 aa, Homo sapiens
MLAAAGGRVPTAAGAWLLRGQRTCDASPPWALWGRGPAIGGQWRGFWEASSRGGGAFSGGEDASEGGAEEGAGGAGGSAGAGEGPVITALTPMTIPDVFPHLPLIAITRNPVFPRFIKIIEVKNKKLVELLRRKVRLAQPYVGVFLKRDDSNESDVVESLDEIYHTGTFAQIHEMQDLGDKLRMIVMGHRRVHISRQLEVEPEEPEAENKHKPRRKSKRGKKEAEDELSARHPAELAMEPTPELPAEVLMVEVENVVHEDFQVTEEVKALTAEIVKTIRDIIALNPLYRESVLQMMQAGQRVVDNPIYLSDMGAALTGAESHELQDVLEETNIPKRLYKALSLLKKEFELSKLQQRLGREVEEKIKQTHRKYLLQEQLKIIKKELGLEKDDKDAIEEKFRERLKELVVPKHVMDVVDEELSKLGLLDNHSSEFNVTRNYLDWLTSIPWGKYSNENLDLARAQAVLEEDHYGMEDVKKRILEFIAVSQLRGSTQGKILCFYGPPGVGKTSIARSIARALNREYFRFSVGGMTDVAEIKGHRRTYVGAMPGKIIQCLKKTKTENPLILIDEVDKIGRGYQGDPSSALLELLDPEQNANFLDHYLDVPVDLSKVLFICTANVTDTIPEPLRDRMEMINVSGYVAQEKLAIAERYLVPQARALCGLDESKAKLSSDVLTLLIKQYCRESGVRNLQKQVEKVLRKSAYKIVSGEAESVEVTPENLQDFVGKPVFTVERMYDVTPPGVVMGLAWTAMGGSTLFVETSLRRPQDKDAKGDKDGSLEVTGQLGEVMKESARIAYTFARAFLMQHAPANDYLVTSHIHLHVPEGATPKDGPSAGCTIVTALLSLAMGRPVRQNLAMTGEVSLTGKILPVGGIKEKTIAAKRAGVTCIVLPAENKKDFYDLAAFITEGLEVHFVEHYREIFDIAFPDEQAEALAVER

SEQ ID NO: 48106 - protein, 489 aa, Homo sapiens [sequence omitted]

SEQ ID NO: 48107 - protein, 1314 aa, Homo sapiens
MIGAGVAVVVTAVLILLVVRRLRVPKTPAPDGPRYRFRKRDKVLFYGRKIMRKVSQSTSSLVDTSVSATSRPRMRKKLKMLNIAKKILRIQKETPTLQRKEPPPAVLEADLTEGDLANSHLPSEVLYMLKNVRVLGHFEKPLFLELCRHMVFQRLGQGDYVFRPGQPDASIYVVQDGLLELCLPGPDGKECVVKEVVPGDSVNSLLSILDVITGHQHPQRTVSARAARDSTVLRLPVEAFSAVFTKYPESLVRVVQIIMVRLQRVTFLALHNYLGLTNELFSHEIQPLRLFPSPGLPTRTSPVRGSKRMVSTSATDEPRETPGRPPDPTGAPLPGPTGDPVKPTSLETPSAPLLSRCVSMPGDISGLQGGPRSDFDMAYERGRISVSLQEEASGGSLAAPARTPTQEPREQPAGACEYSYCEDESATGGCPFGPYQGRQTSSIFEAAKQELAKLMRIEDPSLLNSRVLLHHAKAGTIIARQGDQDVSLHFVLWGCLHVYQRMIDKAEDVCLFVAQPGELVGQLAVLTGEPLIFTLRAQRDCTFLRISKSDFYEIMRAQPSVVLSAAHTVAARMSPFVRQMDFAIDWTAVEAGRALYRQGDRSDCTYIVLNGRLRSVIQRGSGKKELVGEYGRGDLIGVVEALTRQPRATTVHAVRDTELAKLPEGTLGHIKRRYPQVVTRLIHLLSQKILGNLQQLQGPFPAGSGLGVPPHSELTNPASNLATVAILPVCAEVPMVAFTLELQHALQAIGPTLLLNSDIIRARLGASALDSIQEFRLSGWLAQQEDAHRIVLYQTDASLTPWTVRCLRQADCILIVGLGDQEPTLGQLEQMLENTAVRALKQLVLLHREEGAGPTRTVEWLNMRSWCSGHLHLRCPRRLFSRRSPAKLHELYEKVFSRRADRHSDFSRLARVLTGNTIALVLGGGGARGCSHIGVLKALEEAGVPVDLVGGTSIGSFIGALYAEERSASRTKQRAREWAKSMTSVLEPVLDLTYPVTSMFTGSAFNRSIHRVFQDKQIEDLWLPYFNVTTDITASAMRVHKDGSLWRYVRASMTLSGYLPPLCDPKDGHLLMDGGYINNLPADIARSMGAKTVIAIDVGSQDETDLSTYGDSLSGWWLLWKRLNPWADKVKVPDMAEIQSRLAYVSCVRQLEVVKSSSYCEYLRPPIDCFKTMDFGKFDQIYDVGYQYGKAVFGGWSRGNVIEKMLTDRRSTDLNESRRADVLAFPSSGFTDLAEIVSRIEPPTSYVSDGCADGEESDCLTEYEEDAGPDCSRDEGGSPEGASPSTASEMEEEKSILRQRRCLPQEPPGSATDA

SEQ ID NO: 48108 - protein, 415 aa, Homo sapiens [sequence omitted]

SEQ ID NO: 48109 - protein, 296 aa, Homo sapiens
MTQDELRSLFSSIGEVESAKLIRDKVAGHSLGYGFVNYVTAKDAERAINTLNGLRLQSKTIKVSYARPSSEVIKDANLYISGLPRTMTQKDVEDMFSRFGRIINSRVLVDQTTGLSRGVAFIRFDKRSEAEEAITSFNGHKPPGSSEPITVKFAANPNQNKNVALLSQLYHSPARRFGGPVHHQAQRFRFSPMGVDHMSGLSGVNVPGNASSGWCIFIYNLGQDADEGILWQMFGPFGAVTNVKVIRDFNTNKCKGFGFVTMTNYEEAAMAIASLNGYRLGDKILQVSFKTNKSHK

SEQ ID NO: 48110 - protein, 674 aa, Homo sapiens [sequence omitted]

SEQ ID NO: 48111 - protein, 202 aa, Homo sapiens
MGFGLERMAAPIDRVGQTIERMGSGVERMGPAIERMGLSMERMVPAGMGAGLERMGPVMDRMATGLERMGANNLERMGLERMGANSLERMGLERMGANSLERMGPAMGPALGAGIERMGLAMGGGGGASFDRAIEMERGNFGGSFAGSFGGAGGHAPGVARKACQIFVRNLPFDFTWKMLKDKFNECEPERQVLHVSRNALV

SEQ ID NO: 48112 - protein, 617 aa, Homo sapiens
MESNRVSEVCSELWCLSKSNRCITNSIPAAEGTLCQTHTIDKGWCYKRVCVPFGSRPEGVDGAWGPWTPWGDCSRTCGGGVSSSSRHCDSPRPTIGGKYCLGERRRHRSCNTDDCPPGSQDFREVQCSEFDSIPFRGKFYKWKTYRGGGVKACSLTCLAEGFNFYTERAAAVVDGTPCRPDTVDICVSGECKHVGCDRVLGSDLREDKCRVCGGDGSACETIEGVFSPASPGAGYEDVVWIPKGSVHIFIQDLNLSLSHLALKGDQESLLLEGLPGTPQPHRLPLAGTTFQLRQGPDQVQSLEALGPINASLIVMVLARTELPALRYRFNAPIARDSLPPYSWHYAPWTKCSAQCAGGSQVQAVECRNQLDSSAVAPHYCSAHSKLPKRQRACNTEPCPPDWVVGNWSLCSRSCDAGVRSRSVVCQRRVSAAEEKALDDSACPQPRPPVLEACHGPTCPPEWAALDWSECTPSCGPGLRHRVVLCKSADHRATLPPAHCSPAAKPPATMRCNLRRCPPARWVAGEWGECSAQCGVGQRQRSVRCTSHTGQASHECTEALRPPTTQQCEAKCDSPTPGDGPEECKDVNKVAYCPLVLKFQFCSRAYFRQMCCKTCHGH

SEQ ID NO: 48113 - protein, 399 aa, Homo sapiens
MVEDHRSNSYQDSVTFDDVAVEFTPEEWALLDTTQKYLYRDVMLENYMNLASVDFFFCLTSEWEIQPRTKRSSLQQGFLKNQIFTGIQMQTRSYSGWKLCENCGEVFSEQFCLKTHMRAQNGGNTFEGNCYGKDSISVHKEASIGQELSKFNPCGKVFTLTPGLAVHLEILNGRQPYKCKECGKGFKYFASLDNHMGIHIGEKLCEFQECERAITTSSHLKQCVAVHTGKKSEKTKNCGKSFTNFSQLSAHAKTHKGEKSFECKECGRSFRNSSSFNVHIQIHTGIKPHKCTECGKAFTRSTHLTQHVRTHTGIKPYECKECGQAFTQYTGLAIHIRNHTGEKPYQCKECGKAFNRSSTLTQHRRIHTGEKPYECVECGKTFITSSHRSKHLKTHSGER

SEQ ID NO: 48114 - protein, 87 aa, Homo sapiens
MVLVKPGRGGGWGPGRWYSALECPLPRSTASICLNCSAPSTDDTIGDLKKLIAAQTGTRWNKIVLKKWYTIFKDHVSLGDCILCVTF

SEQ ID NO: 48115 - protein, 1495 aa, Homo sapiens [sequence omitted]

SEQ ID NO: 48116 - protein, 442 aa, Homo sapiens
MCYSNCPDGQSTAKTFLTVYWTPERVELAPLPSWQPVGKNLTLRCQVEGGAPRANLTVVLLRGEKELKREPAVGEPAEVTTTVLVRRDHHGANFSCRTELDLRPQGLELFENTSAPYQLQTFVLPATPPQLVSPRVLEVDTQGTVVCSLDGLFPVSEAQVHLALGDQRLNPTVTYGNDSFSAKASVSVTAEDEGTQRLTCAVILGNQSQETLQTVTIYSFPAPNVILTKPEVSEGTEVTVKCEAHPRAKVTLNGVPAQPLGPRAQLLLKATPEDNGRSFSCSATLEVAGQLIHKNQTRELRVLYGPRLDERDCPGNWTWPENSQQTPMCQAWGNPLPELKCLKDGTFPLPIGESVTVTRDLEGTYLCRARSTQGEVTRKVTVNVLSPRYEIVIITVVAAAVIMGTAGLSTYLYNRQRKIKKYRLQQAQKGTPMKPNTQATPP

SEQ ID NO: 48117 - protein, 15 aa, Homo sapiens
MQPTEAMGEEPSRAE

SEQ ID NO: 48118 - protein, 861 aa, Homo sapiens
MEELIPLVNKLQDAFSSIGQSCHLDLPQIAVVGGQSAGKSSVLENFVGRDFLPRGSGIVTRRPLILQLIFSKTEHAEFLHCKSKKFTDFDEVRQEIEAETDRVTGTNKGISPVPINLRVYSPHVLNLTLIDLPGITKVPVGDQPPDIEYQIKDMILQFISRESSLILAVTPANMDLANSDALKLAKEVDPQGLRTIGVITKLDLMDEGTDARDVLENKLLPLRRGYIGVVNRSQKDIEGKKDIRAALAAERKFFLSHPAYRHMADRMGTPHLQKTLNQQLTNHIRESLPALRSKLQSQLLSLEKEVEEYKNFRPDDPTRKTKALLQMVQQFGVDFEKRIEGSGDQVDTLELSGGARINRIFHERFPFELVKMEFDEKDLRREISYAIKNIHGVRTGLFTPDLAFEAIVKKQVVKLKEPCLKCVDLVIQELINTVRQCTSKLSSYPRLREETERIVTTYIREREGRTKDQILLLIDIEQSYINTNHEDFIGFANAQQRSTQLNKKRAIPNQVIRRGWLTINNISLMKGGSKEYWFVLTAESLSWYKDEEEKEKKYMLPLDNLKIRDVEKGFMSNKHVFAIFNTEQRNVYKDLRQIELACDSQEDVDSWKASFLRAGVYPEKDQAENEDGAQENTFSMDPQLERQVETIRNLVDSYVAIINKSIRDLMPKTIMHLMINNTKAFIHHELLAYLYSSADQSSLMEESADQAQRRDDMLRMYHALKEALNIIGDISTSTVSTPVPPPVDDTWLQSASSHSPTPQRRPVSSIHPPGRPPAVRGPTPGPPLIPVPVGAAASFSAPPIPSRPGPQSVFANSDLFPAPPQIPSRPVRIPPGIPPGVPSRRPPAAPSRPTIIRPAEPSLLD

SEQ ID NO: 48119 - protein, 861 aa, Homo sapiens
MEELIPLVNKLQDAFSSIGQSCHLDLPQIAVVGGQSAGKSSVLENFVGRDFLPRGSGIVTRRPLILQLIFSKTEHAEFLHCKSKKFTDFDEVRQEIEAETDRVTGTNKGISPVPINLRVYSPHVLNLTLIDLPGITKVPVGDQPPDIEYQIKDMILQFISRESSLILAVTPANMDLANSDALKLAKEVDPQGLRTIGVITKLDLMDEGTDARDVLENKLLPLRRGYIGVVNRSQKDIEGKKDIRAALAAERKFFLSHPAYRHMADRMGTPHLQKTLNQQLTNHIRESLPALRSKLQSQLLSLEKEVEEYKNFRPDDPTRKTKALLQMVQQFGVDFEKRIEGSGDQVDTLELSGGARINRIFHERFPFELVKMEFDEKDLRREISYAIKNIHGVRTGLFTPDMAFEAIVKKQIVKLKEPSLKCVDLVVSELATVIKKCAEKLSSYPRLREETERIVTTYIREREGRTKDQILLLIDIEQSYINTNHEDFIGFANAQQRSTQLNKKRAIPNQVIRRGWLTINNISLMKGGSKEYWFVLTAESLSWYKDEEEKEKKYMLPLDNLKIRDVEKGFMSNKHVFAIFNTEQRNVYKDLRQIELACDSQEDVDSWKASFLRAGVYPEKDQAENEDGAQENTFSMDPQLERQVETIRNLVDSYVAIINKSIRDLMPKTIMHLMINNTKAFIHHELLAYLYSSADQSSLMEESADQAQRRDDMLRMYHALKEALNIIGDISTSTVSTPVPPPVDDTWLQSASSHSPTPQRRPVSSIHPPGRPPAVRGPTPGPPLIPVPVGAAASFSAPPIPSRPGPQSVFANSDLFPAPPQIPSRPVRIPPGIPPGVPSRRPPAAPSRPTIIRPAEPSLLD

SEQ ID NO: 48120 - protein, 121 aa, Homo sapiens
MKQQGHETAACPETEEIPQGASGCWKDDLQKELSDIWSAVHVLQNSIDSLTLCSGACPKASSLRGHKGHQCLSPPLPSWDSDSDCDQDLSQPPFSKSGRSFPPGADPPQSPPPPISLLTCP

SEQ ID NO: 48121 - protein, 626 aa, Homo sapiens [sequence omitted]

SEQ ID NO: 48122 - protein, 172 aa, Homo sapiens
MCLSLYLIHKRTHTGEKPYECKQCGKAFSHSGSLRIHERTHTGEKPYECSECGKAFHSSTCLHAHKITHTGEKPYECKQCGKAFVSFNSVRYHERTHTGEKPYECKQCGKAFRSASHLRTHGRTHTGEKPYECKQCGKAFGCASSVKIHERTHTGEKPCSSNTSKGQGEKIA

SEQ ID NO: 48123 - protein, 197 aa, Homo sapiens
MQETIRNLDCIRMIWEEQNTEDQYKNPRRNLRCHMVERFSESKDSSQCGETFSLIRDSIVNNSICPGEDPCQSAECEEVIMGHLSLNSHIRVDSGHKPHEYQEYGEKPHTHKQRGKAFSYHHSFQSRGRPHTGKKRYECKECGKTFSSRRNLRRHMVVQGGNRPYKFPIEDMRECTLGRNRMNVSSVLKPCLIPVPI

SEQ ID NO: 48124 - protein, 101 aa, Homo sapiens
MSDPRRPNKVLRYKPPPSECNPALDDPTPDYMNLLGMIFSMCGLMLKLKWCAWVAVYCSFISFANSRSSEDTKQMMSSFMLSISAVVMSYLQNPQPMTPPW

SEQ ID NO: 48125 - protein, 477 aa, Homo sapiens [sequence omitted]

SEQ ID NO: 48126 - protein, 17 aa, Homo sapiens
MLPGDGVAERPRSLCLA

SEQ ID NO: 48127 - protein, 919 aa, Homo sapiens
MIPEDGANDEELEAEFLALVGGQPPALEKLKGKGPLPMEAIEKMASLCMRDPDEDEEEGTDEDDLEADDDLLAELNEVLGEEQKASETPPPVAQPKPEAPHPGLETTLQERLALYQTAIESARQAGDSAKMRRYDRGLKTLENLLASIRKGNAIDEADIPPPVAIGKGPASTPTYSPAPTQPAPRIASAPEPRVTLEGPSATAPASSPGLAKPQMPPGPCSPGPLAQLQSRQRDYKLAALHAKQQGDTTAAARHFRVAKSFDAVLEALSRGEPVDLSCLPPPPDQLPPDPPSPPSQPPTPATAPSTTEVPPPPRTLLEALEQRMERYQVAAAQAKSKGDQRKARMHERIVKQYQDAIRAHKAGRAVDVAELPVPPGFPPIQGLEATKPTQQSLVGVLETAMKLANQDEGPEDEEDEVPKKQNSPVAPTAQPKAPPSRTPQSGSAPTAKAPPKATSTRAQQQLAFLEGRKKQLLQAALRAKQKNDVEGAKMHLRQAKGLEPMLEASRNGLPVDITKVPPAPVNKDDFALVQRPGPGLSQEAARRYGELTKLIRQQHEMCLNHSNQFTQLGNITETTKFEKLAEDCKRSMDILKQAFVRGLPTPTARFEQRTFSVIKIFPDLSSNDMLLFIVKGINLPTPPGLSPGDLDVFVRFDFPYPNVEEAQKDKTSVIKNTDSPEFKEQFKLCINRSHRGFRRAIQTKGIKFEVVHKGGLFKTDRVLGTAQLKLDALEIACEVREILEVLDGRRPTGGRLEVMVRIREPLTAQQLETTTERWLVIDPVPAAVPTQVAGPKGKAPPVPAPARESGNRSARPLHSLSVLAFDQERLERKILALRQARRPVPPEVAQQYQDIMQRSQWQRAQLEQGGVGIRREYAAQLERQLQFYTEAARRLGNDGSRDAAKEALYRRNLVESELQRLRR

SEQ ID NO: 48128 - protein, 581 aa, Homo sapiens
MAESGLAMWPSLLLLLLLPGPPPVAGLEDAAFPHLGESLQPLPRACPLRCSCPRVDTVDCDGLDLRVFPDNITRAAQHLSLQNNQLQELPYNELSRLSGLRTLNLHNNLISSEGLPDEAFESLTQLQHLCVAHNKLSVAPQFLPRSLRVADLAANQVMEIFPLTFGEKPALRSVYLHNNQLSNAGLPPDAFRGSEAIATLSLSNNQLSYLPPSLPPSLERLHLQNNLISKVPRGALSRQTQLRELYLQHNQLTDSGLDATTFSKLHSLEYLDLSHNQLTTVPAGLPRTLAILHLGRNRIRQVEAARLHGARGLRYLLLQHNQLGSSGLPAGALRPLRGLHTLHLYGNGLDRVPPALPRRLRALVLPHNHVAALGARDLVATPGLTELNLAYNRLASARVHHRAFRRLRALRSLDLAGNQLTRLPMGLPTGLRTLQLQRNQLRMLEPEPLAGLDQLRELSLAHNRLRVGDIGPGTWHELQALQMLDLSHNELSFVPPDLPEALEELHLEGNRIGHVGPEAFLSTPRLRALFLRANRLHMTSIAAEAFLGLPNLRVVDTAGNPEQVLIRLPPTTPRGPRAGGP

SEQ ID NO: 48129 - protein, 870 aa, Homo sapiens [sequence omitted]

SEQ ID NO: 48130 - protein, 116 aa, Homo sapiens
MPTFPPDYGFPERKEREMVATQQEMMDAQLRLQLRDYCAHHLIRLLKCKRDSFPNFLACKQERHDWDYCEHRDYVMRMKEFERERRLLQRKKRREKKAAELAKGQGPGEVDPKVAL

SEQ ID NO: 48131 - protein, 1337 aa, Homo sapiens
MSTTQAQAQPQPANAASTNPPPPETSNPNKPKRQTNQLQYLLRVVLKTLWKHQFAWPFQQPVDAVKLNLPDYYKIIKTPMDMGTIKKRLENNYYWNAQECIQDFNTMFTNCYIYNKPGDDIVLMAEALEKLFLQKINELPTEETEIMIVQAKGRGRGRKETGTAKPGVSTVPNTTQASTPPQTQTPQPNPPPVQATPHPFPAVTPDLIVQTPVMTVVPPQPLQTPPPVPPQPQPPPAPAPQPVQSHPPIIAATPQPVKTKKGVKRKADTTTPTTIDPIHEPPSLPPEPKTTKLGQRRESSRPVKPPKKDVPDSQQHPAPEKSSKVSEQLKCCSGILKEMFAKKHAAYAWPFYKPVDVEALGLHDYCDIIKHPMDMSTIKSKLEAREYRDAQEFGADVRLMFSNCYKYNPPDHEVVAMARKLQDVFEMRFAKMPDEPEEPVVAVSSPAVPPPTKVVAPPSSSDSSSDSSSDSDSSTDDSEEERAQRLAELQEQLKAVHEQLAALSQPQQNKPKKKEKDKKEKKKEKHKRKEEVEENKKSKAKEPPPKKTKKNNSSNSNVSKKEPAPMKSKPPPTYESEEEDKCKPMSYEEKRQLSLDINKLPGEKLGRVVHIIQSREPSLKNSNPDEIEIDFETLKPSTLRELERYVTSCLRKKRKPQAEKVDVIAGSSKMKGFSSSESESSSESSSSDSEDSETEMAPKSKKKGHPGREQKKHHHHHHQQMQQAPAPVPQQPPPPPQQPPPPPPPQQQQQPPPPPPPPSMPQQAAPAMKSSPPPFIATQVPVLEPQLPGSVFDPIGHFTQPILHLPQPELPPHLPQPPEHSTPPHLNQHAVVSPPALHNALPQQPSRPSNRAAALPPKPARPPAVSPALTQTPLLPQPPMAQPPQVLLEDEEPPAPPLTSMQMQLYLQQLQKVQPPTPLLPSVKVQSQPPPPLPPPPHPSVQQQLQQQPPPPPPPQPQPPPQQQHQPPPRPVHLQPMQFSTHIQQPPPPQGQQPPHPPPGQQPPPPQPAKPQQVIQHHHSPRHHKSDPYSTGHLREAPSPLMIHSPQMSQFQSLTHQSPPQQNVQPKKQELRAASVVQPQPLVVVKEEKIHSPIIRSEPFSPSLRPEPPKHPESIKAPVHLPQRPEMKPVDVGRPVIRPPEQNAPPPGAPDKDKQKQEPKTPVAPKKDLKIKNMGSWASLVQKHPTTPSSTAKSSSDSFEQFRRAAREKEEREKALKAQAEHAEKEKERLRQERMRSREDEDALEQARRAHEEARRRQEQQQQQRQEQQQQQQQQAAAVAAAATPQAQSSQPQSMLDQQRELARKREQERRRREAMAATIDMNFQSDLLSIFEENLF

SEQ ID NO: 48132 - protein, 697 aa, Homo sapiens
MSTTQAQAQPQPANAASTNPPPPETSNPNKPKRQTNQLQYLLRVVLKTLWKHQFAWPFQQPVDAVKLNLPDYYKIIKTPMDMGTIKKRLENNYYWNAQECIQDFNTMFTNCYIYNKPGDDIVLMAEALEKLFLQKINELPTEETEIMIVQAKGRGRGRKETGTAKPGVSTVPNTTQASTPPQTQTPQPNPPPVQATPHPFPAVTPDLIVQTPVMTVVPPQPLQTPPPVPPQPQPPPAPAPQPVQSHPPIIAATPQPVKTKKGVKRKADTTTPTTIDPIHEPPSLPPEPKTTKLGQRRESSRPVKPPKKDVPDSQQHPAPEKSSKVSEQLKCCSGILKEMFAKKHAAYAWPFYKPVDVEALGLHDYCDIIKHPMDMSTIKSKLEAREYRDAQEFGADVRLMFSNCYKYNPPDHEVVAMARKLQDVFEMRFAKMPDEPEEPVVAVSSPAVPPPTKVVAPPSSSDSSSDSSSDSDSSTDDSEEERAQRLAELQEQLKAVHEQLAALSQPQQNKPKKKEKDKKEKKKEKHKRKEEVEENKKSKAKEPPPKKTKKNNSSNSNVSKKEPAPMKSKPPPTYESEEEDKCKPMSYEEKRQLSLDINKLPGEKLGRVVHIIQSREPSLKNSNPDEIEIDFETLKPSTLRELERYVTSCLRKKRKPQAEKVDVIAGSSKMKGFSSSESESSSESSSSDSEDSETGPA

SEQ ID NO: 48133 - protein, 813 aa, Homo sapiens
MPPPKFHDTSSPLMVTPPSAEAHWAVRVEEKAKFDGIFESLLPINGLLSGDKVKPVLMNSKLPLDVLGRVWDLSDIDKDGHLDRDEFAVAMHLVYRALEKEPVPSALPPSLIPPSKRKKTVFPGAVPVLPASPPPKDSLRSTPSHGSVSSLNSTGSLSPKHSLKQTQPTVNWVVPVADKMRFDEIFLKTDLDLDGYVSGQEVKEIFMHSGLTQNLLAHIWALADTRQTGKLSKDQFALAMYFIQQKVSKGIDPPQVLSPDMVPPSERGTPGPDSSGSLGSGEFTGVKELDDISQEIAQLQREKYSLEQDIREKEEAIRQKTSEVQELQNDLDRETSSLQELEAQKQDAQDRLDEMDQQKAKLRDMLSDVRQKCQDETQMISSLKTQIQSQESDLKSQEDDLNRAKSELNRLQQEETQLEQSIQAGRVQLETIIKSLKSTQDEINQARSKLSQLHESRQEAHRSLEQYDQVLDGAHGASLTDLANLSEGVSLAERGSFGAMDDPFKNKALLFSNNTQELHPDPFQTEDPFKSDPFKGADPFKGDPFQNDPFAEQQTTSTDPFGGDPFKESDPFRGSATDDFFKKQTKNDPFTSDPFTKNPSLPSKLDPFESSDPFSSSSVSSKGSDPFGTLDPFGSGSFNSAEGFADFSQMSKPPPSGPFTSSLGGAGFSDDPFKSKQDTPALPPKKPAPPRPKPPSGKSTPVSQLGSADFPEAPDPFQPLGADSGDPFQSKKGFGDPFSGKDPFVPSSAAKPSKASASGFADFTSFGNEEQQLAWAKRESEKAEQERLARLRRQEQEDLELAIALSKADMPAA

SEQ ID NO: 48134 - protein, 767 aa, Homo sapiens
MPPPKFHDTSSPLMVTPPSAEAHWAVRVEEKAKFDGIFESLLPINGLLSGDKVKPVLMNSKLPLDVLGRVWDLSDIDKDGHLDRDEFAVAMHLVYRALEKEPVPSALPPSLIPPSKRKKTVFPGAVPVLPASPPPKDSLRSTPSHGSVSSLNSTGSLSPKHSLKQTQPTVNWVVPVADKMRFDEIFLKTDLDLDGYVSGQEVKEIFMHSGLTQNLLAHIWALADTRQTGKLSKDQFALAMYFIQQKVSKGIDPPQVLSPDMVPPSERGTPGPDSSGSLGSGEFTGVKELDDISQEIAQLQREKYSLEQDIREKEEAIRQKTSEVQELQNDLDRETSSLQELEAQKQDAQDRLDEMDQQKAKLRDMLSDVRQKCQDETQMISSLKTQIQSQESDLKSQEDDLNRAKSELNRLQQEETQLEQSIQAGRVQLETIIKSLKSTQDEINQARSKLSQLHESRQEAHRSLEQYDQVLDGAHGASLTDLANLSEGVSLAERGSFGAMDDPFKNKALLFSNNTQELHPDPFQTEDPFKSDPFKGADPFKGDPFQNDPFAEQQTTSTDPFGGDPFKESDPFRGSATDDFFKKQTKNDPFTSDPFTKNPSLPSKLDPFESSDPFSSSSVSSKGSDPFGTLDPFGSGSFNSAEGFADFSQMSKPPPSGPFTSSLGGAGFSDDPFKSKQDTPALPPKKPAPPRPKPPSGKSTPVSQLGSADFPEAPDPFQPLGADSGDPFQSKKGFGDPFSGKDPFVPSSAAKPSKASASGFADFTSVS

SEQ ID NO: 48135 - protein, 154 aa, Homo sapiens
MDDPFKNKALLFSNNTQELHPDPFQTEDPFKSDPFKGADPFKGDPFQNDPFAEQQTTSTDPFGGDPFKESDPFRGSATDDFFKKQTKNDPFTSDPFTKNPSLPSKLDPFESSDPFSSSSVSSKGSDPFGTLDPFGSGSFNSAEGFADFSQMSKE

SEQ ID NO: 48136 - protein, 126 aa, Homo sapiens [sequence omitted]

SEQ ID NO: 48137 - protein, 125 aa, Homo sapiens
MRAPGAGAASVVSLALLWLLGLPWTWSAAAALGVYVGSGGWRFLRIVCKTARRDLLSCSDAACLSQGPPLPLPLVRVTDHITPCSLVTIQHGLVFSHIHGRGLSSQRTVNPRGWGLVVWMLCPQS

SEQ ID NO: 48138 - protein, 248 aa, Homo sapiens
MDGKVGSCGFNSRILPHVYPIRLVKVNEDTMELLRDAQGLCIPCQAGEPGLLVGQINQQDPLRRFDGYVSESATSKKIAHSVFSKGDSAYLSGDVLVMDELGYMYFRDRSGDTFRWRGENVSTTEVEGVLSRLLGQTDVAVYGVAVPGVEGKAGMAAVADPHSLLDPNAIYQELQKVLAPYARPIFLRLLPQVDTTGTFKIQKTRLQREGFDPRQTSDRLFFLDLKQGHYLPLNEAVYTRICSGAFAL

SEQ ID NO: 48139 - protein, 104 aa, Homo sapiens
MNINLREVICTSRDGDKFWRMPECYIRGSTIKYLRIPDEIIDMVKEEVVAKGRGRGGLQQQKQQKGRGMGGAGRGVFGGRGRGGIPGTGRGQPEKKPGRQAGKQ

SEQ ID NO: 48140 - protein, 497 aa, Homo sapiens [sequence omitted]

SEQ ID NO: 48141 - protein, 616 aa, Homo sapiens [sequence omitted]

SEQ ID NO: 48142 - protein, 417 aa, Homo sapiens
MERKLQEVHPLLTLCGQIVENWQGNPIQKESLRVFFLVLQVTHYLDAGQVKSVKPCLKQLQQCIQTISTLHDDEILPSNPADLFHWLPKEHMCVLVYLVTVMHSMQAGYLEKAQKYTDKALMQLEKLKMLDCSPILSSFQVILLEHIIMCRLVTGHKATALQEISQVCQLCQQSPRLFSNHAAQLHTLLGLYCVSVNCMDNAEAQFTTALRLTNHQELWAFIVTNLASVYIREGNRHQEVLYSLLERINPDHSFPVSSHCLRAAAFYVRGLFSFFQGRYNEAKRFLRETLKMSNAEDLNRLTACSLVLLGHIFYVLGNHRESNNMVVPAMQLASKIPDMSVQLWSSALLRDLNKACGNAMDAHEAAQMHQNFSQQLLQDHIEACSLPEHNLITWTDGPPPVQFQAQNGPNTSLASLL

SEQ ID NO: 48143 - protein, 467 aa, Homo sapiens
MLENYRNLVFLGIVVSKPDLVTCLEQGKKPLTMERHEMIAKPPVMSSHFAQDLWPENIQNSFQIGMLRRYEECRHDNLQLKKGCKSVGEHKVHKGGYNGLNQCLTTTQKEIFQCDKYGKVFHKFSNSNTYKTRHTGINLFKCIICGKAFKRSSTLTTHKKIHTGEKPYRCEECGKAFNQSANLTTHKRIHTGEKPYRCEECGKAFKQSSNLTTHKKIHTGEKPYKCEECGKAFNRSTDLTTHKIVHTGEKPYKCEECGKAFKHPSHVTTHKKIHTRGKPYNCEECGKSFKHCSNLTIHKRIHTGEKPYKCEECGKAFHLSSHLTTHKILHTGEKPYRCRECGKAFNHSTTLFSHEKIHTGEKPYKCDECGKTFTWPSILSKHKRTHTGEKPYKCEECGKSFTASSTLTTHKRIHTGEKPYKCEECGKAFNWSSDLNKHKKIHIERKPYIVKNVTDLLNVPPLLISIR

SEQ ID NO: 48144 - protein, 492 aa, Homo sapiens
MCSHFAQEFWPEQNIKDSFEKVTLRRYEKCGNDNFQLKGCKSVDECKLHKGGYNGLNQCLPTMQSKMFQCDKYVKVFNKFSHSDRHKIKHMENKPFKCKECGRSFCMLSHLTRHERNYTKVNFCKCEECEKAVNQSSKLTKHKRIYTCEKLYKCQECDRTFNQFSNLTEYKKDYAREKPYKCEECGKAFNQSSHLTTHKIIHTGEKPYKCEECGKAFNQFSNLTTHKKIHTGEQPYICEECGKAFTQSSTLTTHKRIHTGEKPYKCEECGKAFNRSSKLTEHKNIHTGEQPYKCEECGKAFNRSSNLTEHRKIHTEEKPYKCKECGKAFKHSSALTTHKRIHTGEKPYKCEECGKAFNRSSKLTEHKKLHTGKKPYKCEECGKAFIQSSKLTEHKKIHSGEIPYKCEECGKAFKHSSSLTTHKRIHTGEKPYKCEECGKAFSRSSKLTEHKIIHTGEKPYKCERCDKAFNQSANLTKHKKIHTGEKLQNWNV

SEQ ID NO: 48145 - protein, 179 aa, Homo sapiens [sequence omitted]

SEQ ID NO: 48146 - protein, 25 aa, Homo sapiens
MWRGCARSRKRWSLTAKRESSIGRR

SEQ ID NO: 48147 - protein, 945 aa, Homo sapiens [sequence omitted]

SEQ ID NO: 48148 - protein, 98 aa, Homo sapiens
MRPNRKQSTAEMRNSILAQVLDQSARARLSNLALVKPEKTKAVENYLIQMARYGQLSEKVSEQGLIEILKKVSQQTEKTTTVKFNRRKVMDSDEDDDY

SEQ ID NO: 48149 - protein, 367 aa, Homo sapiens
MVQNYENLVSVGLSVTKPYVIMLLEDGKEPWMMEKKLSKDWESRWENKELSTKKDIYDEDSPQPVTMEKVVKQSYEFSNSNKNLEYTECDTFRSTFHSKSTLSEPQNNSAEGNSHKYDILKKNLSKKSVIKSERINGGKKLLNSNKSGAAFNQSKSLTLPQTCNREKIYTCSECGKAFGKQSILSRHWRIHTGEKPYECRECGKTFSHGSSLTRHQISHSGEKPYKCIECGKAFSHGSSLTNHQSTHTGEKPYECMNCGKSFSRVSLLIQHLRIHTQEKRYECRICGKAFIHSSSLIHHQKSHTGEKPYECRECGKAFCCSSHLTQHQRIHSMKKKYECNKCLKVFSSFSFLVQHQSIHTEEKPFEV

SEQ ID NO: 48150 - protein, 539 aa, Homo sapiens
MVQNYENLVSVAGLSVTKPYVITLLEDGKEPWMMEKKLSKGMIPDWESRWENKELSTKKDNYDEDSPQTVIIEKVVKQSYEFSNSKKNLEYIEKLEGKHGSQVDHFRPAILTSRESPTADSVYKYNIFRSTFHSKSTLSEPQKISAEGNSHKYDILKKNLPKKSVIKNEKVNGGKKLLNSNKSGAAFSQGKSLTLPQTCNREKIYTCSECGKAFGKQSILNRHWRIHTGEKPYECRECGKTFSHGSSLTRHLISHSGEKPYKCIECGKAFSHVSSLTNHQSTHTGEKPYECMNCGKSFSRVSHLIEHLRIHTQEKLYECRICGKAFIHRSSLIHHQKIHTGEKPYECRECGKAFCCSSHLTRHQRIHTMEKQYECNKCLKVFSSLSFLVQHQSIHTEEKPFECQKCRKSFNQLESLNMHLRNHIRLKPYECSICGKAFSHRSSLLQHHRIHTGEKPYECIKCGKTFSCSSNLTVHQRIHTGEKPYKCNECGKAFSKGSNLTAHQRVHNGEKPNSVVSVEKPLDYMNHYTCEKSYRRETV

SEQ ID NO: 48151 - protein, 538 aa, Homo sapiens
MVQNYENLVSVGLSVTKPYVITLLEDGKEPWMMEKKLSKGMIPDWESRWENKELSTKKDNYDEDSPQTVIIEKVVKQSYEFSNSKKNLEYIEKLEGKHGSQVDHFRPAILTSRESPTADSVYKYNIFRSTFHSKSTLSEPQKISAEGNSHKYDILKKNLPKKSVIKNEKVNGGKKLLNSNKSGAAFSQGKSLTLPQTCNREKIYTCSECGKAFGKQSILNRHWRIHTGEKPYECRECGKTFSHGSSLTRHLISHSGEKPYKCIECGKAFSHVSSLTNHQSTHTGEKPYECMNCGKSFSRVSHLIEHLRIHTQEKLYECRICGKAFIHRSSLIHHQKIHTGEKPYECRECGKAFCCSSHLTRHQRIHTMEKQYECNKCLKVFSSLSFLVQHQSIHTEEKPFECQKCRKSFNQLESLNMHLRNHIRLKPYECSICGKAFSHRSSLLQHHRIHTGEKPYECIKCGKTFSCSSNLTVHQRIHTGEKPYKCNECGKAFSKGSNLTAHQRVHNGEKPNSVVSVEKPLDYMNHYTCEKSYRRETV

SEQ ID NO: 48152 - protein, 2325 aa, Homo sapiens
MPAAEKEEAKLPPPPLTPPAPSPPPPLPPPSTSPPPPLCPPPPPPVSPPPLPSPPPPPAQEEQEESPPPVVPATCSRKRGRPPLTPSQRAEREAARAGPEGTSPPTPTPSTATGGPPEDSPTVAPKSTTFLKNIRQFIMPVVSARSSRVIKTPRRFMDEDPPKPPKVEVSPVLRPPITTSPPVPQEPAPVPSPPRAPTPPSTPVPLPEKRRSILREPTFRWTSLTRELPPPPPAPPPPPAPSPPPAPATSSRRPLLLRAPQFTPSEAHLKIYESVLTPPPLGAPEAPEPEPPPADDSPAEPEPRAVGRTNHLSLPRFAPVVTTPVKAEVSPHGAPALSNGPQTQAQLLQPLQALQTQLLPQALPPPQPQLQPPPSPQQMPPLEKARIAGVGSLPLSGVEEKMFSLLKRAKVQLFKIDQQQQQKVAASMPLSPGGQMEEVAGAVKQISDRGPVRSEDESVEAKRERPSGPESPVQGPRIKHVCRHAAVALGQARAMVPEDVPRLSALPLRDRQDLATEDTSSASETESVPSRSRRGKVEAAGPGGESEPTGSGGTLAHTPRRSLPSHHGKKMRMARCGHCRGCLRVQDCGSCVNCLDKPKFGGPNTKKQCCVYRKCDKIEARKMERLAKKGRTIVKTLLPWDSDESPEASPGPPGPRRGAGAGGPREEVVAHPGPEEQDSLLQRKSARRCVKQRPSYDIFEDSDDSEPGGPPAPRRRTPRENELPLPEPEEQSRPRKPTLQPVLQLKARRRLDKDALAPGPFASFPNGWTGKQKSPDGVHRVRVDFKEDCDLENVWLMGGLSVLTSVPGGPPMVCLLCASKGLHELVFCQVCCDPFHPFCLEEAERPLPQHHDTWCCRRCKFCHVCGRKGRGSKHLLECERCRHAYHPACLGPSYPTRATRKRRHWICSACVRCKSCGATPGKNWDVEWSGDYSLCPRCTQLYEKGNYCPICTRCYEDNDYESKMMQCAQCDHWVHAKCEGLSDEDYEILSGLPDSVLYTCGPCAGAAQPRWREALSGALQGGLRQVLQGLLSSKVVGPLLLCTQCGPDGKQLHPGPCGLQAVSQRFEDGHYKSVHSFMEDMVGILMRHSEEGETPDRRAGGQMKGLLLKLLESAFGWFDAHDPKYWRRSTRLPNGVLPNAVLPPSLDHVYAQWRQQEPETPESGQPPGDPSAAFQGKDPAAFSHLEDPRQCALCLKYGDADSKEAGRLLYIGQNEWTHVNCAIWSAEVFEENDGSLKNVHAAVARGRQMRCELCLKPGATVGCCLSSCLSNFHFMCARASYCIFQDDKKVFCQKHTDLLDGKEIVNPDGFDVLRRVYVDFEGINFKRKFLTGLEPDAINVLIGSIRIDSLGTLSDLSDCEGRLFPIGYQCSRLYWSTVDARRRCWYRCRILEYRPWGPREEPAHLEAAEENQTIVHSPAPSSEPPGGEDPPLDTDVLVPGAPERHSPIQNLDPPLRPDSGSAPPPAPRSFSGARIKVPNYSPSRRPLGGVSFGPLPSPGSPSSLTHHIPTVGDPDFPAPPRRSRRPSPLAPRPPPSRWASPPLKTSPQLRVPPPTSVVTALTPTSGELAPPGPAPSPPPPEDLGPDFEDMEVVSGLSAADLDFAASLLGTEPFQEEIVAAGAMGSSHGGPGDSSEEESSPTSRYIHFPVTVVSAPGLAPSATPGAPRIEQLDGVDDGTDSEAEAVQQPRGQGTPPSGPGVVRAGVLGAAGDRARPPEDLPSEIVDFVLKNLGGPGDGGAGPREESLPPAPPLANGSQPSQGLTASPADPTRTFAWLPGAPGVRVLSLGPAPEPPKPATSKIILVNKLGQVFVKMAGEGEPVPPPVKQPPLPPTISPTAPTSWTLPPGPLLGVLPVVGVVRPAPPPPPPPLTLVLSSGPASPPRQAIRVKRVSTFSGRSPPAPPPYKAPRLDEDGEASEDTPQVPGLGSGGFSRVRMKTPTVRGVLDLDRPGEPAGEESPGPLQERSPLLPLPEDGPPQVPDGPPDLLLESQWHHYSGEASSSEEEPPSPDDKENQAPKRTGPHLRFEISSEDGFSVEAESLEGAWRTLIEKVQEARGHARLRHLSFSGMSGARLLGIHHDAVIFLAEQLPGAQRCQHYKFRYHQQGEGQEEPPLNPHGAARAEVYLRKCTFDMFNFLASQHRVLPEGATCDEEEDEVQLRSTRRATSLELPMAMRFRHLKKTSKEAVGVYRSAIHGRGLFCKRNIDAGEMVIEYSGIVIRSVLTDKREKFYDGKGIGCYMFRMDDFDVVDATMHGNAARFINHSCEPNCFSRVIHVEGQKHIVIFALRRILRGEELTYDYKFPIEDASNKLPCNCGAKRCRRFLN

SEQ ID NO: 48153 - protein, 1022 aa, Homo sapiens
MENYSSLVSLDSEFRCKTKDSCLPKEIYEVTSSQWVRMEKCHSLVGSSVRDDWECKGQFQHQDINQERYLEKAIMTYETTPTFCLQTSLTLHHRIHPGEKLYKSTECMAFKYGSELTQQQETHTGEKLYKCKECGKAFHHFSYLVKHQRIHTGEKPCACKEYGKAFISGSHLIQHQKMYTDERPHECQESVKAFRPSAHLIQHWRIHTGDKPYECKECGKSFTSGSTLNQHQQIHTGEKPYHCKQCGKSFTVGSTLIRHQQIHTGEKPYDCKECGKSFASGSALIRHQRIHTGEKPYDCKECGKSFTFHSALIRHQRIHTGEKPYDCKECGKSFTFRSGLIGHQAIHTGEKPYDCKECGKSFTAGSTLIQHQRIHTGEKPYDCKECGKSFASGSALLQHQRIHTGEKPYCCKECGKSFTFRSTRNRHQRIHTGEKPYNCKECGKSFASGSALLQHQRIHTGEKPYHCKECGKSFTFRSGLIGHQAVHTGEKPYDCKECGKSFTSRSALIQHQRIHTGEKPYHCKECGKSFTVGSTLLQHQQIHTGEKPYDCKECGKAFRLRLRLTQHQQIHTGEKPYQCQECGKAFVSVSGLTQHHRIHTGEKPYECPDCGKAFRQRTYLNQHRRIHTGEKPYECKECGKSFTFCSGLIQHQQNHTDEKPYDGKECGKSFTSHSTLIQHQQIHTGEKPYDCKECGKSFTSHSTLIQHQQIHTGEKLYDCKECGKSFTSHSTLIQHQPLHTGEKPYHCKECGKSFTLRSALIQHRPVHTGEKRYSCKECGKSFTSRSTLIEHQRIHTGEKPYHCKECGKSFAFRSAIIQHRRIHTGEKPYDCKECGKAFRRRSKLTQHQRIHTGEKPYRCHECGKAFVRFSGLTKHHSIHTGEKPYECKTCGKSFRQRTHLTLHQRIHTGDRPYECKECGKSFTCGSELIRHQRTHTGEKPYDCKECGKAFRCPSQLSQHKRIHTGEKTYQCPECGKAFFYASGLSRHQSVHTGEKPYECKTCGKAFKQLTQLTRHQRIHDLT

SEQ ID NO: 48154 - protein, 617 aa, Homo sapiens
MSDRLENCDLEESNSRDYLEAKGKMEKQQENQKEYFRQGMIIYDKMSIFNQHTYLSQHSRCHSTEKPYKCKECGKAFRRASHLTQHQSIHTGEKPYECKQCGKAFSRDSQLSLHQRLHTGEKPYACKECGKAFTQSSQLILHHRIHTGEKPYKCEECGKAFIRSSQLTRHQKVHTGEKPYECKECGKAFTQNSQLTLHQRLHTGEKLYECKECRKVFTQLSQLILHKRIHTGEKPYECKECGKAFICGSQLSQHQKIHNGEKPYECKECGRAFIRGSLLMQHQRIHTGEKPYKCEECGKAFIRGSQLTQHQRIHTNEKPYECKECGKMFSHGSQLTQHQRIHTGEKPYQCKECGKAFNRGSLLTRHQRIHTGEKPYECKECGKTFSRGSELTQHERIHTGEKPYECKECGKSFIRGSQLTQHQRIHTGEKPYECKECRMAFTQSSHLSQHQRLHTGEKPYVCNECGKAFARGLLLIQHQRIHTGEKPYQCKECGKAFIRGSQLTQHQRIHTGEKPYECKECGKAFSHGSQLTLHQRIHTGEKPYECRECRKAFTQSSHLSRHQRIHTGEKPYQCKECGKAFTRGSQLTQHQRIHISEKSFEYKECGIDFSHGSQVYM

SEQ ID NO: 48155 - protein, 1705 aa, Homo sapiens
MGVRARVADWPPKREALREHSNPSPSQDTDGTKATKMAHSMRSIQNGQPPTSTPASSGSKAFHRLSRRRSKDVEFQDGWPRSPGRAFLPLRHRSSSEITLSECDAEDAGEPRGARHTGALPLFREYGSTSSIDVQGMPEQSFFDILNEFRSEQPDARGCQALTELLRADPGPHLMGGGGGAKGDSHNGQPAKDSLLPLQPTKEKEKARKKPARGLGGGDTVDSSIFRKLRSSKPEGEAGRSPGEADEGRSPPEASRPWVCQKSFAHFDVQSMLFDLNEAAANRVSVSQRRNTTTGASAASAASAMASLTASRAHSLGGLDPAFTSTEDLNCKENLEQDLGDDNSNDLLLSCPHFRNEIGGECERNVSFSRASVGSPSSGEGHLAEPALSAYRTNASISVLEVPKEQQRTQSRPRQYSIEHVDLGARYYQDYFVGKEHANYFGVDEKLGPVAVSIKREKLEDHKEHGPQYQYRIIFRTRELITLRGSILEDATPTATKHGTGRGLPLKDALEYVIPELNIHCLRLALNTPKVTEQLLKLDEQGLCRKHKVGILYCKAGQSSEEEMYNNEEAGPAFEEFLSLIGEKVCLKGFTKYAAQLDVKTDSTGTHSLYTMYQDYEIMFHVSTLLPYTPNNRQQLLRKRHIGNDIVTIIFQEPGALPFTPKNIRSHFQHVFIIVRVHNPCTDNVCYSMAVTRSKDAPPFGPPIPSGTTFRKSDVFRDFLLAKVINAENAAHKSDKFHTMATRTRQEYLKDLAENCVSNTPIDSTGKFNLISLTSKKKEKTKARAGAEQHSAGAIAWRVVAQDYAQGVEIDCILGISNEFVVLLDLRTKEVVFNCYCGDVIGWTPDSSTLKIFYGRGDHIFLQATEGSVEDIREIVQRLKVMTSGWETVDMTLRRNGLGQLGFHVKYDGTVAEVEDYGFAWQAGLRQGSRLVEICKVAVVTLTHDQMIDLLRTSVTVKVVIIPPFEDGTPRRGWPETYDMNTSEPKTEQESITPGGRPPYRSNAPWQWSGPASHNSLPASKWATPTTPGHAQSLSRPLKQTPIVPFRESQPLHSKRPVSFPETPYTVSPAGADRVPPYRQPSGSFSTPGSATYVRYKPSPERYTAAPHPLLSLDPHFSHDGTSSGDSSSGGLTSQESTMERQKPEPLWHVPAQARLSAIAGSSGNKHPSRQDAAGKDSPNRHSKGEPQYSSHSSSNTLSSNASSSHSDDRWFDPLDPLEPEQDPLSKGGSSDSGIDTTLYTSSPSCMSLAKAPRPAKPHKPPGSMGLCGGGREAAGRSHHADRRREVSPAPAVAGQSKGYRPKLYSSGSSTPTGLAGGSRDPPRQPSDMGSRVGYPAQVYKTASAETPRPSQLAQPSPFQLSASVPKSFFSKQPVRNKHPTGWKRTEEPPPRPLPFSDPKKQVDTNTKNVFGQPRLRASLRDLRSPRKNYKSTIEDDLKKLIIMDNLGPEQERDTGQSPQKGLQRTLSDESLCSGRREPSFASPAGLEPGLPSDVLFTSTCAFPSSTLPARRQHQHPHPPVGPGATPAAGSGFPEKKSTISASELSLADGRDRPLRRLDPGLMPLPDTAAGLEWSSLVNAAKAYEVQRAVSLFSLNDPALSPDIPPAHSPVHSHLSLERGPPTPRTTPTMSEEPPLDLTGKVYQLEVMLKQLHTDLQKEKQDKVVLQSEVASLRQNNQRLQEESQAASEQLRKFAEIFCREKKEL

SEQ ID NO: 48156 - protein, 248 aa, Homo sapiens
MNKVFWREMVECFNKISRDADCRAVVISGAGKMFTAGIDLMDMASDILQPKGDDVARISWYLRDIITRYQETFNVIERCPKPVIAAVHGGCIGGGVDLVTACDIRYCAQDAFFQVKEVDVGLAADVGTLQRLPKVIGNQSLVNELAFTARKMMADEALGSGLVSRVFPDKEVMLDAALALAAEISSKSPVAVQSTKVNLLYSRDHSVAESLNYVASWNMSMLQTQDLVKSVQATTENKELKTVTFSKL

SEQ ID NO: 48157 - protein, 113 aa, Homo sapiens [sequence omitted]

SEQ ID NO: 48158 - protein, 82 aa, Homo sapiens
MEHRFFLSINWQDVVQKKLLPPFKPQVTSEVDTRYFDDEFTAQSITITPPDRFREGFLEEEANVSAGRRNDVWDASNGRSMA

SEQ ID NO: 48159 - protein, 32 aa, Homo sapiens
MHVHGTQIHKFGDPDTPTFSPGLCVSPSLEGR

SEQ ID NO: 48160 - protein, 1406 aa, Homo sapiens
MVSVHVEHPQEASVVVHQVERVSGPWEEADAEAVARAEAAARAEAAAPYTVLAQSAPREDGYSDASGFGYCFRELRGGECASPLPGLRTQEVCCRGAGLAWGVHDCQLCSERLGNSERVSAPDGPCPTGFERVNGSCEDVDECATGGRCQHGECANTRGGYTCVCPDGFLLDSSRSSCISQHVISEAKGPCFRVLRDGGCSLPILRNITKQICCCSRVGKAWGRGCQLCPPFGSEGFREICPAGPGYHYSASDLRYNTRPLGQEPPRVSLSQPRTLPATSRPSAGFLPTHRLEPRPEPRPDPRPGPELPLPSIPAWTGPEIPESGPSSGMCQRNPQVCGPGRCISRPSGYTCACDSGFRLSPQGTRCIDVDECRRVPPPCAPGRCENSPGSFRCVCGPGFRAGPRAAECLDVDECHRVPPPCDLGRCENTPGSFLCVCPAGYQAAPHGASCQDVDECTQSPGLCGRGACKNLPGSFRCVCPAGFRGSACEEDVDECAQEPPPCGPGRCDNTAGSFHCACPAGFRSRGPGAPCQDVDECARSPPPCTYGRCENTEGSFQCVCPMGFQPNTAGSECEDVDECENHLACPGQECVNSPGSFQCRTCPSGHHLHRGRCTDVDECSSGAPPCGPHGHCTNTEGSFRCSCAPGYRAPSGRPGPCADVNECLEGDFCFPHGECLNTDGSFACTCAPGYRPGPRGASCLDVDECSEEDLCQSGICTNTDGSFECICPPGHRAGPDLASCLDVDECRERGPALCGSQRCENSPGSYRCVRDCDPGYHAGPEGTCDDVDECQEYGPEICGAQRCENTPGSYRCTPACDPGYQPTPGGGCQDVDECRNRSFCGAHAVCQNLPGSFQCLCDQGYEGARDGRHCVDVNECETLQGVCGAALCENVEGSFLCVCPNSPEEFDPMTGRCVPPRTSAGTFPGSQPQAPASPVLPARPPPPPLPRRPSTPRQGPVGSGRRECYFDTAAPDACDNILARNVTWQECCCTVGEGWGSGCRIQQCPGTETAEYQSLCPHGRGYLAPSGDLSLRRDVDECQLFRDQVCKSGVCVNTAPGYSCYCSNGYYYHTQRLECIDNDECADEEPACEGGRCVNTVGSYHCTCEPPLVLDGSQRRCVSNESQSLDDNLGVCWQEVGADLVCSHPRLDRQATYTECCCLYGEAWGMDCALCPAQDSDDFEALCNVLRPPAYSPPRPGGFGLPYEYGPDLGPPYQGLPYGPELYPPPALPYDPYPPPPGPFARREAPYGAPRFDMPDFEDDGGPYGESEAPAPPGPGTRWPYRSRDTRRSFPEPEEPPEGGSYAGSLAEPYEELEAEECGILDGCTNGRCVRVPEGFTCRCFDGYRLDMTRMACVDINECDEAEAASPLCVNARCLNTDGSFRCICRPGFAPTHQPHHCAPARPRA

SEQ ID NO: 48161 - protein, 636 aa, Homo sapiens
MLGGAGGGPGLRTPCPADVDECSEEDLCQSGICTNTDGSFECICPPGHRAGPDLASCLDVDECRERGPALCGSQRCENSPGSYRCVRDCDPGYHAGPEGTCDDVNECETLQGVCGAALCENVEGSFLCVCPNSPEEFDPMTGRCVPPRTSAGTFPGSQPQAPASPVLPARPPPPPLPRRPSTPRQGPVGSGRRECYFDTAAPDACDNILARNVTWQECCCTVGEGWGSGCRIQQCPGTETAEYQSLCPHGRGYLAPSGDLSLRRDVDECQLFRDQVCKSGVCVNTAPGYSCYCSNGYYYHTQRLECIDNDECADEEPACEGGRCVNTVGSYHCTCEPPLVLDGSQRRCVSNESQSLDDNLGVCWQEVGADLVCSHPRLDRQATYTECCCLYGEAWGMDCALCPAQDSDDFEALCNVLRPPAYSPPRPGGFGLPYEYGPDLGPPYQGLPYGPELYPPPALPYDPYPPPPGPFARREAPYGAPRFDMPDFEDDGGPYGESEAPAPPGPGTRWPYRSRDTRRSFPEPEEPPEGGSYAGSLAEPYEELEAEECGILDGCTNGRCVRVPEGFTCRCFDGYRLDMTRMACVDINECDEAEAASPLCVNARCLNTDGSFRCICRPGFAPTHQPHHCAPARPRA

SEQ ID NO: 48162 - protein, 371 aa, Homo sapiens
MLTGSQLAGDIQQLLQLQQLVLVPGHHLQPPAQFLLPQAQQSQPGLLPTPNLFQLPQQTQGALLTSQPRAGLPTQPPKCLEPPSHPEEPSDLEELEQFARTFKQRRIKLGFTQGDVGLAMGKLYGNDFSQTTISRFEALNLSFKNMCKLKPLLEKWLNDAETMSVDSSLPSPNQLSSPSLGFDGLPGRRRKKRTSIETNVRFALEKSFLANQKPTSEEILLIAEQLHMEKEVIRVWFCNRRQKEKRINPCSAAPMLPSPGKPASYSPHMVTPQGGAGTLPLSQASSSLSTTVTTLSSAVGTLHPSRTAGGGGGGGGAAPPLNSIPSVTPPPPATTNSTNPSPQGSHSAIGLSGLNPSTGPGLWWNPAPYQP

SEQ ID NO: 48163 - protein, 2728 aa, Homo sapiens
MLLHLFSDANYNLLGFNASFRFSLCPGGCQSHGQCQPPGVCACEPGWGGPDCGLQECSAYCGSHGTCASPLGPCRCEPGFLGRACDLHLWENQGAGWWHNVSARDPAFSARIGAAGAFLSPPGLLAVFGGQDLNNALGDLVLYNFSANTWESWDLSPAPAARHSHVAVAWAGSLVLMGGELADGSLTNDVWAFSPLGRGHWELLAPPASSSSGPPGLAGHAAALVDDVWLYVSGGRTPHDLFSSGLFRFRLDSTSGGYWEQVIPAGGRPPAATGHSMVFHAPSRALLVHGGHRPSTARFSVRVNSTELFHVDRHVWTTLKGRDGLQGPRERAFHTASVLGNYMVVYGGNVHTHYQEEKCYEDGIFFYHLGCHQWVSGAELAPPGTPEGRAAPPSGRYSHVAAVLGGSVLLVAGGYSGRPRGDLMAYKVPPFVFQAPAPDYHLDYCSMYTDHSVCSRDPECSWCQGACQAAPPPGTPLGACPAASCLGLGRLLGDCQACLAFSSPTAPPRGPGTLGWCVHNESCLPRPEQARCRGEQISGTVGWWGPAPVFVTSLEACVTQSFLPGLHLLTFQQPPNTSQPDKVSIVRSTTITLTPSAETDVSLVYRGFIYPMLPGGPGGPGAEDVAVWTRAQRLHVLARMARGPDTENMEEVGRWVAHQEKETRRLQRPGSARLFPLPGRDHKYAVEIQGQLNGSAGPGHSELTLLWDRTGVPGGSEISFFFLEPYRSSSCTSYSSCLGCLADQGCGWCLTSATCHLRQGGAHCGDDGAGGSLLVLVPTLCPLCEEHRDCHACTQDPFCEWHQSTSRKGDAACSRRGRGRGALKSPEECPPLCSQRLTCEDCLANSSQCAWCQSTHTCFLFAAYLARYPHGGCRGWDDSVHSEPRCRSCDGFLTCHECLQSHECGWCGNEDNPTLGRCLQGDFSGPLGGGNCSLWVGEGLGLPVALPARWAYARCPDVDECRLGLARCHPRATCLNTPLSYECHCQRGYQGDGISHCNRTCLEDCGHGVCSGPPDFTCVCDLGWTSDLPPPTPAPGPPAPRCSRDCGCSFHSHCRKRGPGFCDECQDWTWGEHCERCRPGSFGNATGSRGCRPCQCNGHGDPRRGHCDNLSGLCFCQDHTEGAHCQLCSPGYYGDPRAGGSCFRECGGRALLTNVSSVALGSRRVGGLLPPGGGAARAGPGLSYCVWVVSATEELQPCAPGTLCPPLTLTFSPDSSTPCTLSYVLAFDGFPRFLDTGVVQSDRSLIAAFCGQRRDRPLTVQALSGLLVLHWEANGSSSWGFNASVGSARCGSGGPGSCPVPQECVPQDGAAGAGLCRCPQGWAGPHCRMALCPENCNAHTGAGTCNQSLGVCICAEGFGGPDCATKLDGGQLVWETLMDSRLSADTASRFLHRLGHTMVDGPDATLWMFGGLGLPQGLLGNLYRYSVSERRWTQMLAGAEDGGPGPSPRSFHAAAYVPAGRGAMYLLGGLTAGGVTRDFWVLNLTTLQWRQEKAPQTVELPAVAGHTLTARRGLSLLLVGGYSPENGFNQQLLEYQLATGTWVSGAQSGTPPTGLYGHSAVYHEATDSLYVFGGFRFHVELAAPSPELYSLHCPDRTWSLLAPSQGAKRDRMRNVRGSSRGLGQVPGEQPGSWGFREVRKKMALWAALAGTGGFLEEISPHLKEPRPRLFHASALLGDTMVVLGGRSDPDEFSSDVLLYQVNCNAWLLPDLTRSASVGPPMEESVAHAVAAVGSRLYISGGFGGVALGRLLALTLPPDPCRLLSSPEACNQSGACTWCHGACLSGDQAHRLGCGGSPCSPMPRSPEECRRLRTCSECLARHPRTLQPGDGEASTPRCKWCTNCPEGACIGRNGSCTSENDCRINQREVFWAGNCSEAACGAADCEQCTREGKCMWTRQFKRTGETRRILSVQPTYDWTCFSHSLLNVSPMPVESSPPLPCPTPCHLLPNCTSCLDSKGADGGWQHCVWSSSLQQCLSPSYLPLRCMAGGCGRLLRGPESCSLGCAQATQCALCLRRPHCGWCAWGGQDGGGRCMEGGLSGPRDGLTCGRPGASWAFLSCPPEDECANGHHDCNETQNCHDQPHGYECSCKTGYTMDNMTGLCRPVCAQGCVNGSCVEPDHCRCHFGFVGRNCSTECRCNRHSECAGVGARDHCLLCRNHTKGSHCEQCLPLFVGSAVGGGTCRPCHAFCRGNSHICISRKELQMSKGEPKKYSLDPEEIENWVTEGPSEDEAVCVNCQNNSYGEKCESCLQGYFLLDGKCTKCQCNGHADTCNEQDGTGCPCQNNTETGTCQGSSPSDRRDCYKYQCAKCRESFHGSPLGGQQCYRLISVEQECCLDPTSQTNCFHEPKRRALGPGRTVLFGVQPKFTNVDIRLTLDVTFGAVDLYVSTSYDTFVVRVAPDTGVHTVHIQPPPAPPPPPPPADGGPRGAGDPGGAGASSGPGAPAEPRVREVWPRGLITYVTVTEPSAVLVVRGVRDRLVITYPHEHHALKSSRFYLLLLGVGDPSGPGANGSADSQGLLFFRQDQAHIDLFVFFSVFFSCFFLFLSLCVLLWKAKQALDQRQEQRRHLQEMTKMASRPFAKVTVCFPPDPTAPASAWKPAGLPPPAFRRSEPFLAPLLLTGAGGPWGPMGGGCCPPAIPATTAGLRAGPITLEPTEDGMAGVATLLLQLPGGPHAPNGACLGSALVTLRHRLHEYCGGGGGAGGSGHGTGAGRKGLLSQDNLTSMSL

SEQ ID NO: 48164 - protein, 2308 aa, Homo sapiens
MLLHLFSDANYNLLGFNASFRFSLCPGGCQSHGQCQPPGVCACEPGWGGPDCGLQECSAYCGSHGTCASPLGPCRCEPGFLGRACDLHLWENQGAGWWHNVSARDPAFSARIGAAGAFLSPPGLLAVFGGQDLNNALGDLVLYNFSANTWESWDLSPAPAARHSHVAVAWAGSLVLMGGELADGSLTNDVWAFSPLGRGHWELLAPPASSSSGPPGLAGHAAALVDDVWLYVSGGRTPHDLFSSGLFRFRLDSTSGGYWEQVIPAGGRPPAATGHSMVFHAPSRALLVHGGHRPSTARFSVRVNSTELFHVDRHVWTTLKGRDGLQGPRERAFHTASVLGNYMVVYGGNVHTHYQEEKCYEDGIFFYHLGCHQWVSGAELAPPGTPEGRAAPPSGRYSHVAAVLGGSVLLVAGGYSGRPRGDLMAYKVPPFVFQAPAPDYHLDYCSMYTDHSVCSRDPECSWCQGACQAAPPPGTPLGACPAASCLGLGRLLGDCQACLAFSSPTAPPRGPGTLGWCVHNESCLPRPEQARCRGEQISGTVGWWGPAPVFVTSLEACVTQSFLPGLHLLTFQQPPNTSQPDKVSIVRSTTITLTPSAETDVSLVYRGFIYPMLPGGPGGPGAEDVAVWTRAQRLHVLARMARGPDTENMEEVGRWVAHQEKETRRLQRPGSARLFPLPGRDHKYAVEIQGQLNGSAGPGHSELTLLWDRTGVPGGSEISFFFLEPYRSSSCTSYSSCLGCLADQGCGWCLTSATCHLRQGGAHCGDDGAGGSLLVLVPTLCPLCEEHRDCHACTQDPFCEWHQSTSRKGDAACSRRGRGRGALKSPEECPPLCSQRLTCEDCLANSSQCAWCQSTHTCFLFAAYLARYPHGGCRGWDDSVHSEPRCRSCDGFLTCHECLQSHECGWCGNEDNPTLGRCLQGDFSGPLGGGNCSLWVGEGLGLPVALPARWAYARCPDVDECRLGLARCHPRATCLNTPLSYECHCQRGYQGDGISHCNRTCLEDCGHGVCSGPPDFTCVCDLGWTSDLPPPTPAPGPPAPRCSRDCGCSFHSHCRKRGPGFCDECQDWTWGEHCERCRPGSFGNATGSRGCRPCQCNGHGDPRRGHCDNLSGLCFCQDHTEGAHCQLCSPGYYGDPRAGGSCFRECGGRALLTNVSSVALGSRRVGGLLPPGGGAARAGPGLSYCVWVVSATEELQPCAPGTLCPPLTLTFSPDSSTPCTLSYVLAFDGFPRFLDTGVVQSDRSLIAAFCGQRRDRPLTVQALSGLLVLHWEANGSSSWGFNASVGSARCGSGGPGSCPVPQECVPQDGAAGAGLCRCPQGWAGPHCRMALCPENCNAHTGAGTCNQSLGVCICAEGFGGPDCATKLDGGQLVWETLMDSRLSADTASRFLHRLGHTMVDGPDATLWMFGGLGLPQGLLGNLYRYSVSERRWTQMLAGAEDGGPGPSPRSFHAAAYVPAGRGAMYLLGGLTAGGVTRDFWVLNLTTLQWRQEKAPQTVELPAVAGHTLTARRGLSLLLVGGYSPENGFNQQLLEYQLATGTWVSGAQSGTPPTGLYGHSAVYHEATDSLYVFGGFRFHVELAAPSPELYSLHCPDRTWSLLAPSQGAKRDRMRNVRGSSRGLGQVPGEQPGSWGFREVRKKMALWAALAGTGGFLEEISPHLKEPRPRLFHASALLGDTMVVLGGRSDPDEFSSDVLLYQVNCNAWLLPDLTRSASVGPPMEESVAHAVAAVGSRLYISGGFGGVALGRLLALTLPPDPCRLLSSPEACNQSGACTWCHGACLSGDQAHRLGCGGSPCSPMPRSPEECRRLRTCSECLARHPRTLQPGDGEASTPRCKWCTNCPEGACIGRNGSCTSENDCRINQREVFWAGNCSEAACGAADCEQCTREGKCMWTRQFKRTGETRRILSVQPTYDWTCFSHSLLNVSPMPVESSPPLPCPTPCHLLPNCTSCLDSKGADGGWQHCVWSSSLQQCLSPSYLPLRCMAGGCGRLLRGPESCSLGCAQATQCALCLRRPHCGWCAWGGQDGGGRCMEGGLSGPRDGLTCGRPGASWAFLSCPPEDECANGHHDCNETQNCHDQPHGYECSCKTGYTMDNMTGLCRPVCAQGCVNGSCVEPDHCRCHFGFVGRNCSTECRCNRHSECAGVGARDHCLLCRNHTKGSHCEQCLPLFVGSAVGGGTCRPCHAFCRGNSHICISRKELQMSKGEPKKYSLDPEEIENWVTEGPSEDEAVCVNCQNNSYGEKCESCLQGYFLLDGKCTNAPSAGNHFTGVRWAASSATASSRWSRSAAWTPRPRPTASMSPNAGR

SEQ ID NO: 48165 - protein, 524 aa, Homo sapiens
MFGPDKLVRAAAEKRWDRVKIVCSQPYSKDSPFGLSFVRFHSPPDKDEAEAPSQKVTVTKLGQFRVKEEDESANSLRPGALFFSRINKTSPVTASDPAGPSYAAATLQASSAASSASPVSRAIGSTSKPQESPKGKRKLDLNQEEKKTPSKPPAQLSPSVPKRPKLPAPTRTPATAPVPARAQGAVTGKPRGEGTEPRRPRAGPEELGKILQGVVVVLSGFQNPFRSELRDKALELGAKYRPDWTRDSTHLICAFANTPKYSQVLGLGGRIVRKEWVLDCHRMRRRLPSQRYLMAGPGSSSEEDEASHSGGSGDEAPKLPQKQPQTKTKPTQAAGPSSPQKPPTPEETKAASPVLQEDIDIEGVQSEGQDNGAEDSGDTEDELRRVAEQKEHRLPPGQEENGEDPYAGSTDENTDSEEHQEPPDLPVPELPDFFQGKHFFLYGEFPGDERRKLIRYVTAFNGELEDYMSDRVQFVITAQEWDPSFEEALMDNPSLAFVRPRWIYSCNEKQKLLPHQLYGVVPQA

SEQ ID NO: 48166 - protein, 597 aa, Homo sapiens
METLQEVGLRYLPHEELFCSQIWQQITRELIKYQDSVVNIQRTGCQLEKRDDLHYKDEGFSNQSSHLQVHRVHTGEKPYKGEHCVKSFSWSSHLQINQRAHAGEKPYKCEKCDNAFRRFSSLQAHQRVHSRAKSYTNDASYRSFSQRSHLPHHQRVPTGENPYKYEECGRNVGKSSHCQAPLIVHTGEKPYKCEECGVGFSQRSYLQVHLKVHTGKKPYKCEECGKSFSWRSRLQAHERIHTGEKPYKCNACGKSFSYSSHLNIHCRIHTGEKPYKCEECGKGFSVGSHLQAHQISHTGEKPYKCEECGKGFCRASNLLDHQRGHTGEKPYQCDACGKGFSRSSDFNIHFRVHTGEKPYKCEECGKGFSQASNLLAHQRGHTGEKPYKCGTCGKGFSRSSDLNVHCRIHTGEKPYKCERCGKAFSQFSSLQVHQRVHTGEKPYQCAECGKGFSVGSQLQAHQRCHTGEKPYQCEECGKGFCRASNFLAHRGVHTGEKPYRCDVCGKRFRQRSYLQAHQRVHTGERPYKCEECGKVFSWSSYLQAHQRVHTGEKPYKCEECGKGFSWSSSLIIHQRVHADDEGDKDFPSSEDSHRKTR

SEQ ID NO: 48167 - protein, 526 aa, Homo sapiens
METATQREGNSGGKIQTELESVPETGPHEEWSCQQIWEQTASELTRPQDSISSSQFSTQGDVPSQVDAGLSIIHIGETPSEHGKCKKFFSDVSILDLHQQLHSGKISHTCNEYRKRFCYSSALCLHQKVHMGEKRYKCDVCSKAFSQNSQLQTHQRIHTGEKPFKCEQCGKSFSRRSGMYVHCKLHTGEKPHICEECGKAFIHNSQLREHQRIHTGEKPFKCYICGKSFHSRSNLNRHSMVHMQEKSFRCDTCSNSFGQRSALNSHCMDHTKEKLYKCEECGRSFTCRQDLCKHQMDHTGDKPYNCNVCGKGFRWSSCLSRHQRVHNGETTFKCDGCGKRFYMNSQGHSHQRAYREEELYKCQKCGKGYISKFNLDLHQRVHTGERPYNCKECGKSFRWASGILRHKRLHTGEKPFKCEECGKRFTENSKLRFHQRIHTGEKPYKCEECGKGFRWASTHLTHQRLHSREKLFQCEDCGKSSEHSSCLQDQQSDHSGEKTSKCEDCGKRYERRLNLDMILSLFLNDI

SEQ ID NO: 48168 - protein, 700 aa, Homo sapiens
MTFKDVAVVFTEEELGLLDLAQRKLYRDVMLENFRNLLSVGHQAFHRDTFHFLREEKIWMMKTAIQREGNSGDKIQTEMETVSEAGTHQEWSFQQIWEKIASDLTRSQDLMINSSQFSKEGDFPCQTEAGLSVIHTRQKSSQGNGYKPSFSDVSHFDFHQQLHSGEKSHTCDECGKNFCYISALRIHQRVHMGEKCYKCDVCGKEFSQSSHLQTHQRVHTGEKPFKCVECGKGFSRRSALNVHHKLHTGEKPYNCEECGKAFIHDSQLQEHQRIHTGEKPFKCDICGKSFCGRSRLNRHSMVHTAEKPFRCDTCDKSFRQRSALNSHRMIHTGEKPYKCEECGKGFICRRDLYTHHMVHTGEKPYNCKECGKSFRWASCLLKHQRVHSGEKPFKCEECGKGFYTNSQCYSHQRSHSGEKPYKCVECGKGYKRRLDLDFHQRVHTGEKLYNCKECGKSFSRAPCLLKHERLHSGEKPFQCEECGKRFTQNSHLHSHQRVHTGEKPYKCEKCGKGYNSKFNLDMHQKVHTGERPYNCKECGKSFGWASCLLKHQRLHSGEKPFKCEECGKRFTQNSQLHSHQRVHTGEKPYKCDECGKGFSWSSTRLTHQRRHSRETPLKCEQHGKNIVQNSFSKVQEKVHSVEKPYKCEDCGKGYNRRLNLDMHQRVHMGEKTWKCRECDMCFSQASSLRLHQNVHVGEKP

SEQ ID NO: 48169 - protein, 670 aa, Homo sapiens
MLENFRNLLSVGHQSLHRDTFHFLKEEKFWMMETATQREGNLGGKIQMEMETVSESGTHEGLFSHQTWEQISSDLTRFQDSMVNSFQFSKQDDMPCQVDAGLSIIHVRQKPSEGRTCKKSFSDVSVLDLHQQLQSREKSHTCDECGKSFCYSSALRIHQRVHMGEKLYNCDVCGKEFNQSSHLQIHQRIHTGEKPFKCEQCGKGFSRRSGLYVHRKLHTGVKPHICEKCGKAFIHDSQLQEHQRIHTGEKPFKCDICCKSFRSRANLNRHSMVHMREKPFRCDTCGKSFGLKSALNSHRMVHTGEKRYKCEECGKRFIYRQDLYKHQIDHTGEKPYNCKECGKSFRWASGLSRHVRVHSGETTFKCEECGKGFYTNSQRYSHQRAHSGEKPYRCEECGKGYKRRLDLDFHQRVHRGEKPYNCKECGKSFGWASCLLNHQRIHSGEKPFKCEECGKRFTQNSQLYTHRRVHSGEKPFKCEECGKRFTQNSQLYSHRRVHTGVKPYKCEECGKGFNSKFNLDMHQRVHTGERPYNCKECGKSFSRASSILNHKRLHGDEKPFKCEECGKRFTENSQLHSHQRVHTGEKPYKCEKCGKSFRWASTHLTHQRLHSREKLLQCEDCGKSIVHSSCLKDQQRDQSGEKTSKCEDCGKRYKRRLNLDTLLSLFLNDT

SEQ ID NO: 48170 - protein, 801 aa, Homo sapiens
MFKEAVTFKDVAVAFTEEELGLLGPAQRKLYRDVMVENFRNLLSVGHPPFKQDVSPIERNEQLWIMTTATRRQGNLGEKNQSKLITVQDRESEEELSCWQIWQQIANDLTRCQDSMINNSQCHKQGDFPYQVGTELSIQISEDENYIVNKADGPNNTGNPEFPILRTQDSWRKTFLTESQRLNRDQQISIKNKLCQCKKGVDPIGWISHHDGHRVHKSEKSYRPNDYEKDNMKILTFDHNSMIHTGQKSYQCNECKKPFSDLSSFDLHQQLQSGEKSLTCVERGKGFCYSPVLPVHQKVHVGEKLKCDECGKEFSQGAHLQTHQKVHVIEKPYKCKQCGKGFSRRSALNVHCKVHTAEKPYNCEECGRAFSQASHLQDHQRLHTGEKPFKCDACGKSFSRNSHLQSHQRVHTGEKPYKCEECGKGFICSSNLYIHQRVHTGEKPYKCEECGKGFSRPSSLQAHQGVHTGEKSYICTVCGKGFTLSSNLQAHQRVHTGEKPYKCNECGKSFRRNSHYQVHLVVHTGEKPYKCEICGKGFSQSSYLQIHQKAHSIEKPFKCEECGQGFNQSSRLQIHQLIHTGEKPYKCEECGKGFSRRADLKIHCRIHTGEKPYNCEECGKVFRQASNLLAHQRVHSGEKPFKCEECGKSFGRSAHLQAHQKVHTGDKPYKCDECGKGFKWSLNLDMHQRVHTGEKPYKCGECGKYFSQASSLQLHQSVHTGEKPYKCDVCGKVFSRSSQLQSHQRVHTGEKPYKCEICGKSFSWRSNLTVHHRIHVGDKSYKSNRGGKNIRESTQEKKSIK

SEQ ID NO: 48171 - protein, 711 aa, Homo sapiens
MKNHFCKCDSVSWLSHHNDKLEVHRKENYSCHDCGEDIMKVSLLNQESIQTEEKPYPCTGYRKAFSNDSSSEVHQQFHLEGKPYTYSSCGKGCNYSSLLHIHQNIEREDDIENSHLKSYQRVHTEEKPCKCGEYGENFNHCSPLNTYELIHTGEMSYRHNIYEKAFSHSLDLNSIFRVHTRDEPHEYEENENVFNQSSCLQVHQKIHTEEKLYTDIEYGKSFICSSNLDIQHRVHMEENSYNSEECGNGFSLASHFQDLQIVHTKEQPYKRYVCSNSFSHNLYLQGHPKIHIGEKPRKEHGNGFNWSSKLKDHQRVHTGQKPYKCNICGKGFNHRSVLNVHQRVHTGEKPYKCEECDKGFSRSSYLQAHQRVHTGEKPYKCEECGKGFSRNSYLQGHQRVHTGEKPYKCEECGKGFSRSSHLQGHQRVHTGEKPFKCEECGKGFSWSFNLQIHQRVHTGEKPYKCEECGKGFSKASTLLAHQRVHTGEKPYQCDECGKSFSQRSYLQSHQSVHSGERPYICEVCGKGFSQRAYLQGHQRVHTRVKPYKCEMCGKGFSQSSRLEAHRRVHTGGKPYKCEVCTKGFSESSRLQAHQRVHVEGRPYKCEQCGKGFSGYSSLQAHHRVHTGEKPYKCEVCGKGFSQRSNLQAHQRVHTGEKPYKCDACGKGFRWSSGLLIHQRVHSSDKFYKSEDYGKDYPSSENLHRNEDSVLF

SEQ ID NO: 48172 - protein, 358 aa, Homo sapiens
MGSPFPLVNLPTPLYPMMCPMEHPLSADIAMATRADEDGDTPLHIAVVQGNLPAVHRLVNLFQQGGRELDIYNNLRQTPLHLAVITTLPSVVRLLVTAGASPMALDRHGQTAAHLACEHRSPTCLRALLDSAAPGTLDLEARNYDGLTALHVAVNTECQETVQLLLERGADIDAVDIKSGRSPLIHAVENNSLSMVQLLLQHGANVNAQMYSGSSALHSASGRGLLPLVRTLVRSGADSSLKNCHNDTPLMVARSRRVIDILRGKATRPASTSQPDPSPDRSANTSPESSSRLSSNGLLSASPSSSPSQSPPRDPPGFPMAPPNFFLPSPSPPAFLPFAGVLRGPGRPVPPSPAPGGS

SEQ ID NO: 48173 - protein, 386 aa, Homo sapiens
MTWLRVIAKPKNQAEAQKVTFSQDPTTVALCISKEGRPPARISWLSSLDWEAKETQVSGTLAGTVTVTSRFTLVPSGRADGVTVTCKVEHESFEEPALIPVTLSVRYPPEVSISGYDDNWYLGRTDATLSCDVRSNPEPTGYDWSTTSGTFPTSAVAQGSQLVIHAVDSLFNTTFVCTVTNAVGMGRAEQVIFVRETPNTAGAGATGGIIGGIIAAIIATAVAATGILICRQQRKEQTLQGAEEDEDLEGPPSYKPPTPKAKLEAQEMPSQLFTLGASEHSPLKTPYFDAGASCTEQEMPRYHELPTLEERSGPLHPGATSLGSPIPVPPGPPAVEDVSLDLEDEEGEEEEEYLDKINPIYDALSYSSPSDSYQGKGFVMSRAMYV

SEQ ID NO: 48174 - protein, 327 aa, Homo sapiens
MTWLRVIAKPKNQAEAQKVTFSQDPTTVALCISKEGRPPARISWLSSLDWEAKETQVSGTLAGTVTVTSRFTLVPSGRADGVTVTCKVEHESFEEPALIPVTLSVRYPPEVSISGYDDNWYLGRTDATLSCDVRSNPEPTGYDWSTTSGTFPTSAVAQGSQLVIHAVDSLFNTTFVCTVTNAVGMGRAEQVIFVRETPRASPRDVGPLVWGAVGGTLLVLLLLAGGSLAFILLRVRRRRKSPGGAGGGASGDGGFYDPKAQVLGNGDPVFWTPVVPGPMEPDGKDEEEEEEEEKAEKGLMLPPPPALEDDMESQLDGSLISRRAVYV

SEQ ID NO: 48175 - protein, 78 aa, Homo sapiens
MDSLRTNHQGTYVLQDNSFPLLLPMASGLQYLEEAPKFLAFTCGLLRGALYTLGIESVVTASVAALPVCKFQVVIPKS

SEQ ID NO: 48176 - protein, 736 aa, Homo sapiens
MRELKRTLDAKGHGVLEMPSGTGKTVSLLALIMAYQRAYPLEVTKLIYCSRTVPEIEKVIEELRKLLNFYEKQEGEKLPFLGLALSSRKNLCIHPEVTPLRFGKDVDGKCHSLTASYVRAQYQHDTSLPHCRFYEEFDAHGREVPLPAGIYNLDDLKALGRRQGWCPYFLARYSILHANVVVYSYHYLLDPKIADLVSKELARKAVVVFDEAHNIDNVCIDSMSVNLTRRTLDRCQGNLETLQKTVLRIKETDEQRLRDEYRRLVEGLREASAARETDAHLANPVLPDEVLQEAVPGSIRTAEHFLGFLRRLLEYVKWRLRVQHVVQESPPAFLSGLAQRVCIQRKPLRFCAERLRSLLHTLEITDLADFSPLTLLANFATLVSTYAKGFTIIIEPFDDRTPTIANPILHFSCMDASLAIKPVFERFQSVIITSGTLSPLDIYPKILDFHPVTMATFTMTLARVCLCPMIIGRGNDQVAISSKFETREDIAVIRNYGNLLLEMSAVVPDGIVAFFTSYQYMESTVASWYEQGILENIQRNKLLFIETQDGAETSVALEKYQEACENGRGAILLSVARGKVSEGIDFVHHYGRAVIMFGVPYVYTQSRILKARLEYLRDQFQIRENDFLTFDAMRHAAQCVGRAIRGKTDYGLMVFADKRFARGDKRGKLPRWIQEHLTDANLNLTVDEGVQVAKYFLRQMAQPFHREDQLGLSLLSLEQLESEETLKRIEQIAQQL

SEQ ID NO: 48177 - protein, 181 aa, Homo sapiens
MVSLLCLLHFSIVSVAAHLALLLLCGTISLRVYRKVLQAVHRGDGANPFQAYLDVDLTLTREQTERLSHQITSRVVSAATQLRHFFLVEDLVDSLKLALLFYILTFVGAIFNGLTLLILGVIGLFTIPLLYRQHQAQIDQYVGLVTNQLSHIKAKIRAKIPGTGALASAAAAVSGSKAKAE

SEQ ID NO: 48178 - protein, 172 aa, Homo sapiens
MAKLLYLGIRQVSKPLANRIKEAARRSEFFKTYICLPPAQLYHWVEMRTKMRIMGFRGTVIKPLNEEAAAELGAELLGEATIFIVGGGCLVLEYWRHQAQQRHKEEEQRAAWNALRDEVGHLALALEALQAQVQAAPPQGALEELRTELQEVRAQLCNPGRSASHAVPASKK

SEQ ID NO: 48179 - protein, 617 aa, Homo sapiens
MIPDELAPTYSLDTRSELPSCRLKLEWVYGYRGRDCRANLYLLPTGEIVYFVASVAVLYSVEEQRQRHYLGHNDDIKCLAIHPDMVTIATGQVAGTTKEGKPLPPHVRIWDSVSLSTLHVLGLGVFDRAVCCVGFSKSNGGNLLCAVDESNDHMLSVWDWAKETKVVDVKCSNEAVLVATFHPTDPTVLITCGKSHIYFWTLEGGSLSKRQGLFEKHEKPKYVLCVTFLEGGDVVTGDSGGNLYVWGKGGNRITQAVLGAHDGGVFGLCALRDGTLVSGGGRDRRVVLWGSDYSKLQEVEVPEDFGPVRTVAEGHGDTLYVGTTRNSILQGSVHTGFSLLVQGHVEELWGLATHPSRAQFVTCGQDKLVHLWSSDSHQPLWSRIIEDPARSAGFHPSGSVLAVGTVTGRWLLLDTETHDLVAIHTDGNEQISVVSFSPDGAYLAVGSHDNLVYVYTVDQGGRKVSRLGKCSGHSSFITHLDWAQDSSCFVTNSGDYEILYWDPATCKQITSADAVRNMEWATATCVLGFGVFGIWSEGADGTDINAVARSHDGKLLASADDFGKVHLFSYPCCQPRALSHKYGGHSSHVTNVAFLWDDSMALTTGGKDTSVLQWRVV

SEQ ID NO: 48180 - protein, 518 aa, Homo sapiens
MLKRGEVSCFREERDVLVNGDRRWITQLHFAFQDENYLYLVMEYYVGGDLLTLLSKFGERIPAEMARFYLAEIVMAIDSVHRLGYVHRDIKPDNILLDRCGHIRLADFGSCLKLRADGTVRSLVAVGTPDYLSPEILQAVGGGPGTGSYGPECDWWALGVFAYEMFYGQTPFYADSTAETYGKIVHYKEHLSLPLVDEGVPEEARDFIQRLLCPPETRLGRGGAGDFRTHPFFFGLDWDGLRDSVPPFTPDFEGATDTCNFDLVEDGLTAMETLSDIREGAPLGVHLPFVGYSYSCMALRDSEVPGPTPMELEAEQLLEPHVQAPSLEPSVSPQDETAEVAVPAAVPAAEAEAEVTLRELQEALEEEVLTRQSLSREMEAIRTDNQNFASQLREAEARNRDLEAHVRQLQERMELLQAEGATAVTGVPSPRATDPPSHLDGPPAVAVGQCPLVGPGPMHRRHLLLPARVPRPGLSEALSLLLFAVVLSRAAALGCIGLVAHAGQLTAVWRRPGAARAP

SEQ ID NO: 48181 - protein, 364 aa, Homo sapiens
MFVAGVVGNGLALGILSARRPARPSAFAVLVTGLAATDLLGTSFLSPAVFVAYARNSSLLGLARGGPALCDAFAFAMTFFGLASMLILFAMAVERCLALSHPYLYAQLDGPRCARLALPAIYAFCVLFCALPLLGLGQHQQYCPGSWCFLRMRWAQPGGAAFSLAYAGLVALLVAAIFLCNGSVTLSLCRMYRQQKRHQGSLGPRPRTGEDEVDHLILLALMTVVMAVCSLPLTIRCFTQAVAPDSSSEMGDLLAFRFYAFNPILDPWVFILFRKAVFQRLKLWVCCLCLGPAHGDSQTPLSQLASGRRDPRAPSAPVGKEGSCVPLSAWGEGQVEPLPPTQQSSGSAVGTSSKAEASVACSLC

SEQ ID NO: 48182 - protein, 1112 aa, Homo sapiens
MYEDYENEQYGEYEGDEEEDMGKEDYDDFTKELNQYRRAKEGSSRGRGSRGRGRGYRGRGSRGGSRGRGMGRGSRGRGRGSMGGDHPEDEEDFYEEEMDYGESEEPMGDDDYDEYSKELNQYRRSKDSRGRGLSRGRGRGSRGRGKGMGRGRGRGGSRGGMNKGGMNDDEDFYDEDMGDGGGGSYRSRDHDKPHQQSDKKGKVICKYFVEGRCTWGDHCNFSHDIELPKKRELCKFYITGFCARAENCPYMHGDFPCKLYHTTGNCINGDDCMFSHDPLTEETRELLDKMLADDAEAGAEDEKEVEELKKQGINPLPKPPPGVGLLPTPPRPPGPQAPTSPNGRPMQGGPPPPPPPPPPPPGPPQMPMPVHEPLSPQQLQQQDMYNKKIPSLFEIVVRPTGQLAEKLGVRFPGPGGPPGPMGPGPNMGPPGPMGGPMHPDMHPDMHPDMHPDMHADMHADMPMGPGMNPGPPMGPGGPPMMPYGPGDSPHSGMMPPIPPAQNFYENFYQQQEGMEMEPGLLGDAEDYGHYEELPGEPGEHLFPEHPLEPDSFSEGGPPGRPKPGAGVPDFLPSAQRALYLRIQQKQQEEEERARRLAESSKQDRENEEGDTGNWYSSDEDEGGSSVTSILKTLRQQTSSRPPASVGELSSSGLGDPRLQKGHPTGSRLADPRLSRDPRLTRHVEASGGSGPGDSGPSDPRLARALPTSKPEGSLHSSPVGPSSSKGSGPPPTEEEEGERALREKAVNIPLDPLPGHPLRDPRSQLQQFSHIKKDVTLSKPSFARTVLWNPEDLIPLPIPKQDAVPPVPAALQSMPTLDPRLHRAATAGPPNARQRPGASTDSSTQGANLPDFELLSRILKTVNATGSSAAPGSSDKPSDPRVRKAPTDPRLQKPTDSTASSRAAKPGPAEAPSPTASPSGDASPPATAPYDPRVLAAGGLGQGGGGGQSSVLSGISLYDPRTPNAGGKATEPAADTGAQPKGAEGNGKSSASKAKEPPFVRKSALEQPETGKAGADGGTPTDRYNSYNRPRPKAAAAPAATTATPPPEGAPPQPGVHNLPVPTLFGTVKQTPKTGSGSPFAGNSPAREGEQDAASLKDVFKGFDPTASPFCQ

SEQ ID NO: 48183 - protein, 18 aa, Homo sapiens
MGLLPLPRGHRAPEMEPN

SEQ ID NO: 48184 - protein, 834 aa, Homo sapiens
MSATINISLFSSYFSNAPVVQVPGRLFPITVVYQPQEAEPTTSKSEKLDPRPFLRVLESIDHKYPPEERGDLLVFLSGMAEISAVLEAAQTYASHTQRWVVLPLHSALSVADQDKVFDVAPPGVRKCILSTNIAETSVTIDGIRFVVDSGKVKEMSYDPQAKLQRLQEFWISQASAEQRKGRAGRTGPGVCFRLYAESDYDAFAPYPVPEIRRVALDSLVLQMKSMSVGDPRTFPFIEPPPPASLETAILYLRDQGALDSSEALTPIGSLLAQLPVDVVIGKMLILGSMFSLVEPVLTIAAALSVQSPFTRSAQSSPECAAARRPLESDQGDPFTLFNVFNAWVQVKSERSRNSRKWCRRRGIEEHRLYEMANLRRQFKELLEDHGLLAGAQAAQVGDSYSRLQQRRERRALHQLKRQHEEGAGRRRKVLRLQEEQDGGSSDEDRAGPAPPGASDGVDIQDVKFKLRHDLAQLQAAASSAQDLSREQLALLKLVLGRGLYPQLAVPDAFNSSRKDSDQIFHTQAKQGAVLHPTCVFAGSPEVLHAQELEASNCDGSRDDKDKMSSKHQLLSFVSLLETNKPYLVNCVRIPALQSLLLFSRSLDTNGDCSRLVADGWLELQLADSESAIRLLAASLRLRARWESALDRQLAHQAQQQLEEEEEDTPVSPKEVATLSKELLQFTASKIPYSLRRLTGLEVQNMYVGPQTIPATPHLPGLFGSSTLSPHPTKGGYAVTDFLTYNCLTNDTDLYSDCLRTFWTCPHCGLHAPLTPLERIAHENTCPQAPQDGPPGAEEAALETLQKTSVLQRPYHCEACGKDFLFTPTEVLRHRKQHV

SEQ ID NO: 48185 - protein, 1166 aa, Homo sapiens [sequence omitted]

SEQ ID NO: 48186 - protein, 225 aa, Homo sapiens
MNFDLKQGTWGGDWPEALAISQRWQQQDKAANKELTFLLFSCPHRLREHLERGRGNLEWKEPPSMRLKARPSSPGFSVLTCSAFSFYPPELQLRFLRNGLAAGTGQGDFGPNSDGSFHASSSLTVKSGDEHHYCCIVQHAGLAQPLRVELESPAKSSVLVVGIVIGVLLLTAAAVGGALLWRRMRSGLPAPWISLRGDDTGVLLPTPGEAQDADLKDVNVIPATA

SEQ ID NO: 48187 - protein, 327 aa, Homo sapiens [sequence omitted]

SEQ ID NO: 48188 - protein, 482 aa, Homo sapiens
MQILTPPLQSSVELVADPETRTVAVKQLGVNPSTTGTQELKPGLEGSLGVGDTLYLVNGLHPLTLRWEETRTPESQPDTPPGTPLVSQDEKRDAELPKKRMRKSNPGWENLEKLLVFTAAGVKPQGKVAGFDLDGTLITTRSGKVFPTGPSDWRILYPEIPRKLRELEAEGYKLVIFTNQMSIGRGKLPAEEFKAKVEAVVEKLGVPFQVLVATHAGLYRKPVTGMWDHLQEQANDGTPISIGDSIFVGDAAGRPANWAPGRKKKDFSCADRLFALNLGLPFATPEEFFLKWPAAGFELPAFDPRTVSRSGPLCLPESRALLSASPEVVVAVGFPGAGKSTFLKKHLVSAGYVHVNRDTLGSWQRCVTTCETALKQGKRVAIDNTNPDAASRARYVQCARAAGVPCRCFLFTATLEQARHNNRFREMTDSSHIPVSDMVMYGYRKQFEAPTLAEGFSAILEIPFRLWVEPRLGRLYCQFSEG

SEQ ID NO: 48189 - protein, 703 aa, Homo sapiens
MVHNVSEKTLTPAKSKEYRGEFFSYSDHSQQDSVQEGEKPYQCSECGKSFSGSYRLTQHWITHTREKPTVHQECEQGFDRNASLSVYPKTHTGYKFYVCNEYGTTFSQSTYLWHQKTHTGEKPCKSQDSDHPPSHDTQPGEHQKTHTDSKSYNCNECGKAFTRIFHLTRHQKIHTRKRYECSKCQATFNLRKHLIQHQKTHAAKTTSECQECGKIFRHSSLLIEHQALHAGEEPYKCNERGKSFRHNSTLKIHQRVHSGEKPYKCSECGKAFHRHTHLNEHRRIHTGYRPHKCQECVRSFSRPSHLMRHQAIHTAEKPYSCAECKETFSDNNRLVQHQKMHTVKTPYECQECGERFICGSTLKCHESVHAREKQGFFVSGKILDQNPEQKEKCFKCNKCEKTFSCSKYLTQHERIHTRGVKPFECDQCGKAFGQSTRLIHHQRIHSRVRLYKWGEQGKAISSASLIKLQSFHTKEHPFKCNECGKTFSHSAHLSKHQLIHAGENPFKCSKCDRVFTQRNYLVQHERTHARKKPLVCNECGKTFRQSSCLSKHQRIHSGEKPYVCDYCGKAFGLSAELVRHQRIHTGEKPYVCQECGKAFTQSSCLSIHRRVHTGEKPYRCGECGKAFAQKANLTQHQRIHTGEKPYSCNVCGKAFVLSAHLNQHLRVHTQETLYQCQRCQKAFRCHSSLSRHQRVHNKQQYCL

SEQ ID NO: 48190 - protein, 380 aa, Homo sapiens [sequence omitted]

SEQ ID NO: 48191 - protein, 336 aa, Homo sapiens
MLGHELCRVCGDKASGFHYNVLSCEGCKGFFRRSVVRGGARRYACRGGGTCQMDAFMRRKCQQCRLRKCKEAGMREQCVLSEEQIRKKKIRKQQQESQSQSQSPVGPQGSSSSASGPGASPGGSEAGSQGSGEGEGVQLTAAQELMIQQLVAAQLQCNKRSFSDQPKVTLGREDQIALLKASTIEIMLLETARRYNHETECITFLKDFTYSKDDFHRAGLQVEFINPIFEFSRAMRRLGLDDAEYALLIAINIFSADRPNVQEPGRVEALQQPYVEALLSYTRIKRPQDQLRFPRMLMKLVSLRTLSSVHSEQVFALRLQDKKLPPLLSEIWDVHE

SEQ ID NO: 48192 - protein, 966 aa, Homo sapiens
MEAEHRLQEQEEEELQSVLEGVADGQVPPSAIDPRWLRPTPPALDPQTEPLIFQQLEIDHYVGPAQPVPGGPPPSRGSVPVLRAFGVTDEGFSVCCHIHGFAPYFYTPAPPGFGPEHMGDLQRELNLAISRDSRGGRELTGPAVLAVELCSRESMFGYHGHGPSPFLRITVALPRLVAPARRLLEQGIRVAGLGTPSFAPYEANVDFEIRFMVDTDIVGCNWLELPAGKYALRLKEKATQCQLEADVLWSDVVSHPPEGPWQRIAPLRVLSFDIECAGRKGIFPEPERDPVIQICSLGLRWGEPEPFLRLALTLRPCAPILGAKVQSYEKEEDLLQAWSTFIRIMDPDVITGYNIQNFDLPYLISRAQTLKVQTFPFLGRVAGLCSNIRDSSFQSKQTGRRDTKVVSMVGRVQMDMLQVLLREYKLRSYTLNAVSFHFLGEQKEDVQHSIITDLQNGNDQTRRRLAVYCLKDAYLPLRLLERLMVLVNAVEMARVTGVPLSYLLSRGQQVKVVSQLLRQAMHEGLLMPVVKSEGGEDYTGATVIEPLKGYYDVPIATLDFSSLYPSIMMAHNLCYTTLLRPGTAQKLGLTEDQFIRTPTGDEFVKTSVRKGLLPQILENLLSARKRAKAELAKETDPLRRQVLDGRQLALKVSANSVYGFTGAQVGKLPCLEISQSVTGFGRQMIEKTKQLVESKYTVENGYSTSAKVVYGDTDSVMCRFGVSSVAEAMALGREAADWVSGHFPSPIRLEFEKVYFPYLLISKKRYAGLLFSSRPDAHDRMDCKGLEAVRRDNCPLVANLVTASLRRLLIDRDPEGAVAHAQDVISDLLCNRIDISQLVITKELTRAASDYAGKQAHVELAERTRCSCWSTACPLTRSTTWSSSWPSPSCASSSPSWARAVPRLCYCGGTTRAARRCSRARWAASWPSPNAATAALAAAQCSATREPCVSSASPGSLSCIRRRYPI

SEQ ID NO: 48193 - protein, 246 aa, Homo sapiens
MAVAAPSRARGSGCRAGTGARGAGAEGREGEACGTVGLLLEHSFEIDDSANFRKRGSLLWNQQDGTLSLSQRQLSEEERGRLRDVAALNGLYRVRIPRRPGALDGLEAGGYVSSFVPACSLVESHLSDQLTLHVDVAGNVVGVSVVTHPGGCRGHEVEDVDLELFNTSVQLQPPTTAPGPETAAFIERLEMEQAQKAKNPQEQKSFFAKYWMYIIPVVLFLMMSGAPDTGGQGGGGGGGGGGGSGR

SEQ ID NO: 48194 - protein, 238 aa, Homo sapiens
MAVAAPSRARGSGCRAGTGARGAGAEGREGEACGTVGLLLEHSFEIDDSANFRKRGSLLWNQQDGTLSLSQRQLSEEERGRLRDVAALNGLYRVRIPRRPGALDGLEAGGYVSSFVPACSLVESHLSDQLTLHVDVAGNVVGVSVVTHPGGCRGHEVEDVDLELFNTSVQLQPPTTAPGPETAAFIERLEMEQAQKAKNPQEQKSFFAKYWHIILGGAVLLTALRPAAPGPAPPPQEA

SEQ ID NO: 48195 - protein, 277 aa, Homo sapiens [sequence omitted]

SEQ ID NO: 48196 - protein, 623 aa, Homo sapiens
MFGNIVNQNKGHFLLKQDCDTFDLHEKPLKSNLSFENQKRSSGLKNSAEFNRDGKSLFHANHKQFYTEMKFPAIAKPINKSQFIKQQRTHNIENAHVCSECGKAFLKLSQFIDHQRVHTGEKPHVCSMCGKAFSRKSRLMDHQRTHTELKHYECTECDKTFLKKSQLNIHQKTHMGGKPYTCSQCGKAFIKKCRLIYHQRTHTGEKPHGCSVCGKAFSTKFSLTTHQKTHTGEKPYICSECGKGFIEKRRLTAHHRTHTGEKPFICNKCGKGFTLKNSLITHQQTHTGEKLYTCSECGKGFSMKHCLMVHQRTHTGEKPYKCNECGKGFALKSPLIRHQRTHTGEKPYVCTECRKGFTMKSDLIVHQRTHTAEKPYICNDCGKGFTVKSRLIVHQRTHTGEKPYVCGECGKGFPAKIRLMGHQRTHTGEKPYICNECGKGFTEKSHLNVHRRTHTGEKPYVCSECGKGLTGKSMLIAHQRTHTGEKPYICNECGKGFTMKSTLSIHQQTHTGEKPYKCNECDKTFRKKTCLIQHQRFHTGKTSFACTECGKFSLRKNDLITHQRIHTGEKPYKCSDCGKAFTTKSGLNVHQRKHTGERPYGCSDCGKAFAHLSILVKHRRIHR

SEQ ID NO: 48197 - protein, 288 aa, Homo sapiens
MKRYLIAHQRTHSGEKPYVCKECGKGFTVKSNLIVHQRTHTGEKPYICSECGKGFTMKRYLVVHQRTHTGEKPYMCSECGKGFTVKSNLIVHQRSHTGEKSYICSECGKGFTVKRTLVIHQRTHTGEKSYICNECGKGFTTKRTLIIHQRTHTGEKPYECNECGKAFSQKICLIQHERCHTGKTPFVCTECGKSYSHKYGLITHQRIHTGEKPYECNECGKAFTTKSVLNVHQRTHTGERPYGCSDCEKAFSHLSNLVKHKKMHTREMGRISQVENSCNGESQLLPYK

SEQ ID NO: 48198 - protein, 38 aa, Homo sapiens
MHDEDILLNRARQYRSVPHRDIAKTSKSSHWRFLLPEN

SEQ ID NO: 48199 - protein, 664 aa, Homo sapiens
MEFSSIGKGNTEVIHTGTLQRLASHHIGECCFQEIEKDIHDFVFQWQEDETNGHEAPMTEIKELTGSTDQYDQRHAGNKPIKYQLGSSFHSHLPELHIFQPEGKIGNQLEKSINNASSVSTSQRISCRPKTHISNNYGNNFFHSSLLTQKQDVHRKEKSFQFNESGKSFNCSSLFKKHQIIHLGEKQYKCDVCGKDFNQKRYLAHHRRCHTGEKPYMCNKCGKVFNKKAYLARHYRRHTGEKPYKCNECGKTFSDKSALLVHKTIHTGEKPYKCNECGKVFNQQSNLARHHRVHTGEKPYQCKECDKVFSRKSYLERHRRIHTGEKPYKCKVCDKAFRHDSHLAQHIVIHTREKPYKCNECGKTFGENSALLVHKTIHTGEKPYKCNECGKVFNQQSNLARHHRLHTGEKPYKCKECDKVFSRKSHLERHRRIHTGEKPYKCKVCDKAFRRDSHLAQHTVIHTGEKPYKCNECGKTFVQNSSLVMHKVIHTGEKRYKCNECGKSFNHKSSLAYHHRLHTGEKPYKCNECGKVFRTQSQLACHHRLHTGEKPYKCEECDKVFNIKSHLEIHRRVHTGEKPYKCRVCDKAFGRDSYLAQHQRVHTGEKPYKCKVCDKAFKCYSHLAQHTRIHTGEKPFKCSECGKAFRAQSTLIHHQAIHGVGKLD

SEQ ID NO: 48200 - protein, 32 aa, Homo sapiens
MLENYRNLLSLDEDNIPPEDGNHPCTSLHFSL

SEQ ID NO: 48201 - protein, 782 aa, Homo sapiens
MVAGAGRENGMETPMHENPEWEKARQALASISKSGAAGGSAKSSSNGPVASAQYVSQAEASALQQQQYYQWYQQYNYAYPYSYYYPMSMYQSYGSPSQYGMAGSYGSATPQQPSAPQHQGTLNQPPVPGMDESMSYQAPPQQLPSAQPPQPSNPPHGAHTLNSGPQPGTAPATQHSQAGPATGQAYGPHTYTEPAKPKKGQQLWNRMKPAPGTGGLKFNIQKRPFAVTTQSFGSNAEGQHSGFGPQPNPEKVQNHSGSSARGNLSGKPDDWPQDMKEYVERCFTACESEEDKDRTEKLLKEVLQARLQDGSAYTIDWSREPLPGLTREPVAESPKKKRWEAASSLHPPRGAGSATRGGGAPSQRGTPGAGGAGRARGNSFTKFGNRNVFMKDNSSSSSTDSRSRSSSRSPTRHFRRSDSHSDSDSSYSGNECHPVGRRNPPPKGRGGRGAHMDRGRGRAQRGKRHDLAPTKRSRKKMAALECEDPERELKKQKRAARFQHGHSRRLRLEPLVLQMSSLESSGADPDWQELQIVGTCPDITKHYLRLTCAPDPSTVRPVAVLKKSLCMVKCHWKEKQDYAFACEQMKSIRQDLTVQGIRTEFTVEVYETHARIALEKGDHEEFNQCQTQLKSLYAENLPGNVGEFTAYRILYYIFTKNSGDITTELAYLTRELKADPCVAHALALRTAWALGNYHRFFRLYCHAPCMSGYLVDKFADRERKVALKAMIKTFRPALPVSYLQAELAFEGEAACRAFLEPLGLAYTGPDNSSIDCRLSLAQLSAF

SEQ ID NO: 48202 - protein, 819 aa, Homo sapiens
MVAGAGRENGMETPMHENPEWEKARQALASISKSGAAGGSAKSSSNGPVASAQYVSQAEASALQQQQYYQWYQQYNYAYPYSYYYPMPPVPGMDESMSYQAPPQQLPSAQPPQPSNPPHGAHTLNSGPQPGTAPATQHSQAGPATGQAYGPHTYTEPAKPKKGQQLWNRMKPAPGTGGLKFNIQKRPFAVTTQSFGSNAEGQHSGFGPQPNPEKVQNHSGSSARGNLSGKPDDWPQDMKEYVERCFTACESEEDKDRTEKLLKEVLQARLQDGSAYTIDWSREPLPGLTREPVAESPKKKRWEAASSLHPPRGAGSATRGGGAPSQRGTPGAGGAGRARGNSFTKFGNRNVFMKDNSSSSSTDSRSRSSSRSPTRHFRRSDSHSDSDSSYSGNECHPVGRRNPPPKGRGGRGAHMDRGRGRAQRGKRHDLAPTKRSRKKMAALECEDPERELKKQKRAARFQHGHSRRLRLEPLVLQMSSLESSGADPDWQELQIVGTCPDITKHYLRLTCAPDPSTVRPVAVLKKSLCMVKCHWKEKQDYAFACEQMKSIRQDLTVQGIRTEFTVEVYETHARIALEKGDHEEFNQCQTQLKSLYAENLPGNVGEFTAYRILYYIFTKNSGDITTELAYLTRELKADPCVAHALALRTAWALGNYHRFFRLYCHAPCMSGYLVDKFADRERKVALKAMIKTYVVPSSLLPLLFPSFRLAPPLRPAPGRRPPPAPNPCPGPCFPIIFLHSALPSPVPLALLVGHLCVPGHSSPSPHCSQLTASGASSPPHLCVSSSCSLLPGPPSSLLALGFLRTLRSLLSQLVAVLPP

SEQ ID NO: 48203 - protein, 856 aa, Homo sapiens
MVAGAGRENGMETPMHENPEWEKARQALASISKSGAAGGSAKSSSNGPVASAQYVSQAEASALQQQQYYQWYQQYNYAYPYSYYYPMSMYQSYGSPSQYGMAGSYGSATPQQPSAPQHQGTLNQPPVPGMDESMSYQAPPQQLPSAQPPQPSNPPHGAHTLNSGPQPGTAPATQHSQAGPATGQAYGPHTYTEPAKPKKGQQLWNRMKPAPGTGGLKFNIQKRPFAVTTQSFGSNAEGQHSGFGPQPNPEKVQNHSGSSARGNLSGKPDDWPQDMKEYVERCFTACESEEDKDRTEKLLKEVLQARLQDGSAYTIDWSREPLPGLTREPVAESPKKKRWEAASSLHPPRGAGSATRGGGAPSQRGTPGAGGAGRARGNSFTKFGNRNVFMKDNSSSSSTDSRSRSSSRSPTRHFRRSDSHSDSDSSYSGNECHPVGRRNPPPKGRGGRGAHMDRGRGRAQRGKRHDLAPTKRSRKKMAALECEDPERELKKQKRAARFQHGHSRRLRLEPLVLQMSSLESSGADPDWQELQIVGTCPDITKHYLRLTCAPDPSTVRPVAVLKKSLCMVKCHWKEKQDYAFACEQMKSIRQDLTVQGIRTEFTVEVYETHARIALEKGDHEEFNQCQTQLKSLYAENLPGNVGEFTAYRILYYIFTKNSGDITTELAYLTRELKADPCVAHALALRTAWALGNYHRFFRLYCHAPCMSGYLVDKFADRERKVALKAMIKTYVVPSSLLPLLFPSFRLAPPLRPAPGRRPPPAPNPCPGPCFPIIFLHSALPSPVPLALLVGHLCVPGHSSPSPHCSQLTASGASSPPHLCVSSSCSLLPGPPSSLLALGFLRTLRSLLSQLVAVLPP

SEQ ID NO: 48204 - protein, 62 aa, Homo sapiens
MVVRNCSSFLIKRNKQTYSTEPNNLKARNSFRYNGLIHRKTVGVEPAADGKGVVVVIKRRSE

SEQ ID NO: 48205 - protein, 154 aa, Homo sapiens
MDPPPPKAPPFPKAEGPSSTPSSAAGPRPPRLGRHLLIDANGVPYTYTVQLEEEPRGPPQREAPPGEPGPRKGYSCPECARVFASPLRLQSHRVSHSDLKPFTCGACGKAFKRSSHLSRHRATHRARAGPPHTCPLCPRRFQDAAELAQHVRLH

SEQ ID NO: 48206 - protein, 541 aa, Homo sapiens [sequence omitted]

SEQ ID NO: 48207 - protein, 567 aa, Homo sapiens [sequence omitted]

SEQ ID NO: 48208 - protein, 146 aa, Homo sapiens
MLENYQNLVWLGLSISKSVISLLEKRKLPWIMAKEEIRGPLPDVPGAEIKELSAKRAINEVLSQFDTVIKCTRNVCKECGNLYCHNMQLTLHKRNHTQKKCNQCLDCGKYFTRQSTLIQHQRIHTGERPYKCNECIKTFNQRAHLT

SEQ ID NO: 48209 - protein, 493 aa, Homo sapiens
MQEGHFRPGIDPQEKSPGKMSPECDGLGTADGVCSRIGQEQVSPGDRVRSHNSCESGKDPMIQEEENNFKCSECGKVFNKKHLLAGHEKIHSGVKPYECTECGKTFIKSTHLLQHHMIHTGERPYECMECGKAFNRKSYLTQHQRIHSGEKPYKCNECGKAFTHRSNFVLHNRRHTGEKSFVCTECGQVFRHRPGFLRHYVVHSGENPYECLECGKVFKHRSYLMWHQQTHTGEKPYECSECGKVFLESAALIHHYVIHTGEKPFECLECGKAFNHRSYLKRHQRIHTGEKPFVCSECGKAFTHCSTFILHKRAHTGEKPFECKECGKAFSNRKDLIRHFSIHTGEKPYECVECGKAFTRMSGLTRHKRIHSGEKPYECVECGKSFCWSTNLIRHAIIHTGEKPYKCSECGKAFSRSSSLTQHQRMHTGKNPISVTDVGRPFTSGQTSVTLRELLLGKDFLNVTTEANILPEETSSSASDQPYQRETPQVSSL

SEQ ID NO: 48210 - protein, 586 aa, Homo sapiens
MLENCGLLVSLGCPVPRPELIYHLEHGQEPWTRKEDLSQGTCPGDKGKPKSTEPTTCELALSEGISFWGQLTQGASGDSQLGQPKDQDGFSEMQGERLRPGLDSQKEKLPGKMSPKHDGLGTADSVCSRIIQDRVSLGDDVHDCDSHGSGKNPVIQEEENIFKCNECEKVFNKKRLLARHERIHSGVKPYECTECGKTFSKSTYLLQHHMVHTGEKPYKCMECGKAFNRKSHLTQHQRIHSGEKPYKCSECGKAFTHRSTFVLHNRSHTGEKPFVCKECGKAFRDRPGFIRHYIIHSGENPYECFECGKVFKHRSYLMWHQQTHTGEKPYECSECGKAFCESAALIHHYVIHTGEKPFECLECGKAFNHRSYLKRHQRIHTGEKPYVCSECGKAFTHCSTFILHKRAHTGEKPFECKECGKAFSNRADLIRHFSIHTGEKPYECMECGKAFNRRSGLTRHQRIHSGEKPYECIECGKTFCWSTNLIRHSIIHTGEKPYECSECGKAFSRSSSLTQHQRMHTGRNPISVTDVGRPFTSGQTSVNIQELLLGKNFLNVTTEENLLQEEASYMASDRTYQRETPQVSSL

SEQ ID NO: 48211 - protein, 170 aa, Homo sapiens
MPYKCNECGKYFSHHSNLIVHQRVHNGARPYKCSDCGKVFRHKSTLVQHESIHTGENPYDCSDCGKSFGHKYTLIKHQRIHTESKPFECIECGKFFSRSSDYIAHQRVHTGERPFVCSKCGKDFIRTSHLVRHQRVHTGERPYECSECGKAYSLSSHLNRHQKVHTAGRL

SEQ ID NO: 48212 - protein, 377 aa, Homo sapiens
MAELESHPCDICGPILKDTLHLAKYHGGKARQKPYLCGACGKQFWFSTDFDQHQNQPNGGKLFPRKEGRDSVKSCRVHVPEKTLTCGKGRRDFSATSGLLQHQASLSSMKPHKSTKLVSGFLMGQRYHRCGECGKAFTRKDTLARHQRIHTGERPYECNECGKFFSQSYDLFKHQTVHTGERPYECSECGKFFRQISGLIEHRRVHTGERLYQCGKCGKFFSSKSNLIRHQEVHTGARPYVCSECGKEFSRKHTLVLHQRTHTGERPYECSECGKAFSQSSHLNVHWRIHSSDYECSRCGKAFSCISKLIQHQKVHSGEKPYECSKCGKAFTQRPNLIRHWKVHTGERPYVCSECGREFIRKQTLVLHQRVHAGEKL

SEQ ID NO: 48213 - protein, 522 aa, Homo sapiens
MLETFGHLLSIGPELPKPEVISQLEQGTELWVAERGTTQGCHPAWEPRSESQASRKEEGLPEEEPSHVTGREGFPTDAPYPTTLGKDRECQSQSLALKEQNNLKQLEFGLKEAPVQDQGYKTLRLRENCVLSSSPNPFPEISRGEYLYTYDSQITDSEHNSSLVSQQTGSPGKQPGENSDCHRDSSQAIPITELTKSQVQDKPYKCTDCGKSFNHNAHLTVHKRIHTGERPYMCKECGKAFSQNSSLVQHERIHTGDKPYKCAECGKSFCHSTHLTVHRRIHTGEKPYECQDCGRAFNQNSSLGRHKRTHTGEKPYTCSVCGKSFSRTTCLFLHLRTHTEERPYECNHCGKGFRHSSSLAQHQRKHAGEKPFECRQRLIFEQTPALTKHEWTEALGCDPPLSQDERTHRSDRPFKCNQCGKCFIQSSHLIRHQITHTREEQPHGRSRRREQSSSRNSHLVQHQHPNSRKSSAGGAKAGQPESRALALFDIQKIMQEKNPVHVIGVEEPSVGASMLFDIREST

SEQ ID NO: 48214 - protein, 129 aa, Homo sapiens
MMMHGRNNGKKLMTVRIVKHAFEIIHLLTGENPLQVLVNAIINSGPREDSTRIGRAGTVRRQAVDVSPLRRVNQAIWLLCTGAREAAFRNIKTIAECLADELINAAKGSSNSYAIKKKDELERVAKSNR

SEQ ID NO: 48215 - protein, 589 aa, Homo sapiens
MCGPFLKDILHLAEHQGTQSEEKPYTCGACGRDFWLNANLHQHQKEHSGGKPFRWYKDRDALMKSSKVHLSENPFTCREGGKVILGSCDLLQLQAVDSGQKPYSNLGQLPEVCTTQKLFECSNCGKAFLKSSTLPNHLRTHSEEIPFTCPTGGNFLEEKSILGNKKFHTGEIPHVCKECGKAFSHSSKLRKHQKFHTEVKYYECIACGKTFNHKLTFVHHQRIHSGERPYECDECGKAFSNRSHLIRHEKVHTGERPFECLKCGRAFSQSSNFLRHQKVHTQVRPYECSQCGKSFSRSSALIQHWRVHTGERPYECSECGRAFNNNSNLAQHQKVHTGERPFECSECGRDFSQSSHLLRHQKVHTGERPFECCDCGKAFSNSSTLIQHQKVHTGQRPYECSECRKSFSRSSSLIQHWRIHTGEKPYECSECGKAFAHSSTLIEHWRVHTKERPYECNECGKFFSQNSILIKHQKVHTGEKPYKCSECGKFFSRKSSLICHWRVHTGERPYECSECGRAFSSNSHLVRHQRVHTQERPYECIQCGKAFSERSTLVRHQKVHTRERTYECSQCGKLFSHLCNLAQHKKIHT

SEQ ID NO: 48216 - protein, 116 aa, Homo sapiens
MDIITICKDKLPNYEEKIKMFYEEHLHLDDEIRYILDGSGYFDVRDKEDQWIRIFMEKGDMVTLPAGIYHRFTVDEKNYTKAMRLFVGEPVWTAYNRPADHFEARGQYVKFLAQTA

SEQ ID NO: 48217 - protein, 1644 aa, Homo sapiens
MWACYKGRTDVVELLLSHGANPSVTGLYSVYPIIWAAGRGHADIVHLLLQNGAKVNCSDKYGTTPLVWAARKGHLECVKHLLAMGADVDQEGANSMTALIVAVKGGYTQSVKEILKRNPNVNLTDKDGNTALMIASKEGHTEIVQDLLDAGTYVNIPDRSGDTVLIGAVRGGHVEIVRALLQKYADIDIRGQDNKTALYWAVEKGNATMVRDILQCNPDTEICTKDGETPLIKATKMRNIEVVELLLDKGAKVSAVDKKGDTPLHIAIRGRSRKLAELLLRNPKDGRLLYRPNKAGETPYNIDCSHQKSILTQIFGARHLSPTETDGDMLGYDLYSSALADILSEPTMQPPICVGLYAQWGSGKSFLLKKLEDEMKTFAGQQIEPLFQFSWLIVFLTLLLCGGLGLLFAFTVHPNLGIAVSLSFLALLYIFFIVIYFGGRREGESWNWAWVLSTRLARHIGYLELLLKLMFVNPPELPEQTTKALPVRFLFTDYNRLSSVGGETSLAEMIATLSDACEREFGFLATRLFRVFKTEDTQGKKKWKKTCCLPSFVIFLFIIGCIISGITLLAIFRVDPKHLTVNAVLISIASVVGLAFVLNCRTWWQVLDSLLNSQRKRLHNAASKLHKLKSEGFMKVLKCEVELMARMAKTIDSFTQNQTRLVVIIDGLDACEQDKVLQMLDTVRVLFSKGPFIAIFASDPHIIIKAINQNLNSVLRDSNINGHDYMRNIVHLPVFLNSRGLSNARKFLVTSATNGDVPCSDTTGIQEDADRRVSQNSLGEMTKLGSKTALNRRDTYRRRQMQRTITRQMSFDLTKLLVTEDWFSDISPQTMRRLLNIVSVTGRLLRANQISFNWDRLASWINLTEQWPYRTSWLILYLEETEGIPDQMTLKTIYERISKNIPTTKDVEPLLEIDGDIRNFEVFLSSRTPVLVARDVKVFLPCTVNLDPKLREIIADVRAAREQISIGGLAYPPLPLHEGPPRAPSGYSQPPSVCSSTSFNGPFAGGVVSPQPHSSYYSGMTGPQHPFYNRPFFAPYLYTPRYYPGGSQHLISRPSVKTSLPRDQNNGLGSGPAPGPVVLLNSLNVDAVCEKLKQIEGLDQSMLPQYCTTIKKANINGRVLAQCNIDELKKEMNMNFGDWHLFRSTVLEMRNAESHVVPEDPRFLSESSSGPAPHGEPARRASHNELPHTELSSQTPYTLNFSFEELNTLGLDEGAPRHSNLSWQSQTRRTPSLSSLNSQDSSIEISKLTDKVQAEYRDAYREYIAQMSQLEGGPGSTTISGRSSPHSTYYMGQSSSGGSIHSNLEQEKGKDSEPKPDDGRKSFLMKRGDVIDYSSSGVSTNDASPLDPITEEDEKSDQSGSKLLPGKKSSERSSLFQTDLKLKGSGLRYQKLPSDEDESGTEESDNTPLLKDDKDRKAEGKVERVPKSPEHSAEPIRTFIKAKEYLSDALLDKKDSSDSGVRSSESSPNHSLHNEVADDSQLEKANLIELEDDSHSGKRGIPHSLSGLQDPIIARMSICSEDKKSPSECSLIASSPEENWPACQKAYNLNRTPSTVTLNNNSAPANRANQNFDEMEGIRETSQVILRPSSSPNPTTIQNENLKSMTHKRSQRSSYTRLSKDPPELHAAASSESTGFGEERESIL

SEQ ID NO: 48218 - protein, 46 aa, Homo sapiens
MIIIGVENMHNYCFVFALGYLTVCQVTRVYIFDYGQYSADFSGSLG

SEQ ID NO: 48219 - protein, 84 aa, Homo sapiens
MYDLDGNGYISRSEMLEIVQAIYKMVSSVMKMPEDESTPEKRTDKIFRQMDTNNDVSLGKPPMVTRCPNLPPGLALPTSSEGIF

SEQ ID NO: 48220 - protein, 97 aa, Homo sapiens
MLVGRYPFHDIEPSSLFSKIRRGQFNIPETLSPKAKCLIRSILRREPSERLTSQEILDHPWFSTDFSVSNSAYGAKEVSDQLVPDVNMEENLDPFFN

SEQ ID NO: 48221 - protein, 899 aa, Homo sapiens
MSKQFLQSKNEGDKYKFFMKATQLEQMKEDYSYIMETKERTKEQIHQGEERLTELKRQCVEKEERFQSIAGLSTMKTNLESLKHEMAWAVVNEIEKQLNAIRDNIKIGEDRAARLDRKMEEQQVRLNEAEQKYKDIQDKLEKISEETNARAPECMALKADVVAKKRAYNEAEVLYNRSLNEYKALKKDDEQLCKRIEELKKSTDQSLEPERLERQKKISWLKERVKAFQNQENSVNQEIEQFQQAIEKDKEEHGKIKREELDVKHALSYNQRQLKELKDSKTDRLKRFGPNVPALLEAIDDAYRQGHFTYKPVGPLGACIHLRDPELALAIESCLKGLLQAYCCHNHADERVLQALMKRFYLPGTSRPPIIVSEFRNEIYDVRHRAAYHPDFPTVLTALEIDNAVVANSLIDMRGIETVLLIKNNSVARAVMQSQKPPKNCREAFTADGDQVFAGRYYSSENTRPKFLSRDVDSEISDLENEVENKTAQILNLQQHLSALEKDIKHNEELLKRCQLHYKELKMKIRKNISEIRELENIEEHQSVDIATLEDEAQENKSKMKMVEEHMEQQKENMEHLKSLKIEAENKYDAIKFKINQLSELADPLKDELNLADSEVDNQKRGKRHYEEKQKEHLDTLNKKKRELDMKEKELEEKMSQARQICPERIEVEKSASILDKEINRLRQKIQAEHASHGDREEIMRQYQEARETYLDLDSKVRTLKKFIKLLGEIMEHRFKTYQQFRRCLTLRCKLYFDNLLSQRAYCGKMNFDHKNETLSISVQPGEGNKAAFNDMRALSGGERSFSTVCFILSLWSIAESPFRCLDEFDVYMDMVNRRIAMDLILKMADSQRFRQFILLTPQSMSSLPSSKLIRILRMSDPERGQTTLPFRPVTQEEDDDQR

SEQ ID NO: 48222 - protein, 1669 aa, Homo sapiens
MAQFPTAMNGGPNMWAITSEERTKHDRQFDNLKPSGGYITGDQARNFFLQSGLPAPVLAEIWALSDLNKDGKMDQQEFSIAMKLIKLKLQGQQLPVVLPPIMKQPPMFSPLISARFGMGSMPNLSIPQPLPPAAPITSLSSATSGTNLPPLMMPTPLVPSVSTSSLPNGTASLIQPLPIPYSSSTLPHGSSYSLMMGGFGGASIQKAQSLIDLGSSSSTSSTASLSGNSPKTGTSEWAVPQPTRLKYRQKFNTLDKSMSGYLSGFQARNALLQSNLSQTQLATIWTLADVDGDGQLKAEEFILAMHLTDMAKAGQPLPLTLPPELVPPSFRGGKQIDSINGTLPSYQKMQEEEPQKKLPVTFEDKRKANYERGNMELEKRRQALMEQQQREAERKAQKEKEEWERKQRELQEQEWKKQLELEKRLEKQRELERQREEERRKDIERREAAKQELERQRRLEWERIRRQELLNQKNREQEEIVRLNSKKKNLHLELEALNGKHQQISGRLQDVRLKKQTQKTELEVLDKQCDLEIMEIKQLQQELQEYQNKLIYLVPEKQLLNERIKNMQFSNTPDSGVSLLHKKSLEKEELCQRLKEQLDALEKETASKLSEMDSFNNQLKELRETYNTQQLALEQLYKIKRDKLKEIERKRLELMQKKKLEDEAARKAKQGKENLWKENLRKEEEEKQKRLQEEKTQEKIQEEERKAEEKQRKDKDTLKAEEKKRETASVLVNYRALYPFEARNHDEMSFNSGDIIQVDEKTVGEPGWLYGSFQGNFGWFPCNYVEKMPSSENEKAVSPKKALLPPTVSLSATSTSSEPLSSNQPASVTDYQNVSFSNLTVNTSWQKKSAFTRTVSPGSVSPIHGQGQVVENLKAQALCSWTAKKDNHLNFSKHDIITVLEQQENWWFGEVHGGRGWFPKSYVKIIPGSEVKREEPEALYAAVNKKPTSAAYSVGEEYIALYPYSSVEPGDLTFTEGEEILVTQKDGEWWTGSIGDRSGIFPSNYVKPKDQESFGSASKSGASNKKPEIAQVTSAYVASGSEQLSLAPGQLILILKKNTSGWWQGELQARGKKRQKGWFPASHVKLLGPSSERATPAFHPVCQVIAMYDYAANNEDELSFSKGQLINVMNKDDPDWWQGEINGVTGLFPSNYVKMTTDSDPSQQWCADLQTLDTMQPIERKRQGYIHELIQTEERYMADLQLVVEVFQKRMAESGFLTEGEMALIFVNWKELIMSNTKLLKALRVRKKTGGEKMPVQMIGDILAAELSHMQAYIRFCSCQLNGAALLQQKTDEDTDFKEFLKKLASDPRCKGMPLSSFLLKPMQRITRYPLLIRSILENTPESHADHSSLKLALERAEELCSQVNEGVREKENSDRLEWIQAHVQCEGLAEQLIFNSLTNCLGPRKLLHSGKLYKTKSNKELHGFLFNDFLLLTYMVKQFAVSSGSEKLFSSKSNAQFKMYKTPIFLNEVLVKLPTDPSSDEPVFHISHIDRVYTLRTDNINERTAWVQKIKAASEQYIDTEKKKREKAYQARSQKTSGIGRLMVHVIEATELKACKPNGKSNPYCEISMGSQSYTTRTIQDTLNPKWNFNCQFFIKDLYQDVLCLTLFDRDQFSPDDFLGRTEIPVAKIRTEQESKGPMTRRLLLHEVPTGEVWVRFDLQLFEQKTLL

SEQ ID NO: 48223 - protein, 126 aa, Homo sapiens [sequence omitted]

SEQ ID NO: 48224 - protein, 1435 aa, Homo sapiens
MREKGRRKKGRTWAEAAKTVLEKYPNTPMSHKEILQVIQREGLKEISSGTSPLACLNAMLHTNSRGEEGIFYKVPGRMGVYTLKKDVPDGVKELSEGSEESSDGQSDSQSSENSSSSSDGGSNKEGKKSRWKRKVSSSSPQSGCPSPTIPAGKVISPSQKHSKKALKQALKQQQQKKQQQQCRPSISISSNQHLSLKTVKAASDSVPAKPATWEGKQSDGQTGSPQNSNSSFSSSVKVENTLLGLGKKSFQRSERLHTRQMKRTKCADIDVETPDSILVNTNLRALINKHTFSVLPGDCQQRLLLLLPEVDRQVGPDGLMKLNGSALNNEFFTSAAQGWKERLSEGEFTPEMQVRIRQEIEKEKKVEPWKEQFFESYYGQSSGLSLEDSKKLTASPSDPKVKKTPAEQPKSMPVSEASLIRIVPVVSQSECKEEALQMSSPGRKEECESQGEVQPNFSTSSEPLLSSALNTHELSSILPIKCPKDEDLLEQKPVTSAEQESEKNHLTTASNYNKSESQESLVTSPSKPKSPGVEKPIVKPTAGAGPQETNMKEPLATLVDQSPESLKRKSSLTQEEAPVSWEKRPRVTENRQHQQPFQVSPQPFLNRGDRIQVRKVPPLKIPVSRISPMPFHPSQVSPRARFPVSITSPNRTGARTLADIKAKAQLVKAQRAAAAAAAAAAAAASVGGTIPGPGPGGGQGPGEGGEGQTARGGSPGSDRVSETGKGPTLELAGTGSRGGTRELLPCGPETQPQSETKTTPSQAQPHSVSGAQLQQTPPVPPTPAVSGACTSVPSPAHIEKLDNEKLNPTRATATVASVSHPQGPSSCRQEKAPSPTGPALISGASPVHCAADGTVELKAGPSKNIPNPSASSKTDASVPVAVTPSPLTSLLTTATLEKLPVPQVSATTAPAGSAPPSSTLPAASSLKTPGTSLNMNGPTLRPTSSIPANNPLVTQLLQGKDVPMEQILPKPLTKVEMKTVPLTAKEERGMGALIATNTTENSTREEVNERQSHPATQQQLGKTLQSKQLPQVPRPLQLFSAKELRDSSIDTHQYHEGLSKATQDQILQTLIQRVRRQNLLSVVPPSQFNFAHSGFQLEDISTSQRFMLGFAGRRTSKPAMAGHYLLNISTYGRGSESFRRTHSVNPEDRFCLSSPTEALKMGYTDCKNATGESSSSKEDDTDEESTGDEQESVTVKEEPQVSQSAGKGDTSSGPHSRETLSTSDCLASKNVKAEIPLNEQTTLSKENYLFTRGQTFDEKTLARDLIQAAQKQMAHAVRGKAIRSSPELFSSTVLPLPADSPTHQPLLLPPLQTPKLYGSPTQIGPSYRGMINVSTSSDMDHNSAVPGSQVSSNVGDVMSFSVTVTTIPASQAMNPSSHGQTIPVQAFSEENSIEGTPSKCYCRLKAMIMCKGCGAFCHDDCIGPSKLCVSCLVVR

SEQ ID NO: 48225 - protein, 901 aa, Homo sapiens
MEWRCCQGYGGDDCAESPAPALGPASSTPRPLARPARPNLSGSSAGSPLSGLGGEGPGESEKVQQLEEQVQSLTKELQGLRGVLQGLSGRLAEDVQRAVETAFNGRQQPADAAARPGVHETLNEIQHQLQLLDTRVSTHDQELGHLNNHHGGSSSSGGSRAPAPASAPPGPSEELLRQLEQRLQESCSVCLAGLDGFRRQQQEDRERLRAMEKLLASVEERQRHLAGLAVGRRPPQECCSPELGRRLAELERRLDVVAGSVTVLSGRRGTELGGAAGQGGHPPGYTSLASRLSRLEDRFNSTLGPSEEQEESWPGAPGGLSHWLPAARGRLEQLGGLLANVSGELGGRLDLLEEQVAGAMQACGQLCSGAPGEQDSQVSEILSALERRVLDSEGQLRLVGSGLHTVEAAGEARQATLEGLQEVVGRLQDRVDAQDETAAEFTLRLNLTAARLGQLEGLLQAHGDEGCGACGGVQEELGRLRDGVERCSCPLLPPRGPGAGPGVGGPSRGPLDGFSVFGGSSGSALQALQGELSEVILSFSSLNDSLNELQTTVEGQGADLADLGATKDRIISEINRLQQEATEHATESEERFRGLEEGQAQAGQCPSLEGRLGRLEGVCERLDTVAGGLQGLREGLSRHVAGLWAGLRETNTTSQMQAALLEKLVGGQAGLGRRLGALNSSLQLLEDRLHQLSLKDLTGPAGEAGPPGPPGLQGPPGPAGPPGSPGKDGQEGPIGPPGPQGEQGVEGAPAAPVPQVAFSAALSLPRSEPGTVPFDRVLLNDGGYYDPETGVFTAPLAGRYLLSAVLTGHRHEKVEAVLSRSNQGVARVDSGGYEPEGLENKPVAESQPSPGTLGVFSLILPLQAGDTVCVDLVMGQLAHSEEPLTIFSGALLYGDPELEHA

SEQ ID NO: 48226 - protein, 251 aa, Homo sapiens
MQAALLEKLVGGQAGLGRRLGALNSSLQLLEDRLHQLSLKDLTGEGTKGPAGEAGPPGPPGLQGPPGPAGPPGSPGKDGQEGPIGPPGPQGEQGVEGAPAAPVPQVAFSAALSLPRSEPGTVPFDRVLLNDGGYYDPETGVFTAPLAGRYLLSAVLTGHRHEKVEAVLSRSNQGVARVDSGGYEPEGLENKPVAESQPSPGTLGVFSLILPLQAGDTVCVDLVMGQLAHSEEPLTIFSGALLYGDPELEHA

SEQ ID NO: 48227 - protein, 609 aa, Homo sapiens
MDYVVFVLLLVLSLAIGLYHACRGWGRHTVGELLMADRKMGCLPVALSLLATFQSAVAILGVPSEIYRFGTQYWFLGCCYFLGLLIPAHIFIPVFYRLHLTSAYEYLELRFNKTVRVCGTVTFIFQMVIYMGVVLYAPSLALNAVTGFDLWLSVLALGIVCTVYTALGGLKAVIWTDVFQTLVMFLGQLAVIIVGSAKVGGLGRVWAVASQHGRISGFELDPDPFVRHTFWTLAFGGVFMMLSLYGVNQAQVQRYLSSRTEKAAVLSCYAVFPFQQVSLCVGCLIGLVMFAYYQEYPMSIQQAQAAPDQFVLYFVMDLLKGLPGLPGLFIACLFSGSLSTISSAFNSLATVTMEDLIRPWFPEFSEARAIMLSRGLAFGYGLLCLGMAYISSQMGPVLQAAISIFGMVGGPLLGLFCLGMFFPCANPPGAVVGLLAGLVMAFWIGIGSIVTSMGSSMPPSPSNGSSFSLPTNLTVATVTTLMPLTTFSKPTGLQRFYSLSYLWYSAHNSTTVIVVGLIVSLLTGRMRGRSLNPATIYPVLPKLLSLLPLSCQKRLHCRSYGQDHLDTGLFPEKPRNGVLGDSRDKEAMALDGTAYQGSSSTCILQETSL

SEQ ID NO: 48228 - protein, 140 aa, Homo sapiens
MSIPSSVIHPAMVRLGLQYSQGLVSGSNARCIALLRALQQVIQDYTTPPNEELSRDLVNKLKPYMSFLTQCRPLSASMHNAIKFLNKEITSVGSSKREEEACHHTHIQAPGMIIRGIKVSISCSLRILLHLGQVRTSSSH

SEQ ID NO: 48229 - protein, 450 aa, Homo sapiens
MDTEEGVEVVWNEVQFSERKNYKLQEEKVRAVFDNLIQLEHLNIVKFHKYWADIKENKARVIFITEYMSSGSLKQFLKKTKKNHKTMNEKAWKRWCTQILSALSYLHSCDPPIIHGNLTCDTIFIQHNGLIKIGSVAPDTINNHVKTCREEQKNLHFFAPEYGEVTNVTTAVDIYSFGMCALEMAVLEIQGNGESSYVPQEAISSAIQLLEDPLQREFIQKCLQSEPARRPTARELLFHPALFEVPSLKLLAAHCIVGHQHMIPENALEEITKNMDTSAVLAEIPAGPGREPVQTLYSQSPALELDKFLEDVRNGIYPLTAFGLPRPQQPQQEEVTSPVVPPSVKTPTPEPAEVETRKVVLMQCNIESVEEGVKHHLTLLLKLEDKLNRHLSCDLMPNENIPELAAELVQLGFISEADQSRLTSLLEETLNKFNFARNSTLNSAAVTVSS

SEQ ID NO: 48230 - protein, 218 aa, Homo sapiens [sequence omitted]

SEQ ID NO: 48231 - protein, 488 aa, Homo sapiens [sequence omitted]

SEQ ID NO: 48232 - protein, 16 aa, Homo sapiens
MKQRVLFVEKKKIRSL

SEQ ID NO: 48233 - protein, 46 aa, Homo sapiens
MVSEAGTGFCFNTKRNRLREKLTLLHYDPVVKQRVLFVEKKKIRSL

SEQ ID NO: 48234 - protein, 299 aa, Homo sapiens
MTEAEVRGLCIKSREIFLSQPILLELEAPLKICGDIHGQYTDLLRLFEYGGFPPEANYLFLGDYVDRGKQSLETICLLLAYKIKYPENFFLLRGNHECASINRIYGFYDECKRRFNIKLWKTFTDCFNCLPIAAIVDEKIFCCHGGLSPDLQSMEQIRRIMRPTDVPDTGLLCDLLWSDPDKDVQGWGENDRGVSFTFGADVVSKFLNRHDLDLICRAHQVVEDGYEFFAKRQLVTLFSAPNYCGEFDNAGGMMSVDETLMCSFQILKPSEKKAKYQYGGLNSGRPVTPPRTANPPKKR

SEQ ID NO: 48235 - protein, 98 aa, Homo sapiens
MFGVKVIITGDAFVPGERSVIIMNHRTRMDWMFLWNCLMRYSYLRLEKICLKASLKGVPGFAQSHLKPNDTGILQQDCCCKNVIKLPVIRVFKSLRGN

SEQ ID NO: 48236 - protein, 793 aa, Homo sapiens
MTQNIFNSTTTAEEKIDSYLEKQVVTFLDYSTDLDTTERQQLIFLLGVSSLQLFVQSNWTGPPVDLHPQDFLSSVLFQQFSEVKGLDAFVLSLLTLDGESIYSLTSKPILLLLARIILVNVRHKLTAIQSLPWWTLRCVNIHQHLLEERSPLLFTLAENCIDQVMKLQNLFVDDSGRYLAIQFHLECAYVFLYYYEYRKAKDQLDIAKDISQLQIDLTGALGKRTRFQENYVAQLILDVRREGDVLSNCEFTPAPTPQEHLTKNLELNDDTILNDIKLADCEQFQMPDLCAEEIAIILGICTNFQKNNPVHTLTEVELLAFTSCLLSQPKFWAIQTSALILRTKLEKGSTRRVERAMRQTQALADQFEDKTTSVLERLKIFYCCQVPPHWAIQRQLASLLFELGCTSSALQIFEKLEMWEDVVICYERAGQHGKAEEILRQELEKKETPSLYCLLGDVLGDHSCYDKAWELSRYRSARAQRSKALLHLRNKEFQECVECFERSVKINPMQLGVWFSLGCAYLALEDYQGSAKAFQRCVTLEPDNAEAWNNLSTSYIRLKQKVKAFRTLQEALKCNYEHWQIWENYILTSTDVGEFSEAIKAYHRLLDLRDKYKDVQVLKILVRAVIDGMTDRSGDVATGLKGKLQELFGRVTSRVTNDGEIWRLYAHVYGNGQSEKPDENEKAFQCLSKAYKCDTQSNCWEKDITSFKEVVQRALGLAHVAIKCSKNKSSSQEAVQMLSSVRLNLRGLLSKAKQLFTDVATGEMSRELADDITAMDTLVTELQDLSNQFRNQY

SEQ ID NO: 48237 - protein, 1390 aa, Homo sapiens
MCLLFFFSLPPLLVSNHTGRIKVVFTPSICKVTCTKGSCQNSCEKGNTTTLISENGHAADTLTATNFRVVICHLPCMNGGQCSSRDKCQCPPNFTGKLCQIPVHGASVPKLYQHSQQPGKALGTHVIHSTHTLPLTVTSQQGVKVKFPPNIVNIHVKHPPEASVQIHQVSRIDGPTGQKTKEAQPGQSQVSYQGLPVQKTQTIHSTYSHQQVIPHVYPVAAKTQLGRCFQETIGSQCGKALPGLSKQEDCCGTVGTSWGFNKCQKCPKKPSYHGYNQMMECLPGYKRVNNTFCQDINECQLQGVCPNGECLNTMGSYRCTCKIGFGPDPTFSSCVPDPPVISEEKGPCYRLVSSGRQCMHPLSVHLTKQLCCCSVGKAWGPHCEKCPLPGTAAFKEICPGGMGYTVSGVHRRRPIHHHVGKGPVFVKPKNTQPVAKSTHPPPLPAKEEPVEALTFSREHGPGVAEPEVATAPPEKEIPSLDQEKTKLEPGQPQLSPGISTIHLHPQFPVVIEKTSPPVPVEVAPEASTSSASQVIAPTQVTEINECTVNPDICGAGHCINLPVRYTCICYEGYRFSEQQRKCVDIDECTQVQHLCSQGRCENTEGSFLCICPAGFMASEEGTNCIDVDECLRPDVCGEGHCVNTVGAFRCEYCDSGYRMTQRGRCEDIDECLNPSTCPDEQCVNSPGSYQCVPCTEGFRGWNGQCLDVDECLEPNVCANGDCSNLEGSYMCSCHKGYTRTPDHKHCRDIDECQQGNLCVNGQCKNTEGSFRCTCGQGYQLSAAKDQCEDIDECQHRHLCAHGQCRNTEGSFQCVCDQGYRASGLGDHCEDINECLEDKSVCQRGDCINTAGSYDCTCPDGFQLDDNKTCQDINECEHPGLCGPQGECLNTEGSFHCVCQQGFSISADGRTCEDIDECVNNTVCDSHGFCDNTAGSFRCLCYQGFQAPQDGQGCVDVNECELLSGVCGEAFCENVEGSFLCVCADENQEYSPMTGQCRSRTSTDLDVDVDQPKEEKKECYYNLNDASLCDNVLAPNVTKQECCCTSGVGWGDNCEIFPCPVLGTAEFTEMCPKGKGFVPAGESSSEAGGENYKDADECLLFGQEICKNGFCLNTRPGYECYCKQGTYYDPVKLQCFDMDECQDPSSCIDGQCVNTEGSYNCFCTHPMVLDASEKRCIRPAESNEQIEETDVYQDLCWEHLSDEYVCSRPLVGKQTTYTECCCLYGEAWGMQCALCPLKDSDDYAQLCNIPVTGRRQPYGRDALVDFSEQYTPEADPYFIQDRFLNSFEELQAEECGILNGCENGRCVRVQEGYTCDCFDGYHLDTAKMTCVDVNECDELNNRMSLCKNAKCINTDGSYKCLCLPGYVPSDKPNYCTPLNTALNLEKDSDLE

SEQ ID NO: 48238 - protein, 235 aa, Homo sapiens
MHSIIVSCVNDEPLFTADQVIEEIEEMMQESPDPEDDETPTQSDRLSMLSQEIQTLKRSSTGSYEERVKRLSVSELNEILEEIETAIKEYSEELVQQLALRDELEFEKEVKNSFISVLIEVQNKQKEHKETAKKKKKLKNGSSQNGKNERSHMPGTRFSMEGISNVIQNGLRHTFGNSGGEKQYLTTVIPYEKKNGPPSVEDLQILTKILRAMKEDSEKVPSLLTDYILKVLCPT

SEQ ID NO: 48239 - protein, 208 aa, Homo sapiens
MHSIIVSCVNDEPLFTADQVIEEIEEMMQESPDPEDDETPTQSDRLSMLSQEIQTLKRSSTGSYEERVKRLSVSELNEILEEIETAIKEYSEELVQQLALRDELEFEKEVKNSFISVLIEVQNKQKEHKETAKKKKKLKNGSSQNGKNERSHMPGTYLTTVIPYEKKNGPPSVEDLQILTKILRAMKEDSEKVPSLLTDYILKVLCPT

SEQ ID NO: 48240 - protein, 160 aa, Homo sapiens
MHSIIVSCVNDEPLFTADQVIEEIEEMMQESPDPEDDETPTQSDRLSMLSQEIQTLKRSSTGSYEERVKRLSVSELNEILEEIETAIKEYSEELVQQLALRDELEFEKEVKNSFISVLIEVQNKQKEHKETAKKKKKLKNGSSQNGKNERSHMPGTFFVP

SEQ ID NO: 48241 - protein, 394 aa, Homo sapiens [sequence omitted]

SEQ ID NO: 48242 - protein, 30 aa, Homo sapiens
MLYRTTMALTVGGTIYCLIALYMASQPKNK

SEQ ID NO: 48243 - protein, 1078 aa, Homo sapiens
MPKHPNSLSGKGTQLVPSSHLPPPKLRIPNVFSISVALAKRHLSQPQLSSDRMFGTNRNAISMIRPLRPQETDLDLVDGDSTEVLENMDTSCDDGLFSYDSLDSPNSDDQEHCDSAKKVAYSKPPTPPLHRFPSWESRIYAVAKSGIRMSEAFNMESVNKNSAATLSYTTSGLYTSLIYKNMTTPVYTTLKGKATQISSSPFLDDSSGSEEEDSSRSSSRTSESDSRSRSGPGSPRAMKRGVSLSSVASESDYAIPPDAYSTDTEYSQPEQKLPKTCSSSSDNGKNEPLEKSGYLLKMSGKVKSWKRRWFVLKGGELLYYKSPSDVIRKPQGHIELSASCSILRGDNKQTVQLTTEKHTYYLTADSPNILEEWIKVLQNVLRVQAANPLSLQPEGKPTMKGLLTKVKHGYSKRVWCTLIGKTLYYFRSQEDKFPLGQIKLWEAKVEEVDRSCDSDEDYEASGRSLLSTHYTIVIHPKDQGPTYLLIGSKHEKDTWLYHLTVAAGSNNVNVGSEFEQLVCKLLNIDGEPSSQIWRHPTLCHSKEGIISPLTTLPSEALQTEAIKLFKTCQLFINAAVDSPAIDYHISLAQSALQICLTHPELQNEICCQLIKQTRRRQPQNQPGPLQGWQLLALCVGLFLPHHPFLWLLRLHLKRNADSRTEFGKYAIYCQRCVERTQQNGDREARPSRMEILSTLLRNPYHHSLPFSIPVHFMNGIYQVVGFDASTTVEEFLNTLNQDTGMRKPAQSGFALFTDDPSGRDLEHCLQGNIKICDIISKWEQASKEQQPGKCEGTRTVRLTYKNRLYFSVQARGETDREKLLLMYQTNDQIINGLFPLNKDLALEMAALLSQVEIGDFERPFSTPAGHVTNQCKVNQTLKQVIEKFYPKRYRDGCSEEQLRQLCQRLSTRWMALRGHSAADCVRIYLTVARKWPFFGAKLFLAKPITPSSLGSTFLWLAVHEDGLSLLEYNSMRLIVSYVYKSLMTFGGYQDDFMVVINNTHSKDKPTEKLLFAMAKPKILEITLLIASYINNFHQQKAAFHHLSAPALLSAQTRGPQARMMGSQPLLSSSRPTKGPTLL

SEQ ID NO: 48244 - protein, 530 aa, Homo sapiens [sequence omitted]

SEQ ID NO: 48245 - protein, 179 aa, Homo sapiens
MPGGGGNRRGSPSAAFTFPDTDDFGKLLLAEALLEQCLKENHAKIKDSMPLLEKNEPKMSEAKNYLSSILNHGRLSPQYMCEAMLILGKLHYVEGSYRDAISMYARAGIDDMSMENKPLYQMRLLSEAFVIKACLRLLGGTQSRWSEVLQGRPLSGTPTQLHRLPLPPDREGGGSDHLF

SEQ ID NO: 48246 - protein, 622 aa, Homo sapiens
MEKNTDYVYEALLNTDIDIDSLEADSHLDEVWIKEVITKAGMKLKWSKLKQDKVRKNKDAVRRPQADPALLTPRSPVVTIMGHVDHGKTTLLDKFRKTQVAAVETGGITQHIGAFLVSLPSGEKITFLDTPGHAAFSAMRARGAQVTDIVVLVVAADDGVMKQTVESIQHAKDAQVPIILAVNKCDKAEADPEKVKKELLAYDVVCEDYGGDVQAVPVSALTGDNLMALAEATVALAEMLELKADPNGPVEGTVIESFTDKGRGLVTTAIIQRGTLRKGSVLVAGKCWAKVRLMFDENGKTIDEAYPSMPVGITGWRDLPSAGEEILEVESEPRAREVVDWRKYEQEQEKGQEDLKIIEEKRKEHKEAHQKAREKYGHLLWKKRSILRFLERKEQIPLKPKEKRERDSNVLSVIIKGDVDGSVEAILNIIDTYDASHECELELVHFGVGDVSANDVNLAETFDGVIYGFNVNAGNVIQQSAAKKGVKIKLHKIIYRLVEDLQEELSSRLPCAVEEHPVGEASILATFSVTEGKKKVPVAGCRVQKGQLEKQKKFKLTRNGHVIWKGSLTSLKHHKDDISIVKTGMDCGLSLDEDNMEFQVGDRIVCYEEKQIQAKTSWDPGF

SEQ ID NO: 48247 - protein, 231 aa, Homo sapiens
MMVQKNIEMQLQAIRIIQERNGVLPDCLTDGSDVVSDLEHEEMKILREVLRKSKEEYDQEEERKRKKQLSEAKTEEPTVHSSEAAIMNNSQGDGEHFAHPPSEVKMHFANQSIEPLGRKVERSETSSLPQKDLKIPGLEHASIEGPIANLSVLGTEELRQREHYLKQKRDKLMSMRKDMRTKQIQNMEQKGKPTGEVEEMTEKPEMTAEEKQTLLKRRLLAEKLKEEVINK

SEQ ID NO: 48248 - protein, 640 aa, Homo sapiens
MPETSHLIDLPTCELNKLEEIADLVTSVLSSPIRREKLALALENEGYIKKLLQLFQACENLENTEGLHHLYEIIRGILFLNKATLFEVMFSDECIMDVVGCLEYDPALAQPKRHREFLTKTAKFKEVIPITDSELRQKIHQTYRVQYIQDIILPTPSVFEENFLSTLTSFIFFNKVEIVSMLQEDEKFLSEVFAQLTDEATDDDKRRELVNFFKEFCAFSQTLQPQNRDAFFKTLAKLGILPALEIVMGMDDLQVRSAATDIFSYLVEFSPSMVREFVMQEAQQSDDDILLINVVIEQMICDTDPELGGAVQLMGLLRTLIDPENMLATTNKTEKSEFLNFFYNHCMHVLTAPLLTNTSEDKCEKDNIVGSNKNNTICPGALRFMRRIIGLKDEFYNRYITKGNLFEPVINALLDNGTRYNLLNSAVIELFEFIRVEDIKSLTAHIVENFYKALESIEYVQTFKGLKTKYEQEKDRQNQKLNSVPSILRSNRFRRDAKALEEDEEMWFNEDEEEEGKAVVAPVEKPKPEDDFPDNYEKFMETKKAKESEDKENLPKRTSPGGFKFTFSHSASAANGTNSKSVVAQIPPATSNGSSSKTTNLPTSVTATKGSLVGLVDYPDDEEEDEEEESSPRKRPRLGS

SEQ ID NO: 48249 - protein, 693 aa, Homo sapiens
MPETSHLIDLPTCELNKLEEIADLVTSVLSSPIRREKLALALENEGYIKKLLQLFQACENLENTEGLHHLYEIIRGILFLNKATLFEVMFSDECIMDVVGCLEYDPALAQPKRHREFLTKTAKFKEVIPITDSELRQKIHQTYRVQYIQDIILPTPSVFEENFLSTLTSFIFFNKVEIVSMLQEDEKFLSEVFAQLTDEATDDDKRRELVNFFKEFCAFSQTLQPQNRDAFFKTLAKLGILPALEIVMGMDDLQVRSAATDIFSYLVEFSPSMVREFVMQEAQQSDDDILLINVVIEQMICDTDPELGGAVQLMGLLRTLIDPENMLATTNKTEKSEFLNFFYNHCMHVLTAPLLTNTSEDKCEKDNIVGSNKNNTICPDNYQTAQLLALILELLTFCVEHHTYHIKNYIMNKDLLRRVLVLMNSKHTFLALCALRFMRRIIGLKDEFYNRYITKGNLFEPVINALLDNGTRYNLLNSAVIELFEFIRVEDIKSLTAHIVENFYKALESIEYVQTFKGLKTKYEQEKDRQNQKLNSVPSILRSNRFRRDAKALEEDEEMWFNEDEEEEGKAVVAPVEKPKPEDDFPDNYEKFMETKKAKESEDKENLPKRTSPGGFKFTFSHSASAANGTNSKSVVAQIPPATSNGSSSKTTNLPTSVTATKGSLVGLVDYPDDEEEDEEEESSPRKRPRLGS

SEQ ID NO: 48250 - protein, 725 aa, Homo sapiens
MPETSHLIDLPTCELNKLEEIADLVTSVLSSPIRREKLALALENEGYIKKLLQLFQACENLENTEGLHHLYEIIRGILFLNKATLFEVMFSDECIMDVVGCLEYDPALAQPKRHREFLTKTAKFKEVIPITDSELRQKIHQTYRVQYIQDIILPTPSVFEENFLSTLTSFIFFNKVEIVSMLQEDEKFLSEVFAQLTDEATDDDKRRELVNFFKEFCAFSQTLQPQNRDAFFKTLAKLGILPALEIVMGMDDLQVRSAATDIFSYLVEFSPSMVREFVMQEAQQSDDDILLINVVIEQMICDTDPELGGAVQLMGLLRTLIDPENMLATTNKTEKSEFLNFFYNHCMHVLTAPLLTNTSEDKCEKDFFLKHYRYSWSFICTPSHSHSHSTPSSSISQDNIVGSNKNNTICPDNYQTAQLLALILELLTFCVEHHTYHIKNYIMNKDLLRRVLVLMNSKHTFLALCALRFMRRIIGLKDEFYNRYITKGNLFEPVINALLDNGTRYNLLNSAVIELFEFIRVEDIKSLTAHIVENFYKALESIEYVQTFKGLKTKYEQEKDRQNQKLNSVPSILRSNRFRRDAKALEEDEEMWFNEDEEEEGKAVVAPVEKPKPEDDFPDNYEKFMETKKAKESEDKENLPKRTSPGGFKFTFSHSASAANGTNSKSVVAQIPPATSNGSSSKTTNLPTSVTATKGSLVGLVDYPDDEEEDEEEESSPRKRPRLGS

SEQ ID NO: 48251 - protein, 741 aa, Homo sapiens
MNFPLGDILIFIEHKRKQCNGSLCLEKAVDKPPSPSPIEMKKASNPVEVGIQVTPEDDDCLSTSSRGICPKQEHIAGKDEPSSYTCTTCKQPFTSAWFLLQHAQNTHGLRIYLESEHGSPLTPRVGIPSGLGAECPSQPPLHGIHIADNNPFNLLRIPGSVSREASGLAEGRFPPTPPLFSPPPRHHLDPHRIERLGAEEMALATHHPSAFDRVLRLNPMAMEPPAMDFSRRLRELAGNTSSPPLSPGRPSPMQRLLQPFQPGSKPPFLATPPLPPLQSAPPPSQPPVKSKSCEFCGKTFKFQSNLVVHRRSHTGEKPYKCNLCDHACTQASKLKRHMKTHMHKSSPMTVKSDDGLSTASSPEPGTSDLVGSASSALKSVVAKFKSENDPNLIPENGDEEEEEDDEEEEEEEEEEEEELTESERVDYGFGLSLEAARHHENSSRGAVVGVGDESRALPDVMQGMVLSSMQHFSEAFHQVLGEKHKRGHLAEAEGHRDTCDEDSVAGESDRIDDGTVNGRGCSPGESASGGLSKKLLLGSPSSLSPFSKRIKLEKEFDLPPAAMPNTENVYSQWLAGYAASRQLKDPFLSFGDSRQSPFASSSEHSSENGSLRFSTPPGELDGGISGRSGTGSGGSTPHISGPGPGRPSSKEGRRSDTCEYCGKVFKNCSNLTVHRRSHTGERPYKCELCNYACAQSSKLTRHMKTHGQVLHTPPFGVVPRELKMCGSFRMEAREPLSSEKI

SEQ ID NO: 48252 - protein, 130 aa, Homo sapiens
MKPFGVFEDEEELNHRLVVLGKLNNLVKEWISDVSESKNLPPSVVATVGGKIFTFGSYRLGVHTKGADIDALCVAPRHVERSDFFQSFFEKLKHQDGIRNLRAVEDAFVPVIKFEFDGIEVVELLMKFCI

SEQ ID NO: 48253 - protein, 499 aa, Homo sapiens
MPTLEPGNVISILISSEFLKMDSLVEQCIQYCHKNMNAIVATPCNMNCINANLLTRIADLFSHNEVDDLKDKKDKFKSKLFCKKIERLFDPEYLNPDSRSNAATLYRCCLCKKLLTKETERRIPCIPGKINVDRRGNIVYIHIRDKTWDVHEYLNSLFEELKSWRDVYWRLWGTINWLTCSRCYQAFLCIEFSHCQYHSETVVYPTAASSLNTVGTGIYPCCNQKVLRFDPTQLTKGCKVRDHMVTLRDQGEGGDLPSCPTARMLDDLHKYRDVIVVPFSKDTVSDVGVGLCDEKGIECDVLLEPNTPWGPKTGELNAFLSLKNWTLQLKQQSLFSEEEEYTTGSEVTEDEVGDEEEVSKKQRKKEKPKKFTRQPKKQVSSPCAQRKEKALEKSASRDVSPFVMSMQKNKWDATRSLRFNQDAQREDDQRRMTEITGHLIKMRLGDLDRVKSKEAKEFAGGIYSRLEAQIKASVPVSARQSSSEKNTRSKSRFGQGRPA

SEQ ID NO: 48254 - protein, 1067 aa, Homo sapiens [sequence omitted]

SEQ ID NO: 48255 - protein, 483 aa, Homo sapiens
MDKMIQDGKGDVTITNDGATILKQMQVLHPAARMLVELSKAQDIEAGDGTTSVVIIAGSLLDSCTKLLQKGIHPTIISESFQKALEKGIEILTDMSRPVELSDRETLLNSATTSLNSKVVSQYSSLLSPMSVNAVMKVIDPATATSVDLRDIKIVKKLGGTIDDCELVEGLVLTQKVSNSGITRVEKAKIGLIQFCLSAPKTDMDNQIVVSDYAQMDRVLREERAYILNLVKQIKKTGCNVLLIQKSILRDALSDLALHFLNKMKIMVIKDIEREDIEFICKTIGTKPVAHIDQFTADMLGSAELAEEVNLNGSGKLLKITGCASPGKTVTIVVRGSNKLVIEEAERSIHDALCVIRCLVKKRALIAGGGAPEIELALRLTEYSRTLSGMESYCVRAFADAMEVIPSTLAENAGLNPISTVTELRNRHAQGEKTAGINVRKGGISNILEELVVQPLLVSVSALTLATETVRSILKIDDVVNTR

SEQ ID NO: 48256 - protein, 713 aa, Homo sapiens [sequence omitted]

SEQ ID NO: 48257 - protein, 844 aa, Homo sapiens
MPIHEFSENVDSLTSFKSIKNGNDKDITAELSAPVKGQSDVLLSTTSKEIISSEMLATSIDGMERPGNLNKVVEQRQNVGTLESFSPGDFRTNMNVVHQNKQLESCNGEKPPCLEILTNGFAVLETVNPQGTDDLDNVADSKGRKPLSTHSTEYNLDSVPSPAEEFADFATFSKKERIQLEEIECAVLNDREALTIRENNKINRVNELNSVKEVALGRSLDNKGDTDGEDQVCVSEISIVTNRGFSVEKQGLPTLQQDEFLQSGVQSKAWSLVDSADNSEAIRREQCKTEEKLDLLTSKCAHLCMDSVKTSDDEVGSPKEESRKFTNFQSPNIDPTEENDLDDSLSVKNGDSSNDFVTCNDINEDDFGDFGDFGSASGSTPPFVTGTQDSMSDATFEESSEHFPHFSEPGDDFGEFGDINAVSCQEETILTKSDLKQTSDNLSEECQLARKSSGTGTEPVAKLKNGQEGEIGHFDSVPNIQDDCNGFQDSDDFADFSSAGPSQVVDWNAFEDEQKDSCSWAAFGDQQATESHHRKEAWQSHRTDENIDTPGTPKTHSVPSATSKGAVASGHLQESATSVQTALLNRLERIFEACFPSILVPDAEEEVTSLKHLLETSTLPIKTREALPESGELLDVWTELQDIHDAHGLRYQWGGSHSNKKLLSSLGIDTRNILFTGNKKQPVIVPMYAAGLGMLEPTKEPLKPLSAAEKIASIGQTATMSPDMNTCTSDQFQESLPPVQFDWSSSGLTNPLDGVDPELYELTTSKLEISTSSLKVTDAFARLMSTVEKTSTSTSRKPKREEHLSEEAIKVIAGLPDLTFMHAKVLMFPATLTPSTSSQEKADG

SEQ ID NO: 48258 - protein, 35 aa, Homo sapiens
MSMKMGWKAKSCLPVTVHPRCLTPYSARLSSTFPL

SEQ ID NO: 48259 - protein, 221 aa, Homo sapiens
MPRPYRQVSFPDDDEEIVRINPREKIWMTGYEDYRHAPVRGKYPDPSEDADSSYVRFAKGEVPKHDYNYPYVDSSDFGLGEDPKGRGGSVIKTQPSRGKSRRRKEDGERSRCVYCRDMFNHEENRRGHCQDAPDSVRTCIRRVSCMWCADSMLYHCMSDPEGDYTDPCSCDTSDEKFCLRWMALIALSFLAPCMCCYLPLRACYHCGVMCRCCGGKHKAAA

SEQ ID NO: 48260 - protein, 49 aa, Homo sapiens
MGFASFDSTKGKKVDGSVNAYAINVSQKRKYRQYMNRKGGFNRPLDFIA

SEQ ID NO: 48261 - protein, 348 aa, Homo sapiens
MIMDTAGNDPYCFVEFHEHRHAAAALAAMNGRKIMGKEVKVNWATTPSSQKKDTSSSTVVSTQRSQDHFHVFVGDLSPEITTEDIKAAFAPFGRISDARVVKDMATGKSKGYGFVSFFNKWDAENAIQQMGGQWLGGRQIRTNWATRKPPAPKSTYESNTKQLSYDEVVNQSSPSNCTVYCGGVTSGLTEQLMRQTFSPFGQIMEIRVFPDKGYSFVRFNSHESAAHAIVSVNGTTIEGHVVKCYWGKETLDMINPVQQNQIGYPQPYGQWGQWYGNAQQIGQYMPNGWQVPAYGMYGQAWNQQGFNQTQSSAPWMGPNYGVQPPQGQNGSMLPNQPSGYRVAGYETQ

SEQ ID NO: 48262 - protein, 338 aa, Homo sapiens
MIMDTAGNDPYCFVEFHEHRHAAAALAAMNGRKIMGKEVKVNWATTPSSQKKDTSNHFHVFVGDLSPEITTEDIKAAFAPFGRISDARVVKDMATGKSKGYGFVSFFNKWDAENAIQQMGGQWLGGRQIRTNWATRKPPAPKSTYESNTKQLSYDEVVNQSSPSNCTVYCGGVTSGLTEQLMRQTFSPFGQIMEIRVFPDKGYSFVRFNSHESAAHAIVSVNGTTIEGHVVKCYWGKETLDMINPVQQQNQIGYPQPYGQWGQWYGNAQQIGQYMPNGWQVPAYGMYGQAWNQQGFNQTQSSAPWMGPNYGVQPPQGQNGSMLPNQPSGYRVAGYETQ

SEQ ID NO: 48263 - protein, 349 aa, Homo sapiens
MIMDTAGNDPYCFVEFHEHRHAAAALAAMNGRKIMGKEVKVNWATTPSSQKKDTSSSTVVSTQRSQDHFHVFVGDLSPEITTEDIKAAFAPFGRISDARVVKDMATGKSKGYGFVSFFNKWDAENAIQQMGGQWLGGRQIRTNWATRKPPAPKSTYESNTKQLSYDEVVNQSSPSNCTVYCGGVTSGLTEQLMRQTFSPFGQIMEIRVFPDKGYSFVRFNSHESAAHAIVSVNGTTIEGHVVKCYWGKETLDMINPVQQQNQIGYPQPYGQWGQWYGNAQQIGQYMPNGWQVPAYGMYGQAWNQQGFNQTQSSAPWMGPNYGVQPPQGQNGSMLPNQPSGYRVAGYETQ

SEQ ID NO: 48264 - protein, 123 aa, Homo sapiens
MVKSLERENIRKMQGLMFRCSASCCEDSQASMKQVHQCIERCHVPLAQAQALVTSELEKFQDRLARCTMHCNDKAKDSIDAGSKELQVKQQLDSCVTKCVDDHMHLIPTMTKKMKEALLSIGK

SEQ ID NO: 48265 - protein, 144 aa, Homo sapiens
MVNRAKRKAGVDPLVPLRSLGLSLSGGDQEDAGRILIEELRDRFPYLSESYLITTDAAGSIATATPDGGVVLISGTGSNCRLINPDGSESGCGGWGHMMGDEGSAYWIAHQAVKIVFDSIDNLEAAPHDIGYVKQAMFHYFQIG

SEQ ID NO: 48266 - protein, 4007 aa, Homo sapiens
MDSSQTLDTSQTRFNVRTEDTEVTDFPSLEEGILTQSENQVKEPNRDLFCSPLLVIQDSFASPDLPLLTCLTQDQEFAPDSLFHQSELSFAPLRGIPDKSEDTEWSSRPSEVSEALFQATAEVASDLASSRFSVSQHPLIGSTAVGSQCPFLPSEQGNNEETISSVDELKIPKDCDRYDDLCSYMSWKTRKDTQWPENNLADKDQVSVATSFDITDENIATKRSDHFDAARSYGQYWTQEDSSKQAETYLTKGLQGKVESDVITLDGLNENAVVCSERVAELQRKPTRESEYHSSDLRMLRMSPDTVPKAPKHLKAGDTSKGGIAKVTQSNLKSGITTTPVDSDIGSHLSLSLEDLSQLAVSSPLETTTGQHTDTLNQKTLADTHLTEETLKVTAIPEPADQKTATPTVLSSSHSHRGKPSIFYQQGLPDSHLTEEALKVSAAPGLADQTTGMSTLTSTSYSHREKPGTFYQQELPESNLTEEPLEVSAAPGPVEQKTGIPTVSSTSHSHVEDLLFFYRQTLPDGHLTDQALKVSAVSGPADQKTGTATVLSTPHSHREKPGIFYQQEFADSHQTEETLTKVSATPGPADQKTEIPAVQSSSYSQREKPSILYPQDLADSHLPEEGLKVSAVAGPADQKTGLPTVPSSAYSHREKLLVFYQQALLDSHLPEEALKVSAVSGPADGKTGTPAVTSTSSASSSLGEKPSAFYQQTLPNSHLTEEALKVSIVPGPGDQKTGIPSAPSSFYSHREKPIIFSQQTLPDFLFPEEALKVSAVSVLAAQKTGTPTVSSNSHSHSEKSSVFYQQELPDSDLPRESLKMSAIPGLTDQKTVPTPTVPSGSFSHREKPSIFYQQEWPDSYATEKALKVSTGPGPADQKTEIPAVQSSSYPQREKPSVLYPQVLSDSHLPEESLKVSAFPGPADQMTDTPAVPSTFYSQREKPGIFYQQTLPESHLPKEALKISVAPGLADQKTGTPTVTSTSYSQHREKPSIFHQQALPGTHIPEEAQKVSAVTGPGNQKTWIPRVLSTFYSQREKPGIFYQQTLPGSHIPEEAQKVSPVLGPADQKTGTPTPTSASYSHTEKPGIFYQQVLPDNHPTEEALKISVASEPVDQTTGTPAVTSTSYSQYREKPSIFYQQSLPSSHLTEEAKNVSAVPGPADQKTVIPILPSTFYSHTEKPGVFYQQVLPHSHPTEEALKISVASEPVDQTTGTPTVTSTSYSQHTEKPSIFYQQSLPGSHLTEEAKNVSAVPGPGDRKTGIPTLPSTFYSHTEKPGSFYQQVLPHSHLPEEALEVSVAPGPVDQTIGTPTVTSPSSSFGEKPIVIYKQAFPEGHLPEESLKVSVAPGPVGQTTGAPTITSPSYSQHRAKSGSFYQLALLGSQIPEEALRVSSAPGPADQTTGIPTITSTSYSFGEKPIVNYKQAFPDGHLPEEALKVSIVSGPTEKKTDIPAGPLGSSALGEKPITFYRQALLDSPLNKEVVKVSAAPGPADQKTETLPVHSTSYSNRGKPVIFYQQTLSDSHLPEEALKVPPVPGPDAQKTETPSVSSSLYSYREKPIVFYQQALPDSELTQEALKVSAVPQPADQKTGLSTVTSSFYSHTEKPNISYQQELPDSHLTEEALKVSNVPGPADQKTGVSTVTSTSYSHREKPIVSYQRELPHFTEAGLKILRVPGPADQKTGINILPSNSYPQREHSVISYEQELPDLTEVTLKAIGVPGPADQKTGIQIASSSSYSNREKASIFHQQELPDVTEEALNVFVVPGQGDRKTEIPTVPLSYYSRREKPSVISQQELPDSHLTEEALKVSPVSIPAEQKTGIPIGLSSSYSHSHKEKLKISTVHIPDDQKTEFPAATLSSYSQIEKPKISTVIGPNDQKTPSQTAFHSSYSQTVKPNILFQQQLPDRDQSKGILKISAVPELTDVNTGKPVSLSSSYFHREKSNIFSPQELPGSHVTEDVLKVSTIPGPAGQKTVLPTALPSSFSHREKPDIFYQKDLPDRHLTEDALKISSALGQADQITGLQTVPSGTYSHGENHKLVSEHVQRLIDNLNSSDSSVSSNNVLLNSQADDRVVINKPESAGFRDVGSEEIQDAENSAKTLKEIRTLLMEAENMALKRCNFPAPLARFRDISDISFIQSKKVVCFKEPSSTGVSNGDLLHRQPFTEESPSSRCIQKDIGTQTNLKCRRGIENWEFISSTTVRSPLQEAESKVSMALEETLRQYQAAKSVMRSEPEGCSGTIGNKIIIPMMTVIKSDSSSDASDGNGSCSWDSNLPESLESVSDVLLNFFPYVSPKTSITDSREEEGVSESEDGGGSSVDSLAAHVKNLLQCESSLNHAKEILRNAEEEESRVRAHAWNMKFNLAHDCGYSISELNEDDRRKVEEIKAELFGHGRTTDLSKGLQSPRGMGCKPEAVCSHIIIESHEKGCFRTLTSEHPQLDRHPCAFRSAGPSEMTRGRQNPSSCRAKHVNLSASLDQNNSHFKVWNSLQLKSHSPFQNFIPDEFKISKGLRMPFDEKMDPWLSELVEPAFVPPKEVDFHSSSQMPSPEPMKKFTTSITFSSHRHSKCISNSSVVKVGVTEGSQCTGASVGVFNSHFTEEQNPPRDLKQKTSSPSSFKMHSNSQDKEVTILAEGRRQSQKLPVDFERSFQEEKPLERSDFTGSHSEPSTRANCSNFKEIQISDNHTLISMGRPSSTLGVNRSSSRLGVKEKNVTITPDLPSCIFLEQRELFEQSKAPRADDHVRKHHSPSPQHQDYVAPDLPSCIFLEQRELFEQCKAPYVDHQMRENHSPLPQGQDSIASDLPSPISLEQCQSKAPGVDDQMNKHHFPLPQGQDCVVEKNNQHKPKSHISNINVEAKFNTVVSQSAPNHCTLAASASTPPSNRKALSCVHITLCPKTSSKLDSGTLDERFHSLDAASKARMNSEFNFDLHTVSSRSLEPTSKLLTSKPVAQDQESLGFLGPKSSLDFQVVQPSLPDSNTITQDLKTIPSQNSQIVTSRQIQVNISDFEGHSNPEGTPVFADRLPEKMKTPLSAFSEKLSSDAVTQITTESPEKTLFSSEIFINAEDRGHEIIEPGNQKLRKAPVKFASSSSVQQVTFSRGTDGQPLLLPYKPSGSTKMYYVPQLRQIPPSPDSKSDTTVESSHSGSNDAIAPDFPAQVLGTRDDDLSATVNIKHKEGIYSKRVVTKASLPVGEKPLQNENADASVQVLITGDENLSDKKQQEIHSTRAVTEAAQAKEKESLQKDTADSSAAAAAEHSAQVGDPEMKNLPDTKAITQKEEIHRKKTVPEEAWPNNKESLQINIEESECHSEFENTTRSVFRSAKFYIHHPVHLPSDQDICHESLGKSVFMRHSWKDFFQHHPDKHREHMCLPLPYQNMDKTKTDYTRIKSLSINVNLGNKEVMDTTKSQVRDYPKHNGQISDPQRDQKVTPEQTTQHTVSLNELWNKYRERQRQQRQPELGDRKELSLVDRLDRLAKILQNPITHSLQVSESTHDDSRGERSVKEWSGRQQQRNKLQKKKRFKSLEKSHKNTGELKKSKVLSHHRAGRSNQIKIEQIKFDKYILSKQPGFNYISNTSSDCRPSEESELLTDTTTNILSGTTSTVESDILTQTDREVALHERSSSVSTIDTARLIQAFGHERVCLSPRRIKLYSSITNQQRRYLEKRSKHSKKVLNTGHPLVTSEHTRRRHIQVANHVISSDSISSSASSFLSSNSTFCNKQNVHMLNKGIQAGNLEIVNGAKKHTRDVGITFPTPSSSEAKLEENSDVTSWSEEKREEKMLFTGYPEDRKLKKNKKNSHEGVSWFVPVENVESRSKKENVPNTCGPGISWFEPITKTRPWREPLREQNCQGQHLDGRGYLAGPGREAGRDLLRPFVRATLQESLQFHRPDFISRSGERIKRLKLIVQERKLQSMLQTERDALFNIDRERQGHQNRMCPLPKRVFLAIQKNKPISKKEMIQRSKRIYEQLPEVQKKREEEKRKSEYKSYRLRAQLYKKRVTNQLLGRKVPWD

SEQ ID NO: 48267 - protein, 379 aa, Homo sapiens
MASIYSEEGNIEHAFILYNKYITLFIEKLPKHRDYKSAVIPEKKDTVKKLKEIAFPKAEELKAELLKRYTKEYTEYNEEKKKEAEELARNMAIQQELEKEKQRVAQQKQQQLEQEQFHAFEEMIRNQELEKERLKIVQEFGKVDPGLGGPLVPDLEKPSLDVFPTLTVSSIQPSDCHTTVRPAKPPVVDRSLKPGALSNSESIPTIDGLRHVVVPGRLCPQFLQLASANTARGVETCGILCGKLMRNEFTITHVLIPKQSAGSDYCNTENEEELFLIQDQQGLITLGWIHTHPTQTAFLSSVDLHTHCSYQMMLPESVAIVCSPKFQETGFFKLTDHGLEEISSCRQKGFHPHSKDPPLFCSCSHVTVVDRAVTITDLR

SEQ ID NO: 48268 - protein, 147 aa, Homo sapiens [sequence omitted]

SEQ ID NO: 48269 - protein, 136 aa, Homo sapiens
MKVTAGISFAIPSDRLREFLHRGEKKNSSSGISGSQRRYIGVMMLTLSPSILAELQLREPSFPDVQHGVLIHKVILGSPAHRAGLRPGDVILAIGEQMVQNAEDVYEAVRTQSQLAVQIRRGRETLTLYVTPEVTE

SEQ ID NO: 48270 - protein, 551 aa, Homo sapiens
MRKAVKIIEERDIDLSCGNGSSKVKKFDTSISFPPVNLEIIKKQLNTRLTLLQETHRSHLREYEKYVQDVKSSKSTIQNLESSSNQALNCKFYKSMKIYVENLIDCLNEKIINIQEIESSMHALLLKQAMTFMKRRQDELKHESTYLQQLSRKDETSTSGNFSVDEKTQWILEEIESRRTKRRQARVLSGNCNHQEGTSSDDELPSAEMIDFQKSQGDILQKQKKVFEEVQDDFCNIQNILLKFQQWREKFPDSYYEAFISLCIPKLLNPLIRVQLIDWNPLKLESTGLKEMPWFKSVEEFMDSSVEDSKKESSSDKKVLSAIINKTIIPRLTDFVEFLWDPLSTSQTTSLITHCRVILEEHSTCENEVSKSRQDLLKSIVSRMKKAVEDDVFIPLYPKSAVENKTSPHSKFQERQFWSGLKLFRNILLWNGLLTDDTLQELGLGKLLNRYLIIALLNATPGPDVVKKCNQVAACLPEKWFENSAMRTSIPQLENFIQFLLQSAHKLSRSEFRDEVEEIILILVKIKALNQAESFIGEHHLDHLKSLIKED

SEQ ID NO: 48271 - protein, 330 aa, Homo sapiens
MQCILTRVDFDLYYGGEAFSVEQPQSFTCPYCGKMGYTETSLQEHVTSEHAETSTEVICPICAALPGGDPNHVTDDFAAHLTLEHRAPRDLDESSGVRHVRRMFHPGRGLGGPRARRSNMHFTSSSTGGLSSSQSSYSPSNREAMDPIAELLSQLSGVRRSAGGQLNSSGPSASQLQQLQMQLQLERQHAQAARQQLETARNATRRTNTSSVTTTITQSTATTNIANTESSQQTLQNSQFLLTRLNDPKMSETERQSMESERADRSLFVQELLLSTLVREESSSSDEDDRGEMADFGAMGCVDIMPLDVALENLNLKESNKGNEPPPPPL

SEQ ID NO: 48272 - protein, 131 aa, Homo sapiens [sequence omitted]

SEQ ID NO: 48273 - protein, 56 aa, Homo sapiens
MLLELARSLFNRMDFEDLGLVVDWDHHLPPPAAKTVVENLPRTVIRGSQAGGGDCH

SEQ ID NO: 48274 - protein, 106 aa, Homo sapiens
MLLELARSLFNRMDFEDLGLVVDWDHHLPPPAAKTVVENLPRTVIRGSQAGEDTDSFCYLGQTHPFPKPDCGLVLQFSRSGGGKCPSGVGAWEAEPVAALLISTPS

SEQ ID NO: 48275 - protein, 99 aa, Homo sapiens
MRVVDRQIRDIQREEEKVKRSVKDAAKKGQKDVCIVLAKEMIRSRKAVSKLYASKAHMNSVLMGMKNQLETGFYHVAQDGLELLSSSDPLPQSSKVLGL

SEQ ID NO: 48276 - protein, 946 aa, Homo sapiens
METVPFTVESLLESSYKFGDDVVLVGGKSLTTYGLSAYSGKVRYICSALGCRQWDSDEMEQEEDILLLQRTQKTVRAVGPRSGNEKWNFSVGHFELRYIPDMETRAGFIESTFKPNENTEESKIISDVEEQEAAIMDIVIKVSVADWKVMAFSKKGGHLEWEYQFCTPIASAWLLKDGKVIPISLFDDTSYTSNDDVLEDEEDIVEAARGATENSVYLGMYRGQLYLQSSVRISEKFPSSPKALESVTNENAIIPLPTIKWKPLIHSPSRTPVLVGSDEFDKCLSNDKFSHEEYSNGALSILQYPYDNGYYLPYYKRERNKRSTQITVRFLDNPHYNKNIRKKDPVLLLHWWKEIVATILFCIIATTFIVRRLFHPHPHRQRKESETQCQTENKYDSVSGEANDSSWNDIKNSGYISRYLTDFEPIQCLGRGGFGVVFEAKNKVDDCNYAIKRIRLPNRELAREKVMREVKALAKLEHPGIVRYFNAWLEAPPEKWQEKMDEIWLKDESTDWPLSSPSPMDAPSVKIRRMDPFATKEHIEIIAPSPQRSRSFSVGISCDQTSSSESQFSPLEFSGMDHEDISESVDAAYNLQDSCLTDCDVEDGTMDGNDEGHSFELCPSEASPYVRSRERTSSSIVFEDSGCDNASSKEEPKTNRLHIGNHCANKLTAFKPTSSKSSSEATLSISPPRPTTLSLDLTKNTTEKLQPSSPKVYLYIQMQLCRKENLKDWMNGRCTIEERERSVCLHIFLQIAEAVEFLHSKGLMHRDLKPSNIFFTMDDVVKVGDFGLVTAMDQDEEEQTVLTPMPAYARHTGQVGTKLYMSPEQIHGNSYSHKVDIFSLGLILFELLYPFSTQMERVRTLTDVRNLKFPPLFTQKYPCEYVMVQDMLSPSPMERPEAINIIENAVFEDLDFPGKTVLRQRSRSLSSSGTKHSRQSNNSHSPLPSN

SEQ ID NO: 48277 - protein, 295 aa, Homo sapiens
MAALAGVFVWDEERIQEEELQRSINEMKRLEEMSNMFQSSGVQHHPPEPKAQTEGNEDSEGKEQRWEMVMDKKHFKLWRRPITGTHLYQYRVFGTYTDVTPRQFFNVQLDTEYRKKWDALVIKLEVIERDVVSGSEVLHWVTHFPYPMYSRDYVYVRRYSVDQENNMMVLVSRAVEHPSVPESPEFVRVRSYESQMVIRPHKSFDENGFDYLLTYSDNPQTVFPRYCVSWMVSSGMPDFLEKLHMATLKAKNMEIKVKDYISAKPLEMSSEAKATSQSSERKNEGSCGPARIEYA

SEQ ID NO: 48278 - protein, 102 aa, Homo sapiens
MRSMASGGGVPTDEEQATGLEREIMLAAKKGLDPYNVLAPKGASGTREDPNLVPSISNKRIVGCICEEDNTSVVWFWLHKGEAQRCPRCGAHYKLVPQQLAH

SEQ ID NO: 48279 - protein, 23 aa, Homo sapiens
MRSMASGDKCRQICLGGWRKKSS

SEQ ID NO: 48280 - protein, 910 aa, Homo sapiens
MLGLSLAGNIQDPDEPILEFSLACSELHTPSLDRKPNSFVAVSVTTPPQAFWTKHAQTEIIEGTNNPIFLSSIAFFQDSLINQMTQVKLSVYDVKDRSQGTMYLLGSGTFIVKDLLQDRHHRLHLTLRSAESDRVGNITVIGWQMEEKSDQRPPVTRSVDTVNGRMVLPVDESLTEALGIRSKYASLRKDTLLKSVFGGAICRMYRFPTTDGNHLRILEQMAESVLSLHVPRQFVKLLLEEDAARVCELEELGELSPCWESLRRQIVTQYQTIILTYQENLTDLHQYRGPSFKASSLKADKKLEFVPTNLHIQRMRVQDDGGSDQNYDIVTIGAPAAHCQGFKSGGLRKKLHKFEETKKHFEECCTSSGCQSIIYIPQDVVRAKEIIAQINTLKTQVSYYAERLSRAAKDRSATGLERTLAILADKTRQLVTVCDCKLLANSIHGLNAARPDYIASKASPTSTEEEQVMLRNDQDTLMARWTGRNSRSSLQVDWHEEEWEKVWLNVDKSLECIIQRVDKLLQKERLHGEGCEDVFPCAGSCTSKKDCSPPPEESSPGEWSEALYPLLTTLTDCVAMMSDKAKKAMVFLLMQDSAPTIATYLSLQYRRDVVFCQTLTALICGFIIKLRNCLHDDGFLRQLYTIGLLAQFESLLSTYGEELAMLEDMSLGIMDLRNVTFKVTQATSSASADMLPVITGNRDGFNVRVPLPGPLFDALPREIQSGMLLRVQPVLFNVGINEQQTLAERFGDTSLQEVINVESLVRLNSYFEQFKEVLPEDCLPRSRSQTCLPELLRFLGQNVHARKNKNVDILWQAAEICRRLNGVRFTSCKSAKDRTAMSVTLEQCLILQHEHGMAPQVFTQALECMRSEGCRRENTMKNVGSRKYAFNSLQLKAFPKHYRPPEGTYGKVET

SEQ ID NO: 48281 - protein, 944 aa, Homo sapiens
MLGLSLAGNIQDPDEPILEFSLACSELHTPSLDRKPNSFVAVSVTTPPQAFWTKHAQTEIIEGTNNPIFLSSIAFFQDSLINQMTQVKLSVYDVKDRSQGTMYLLGSGTFIVKDLLQDRHHRLHLTLRSAESDRVGNITVIGWQMEEKSDQRPPVTRSVDTVNGRMVLPVDESLTEALGIRSKYASLRKDTLLKSVFGGAICRMYRFPTTDGNHLRILEQMAESVLSLHVPRQFVKLLLEEDAARVCELEELGELSPCWESLRRQIVTQYQTIILTYQENLTDLHQYRGPSFKASSLKADKKLEFVPTNLHIQRMRVQDDGGSDQNYDIVTIGAPAAHCQGFKSGGLRKKLHKFEETKKHTSSGCQSIIYIPQDVVRAKEIIAQINTLKTQVSYYAERLSRAAKDRSATGLERTLAILADKTRQLVTVCDCKLLANSIHGLNAARPDYIASKASPTSTEEEQVMLRNDQDTLMARWTGRNSRSSLQVDWHEEEWEKVWLNVDKSLECIIQRVDKLLQKERLHGEGCEDVFPCAGSCTSKKGNPDSHAYWIRPEDPFCDVPSSPCPSTMPSTACHPHLTTHCSPPPEESSPGEWSEALYPLLTTLTDCVAMMSDKAKKAMVFLLMQDSAPTIATYLSLQYRRDVVFCQTLTALICGFIIKLRNCLHDDGFLRQLYTIGLLAQFESLLSTYGEELAMLEDMSLGIMDLRNVTFKVTQATSSASADMLPVITGNRDGFNVRVPLPGPLFDALPREIQSGMLLRVQPVLFNVGINEQQTLAERFGDTSLQEVINVESLVRLNSYFEQFKEVLPEDCLPRSRSQTCLPELLRFLGQNVHARKNKNVDILWQAAEICRRLNGVRFTSCKSAKDRTAMSVTLEQCLILQHEHGMAPQVFTQALECMRSEGCRRENTMKNVGSRKYAFNSLQLKAFPKHYRPPEGTYGKVET

SEQ ID NO: 48282 - protein, 264 aa, Homo sapiens
MGNINLTFFTTKKKYDRMENLKLIVRALNAVQPQLDVQATKRFDLLLDGQFKISGTASKIGRTTAYHHCTLLCSTDGTFLSSLLKSPYQGIRSNATASIPSLVKNLLEKDPTLTCEVLMNAVATEYAAYHQIDNHIHLINPTDETLFPGINSKAKELQTWEWIYGKTPKFSINTSFHVLYEQSHLEIKVFIDIKNGRIEICNIEAPDHWLPLEIRDKLNSSLIGSKFCPTETTMLTNILLRTCPQDHKLNSKWNILCEKIKGIM

SEQ ID NO: 48283 - protein, 1229 aa, Homo sapiens
MAAKVQKLEEQFRSDAAMQKDGTSSTIFSGVAIYVNGYTDPSAEELRKLMMLHGGQYHVYYSRSKTTHIIATNLPNAKIKELKGEKVIRPEWIVESIKAGRLLSYIPYQLYTKQSSVQKGLSFNPVCRPEDPLPGPSNIAKQLNNRVNHIVKKIETENEVKVNGMNSWNEEDENNDFSFVDLEQTSPGRKQNGIPHPRGSTAIFNGHTPSSNGALKTQDCLVPMVNSVASRLSPAFSQEEDKAEKSSTDFRDCTLQQLQQSTRNTDALRNPHRTNSFSLSPLHSNTKINGAHHSTVQGPSSTKSTSSVSTFSKAAPSVPSKPSDCNFISNFYSHSRLHHISMWKCELTEFVNTLQRQSNGIFPGREKLKKMKTGRSALVVTDTGDMSVLNSPRHQSCIMHVDMDCFFVSVGIRNRPDLKGKPVAVTSNRGTGRAPLRPGANPQLEWQYYQNKILKGKADIPDSSLWENPDSAQANGIDSVLSRAEIASCSYEARQLGIKNGMFFGHAKQLCPNLQAVPYDFHAYKEVAQTLYETLASYTHNIEAVSCDEALVDITEILAETKLTPDEFANAVRMEIKDQTKCAASVGIGSNILLARMATRKAKPDGQYHLKPEEVDDFIRGQLVTNLPGVGHSMESKLASLGIKTCGDLQYMTMAKLQKEFGPKTGQMLYRFCRGLDDRPVRTEKERKSVSAEINYGIRFTQPKEAEAFLLSLSEEIQRRLEATGMKGKRLTLKIMVRKPGAPVETAKFGGHGICDNIARTVTLDQATDNAKIIGKAMLNMFHTMKLNISDMRGVGIHVNQLVPTNLNPSTCPSRPSVQSSHFPSGSYSVRDVFQVQKAKKSTEEEHKEVFRAAVDLEISSASRTCTFLPPFPAHLPTSPDTNKAESSGKWNGLHTPVSVQSRLNLSIEVPSPSQLDQSVLEALPPDLREQVEQVCAVQQAESHGDKKKEPVNGCNTGILPQPVGTVLLQIPEPQESNSDAGINLIALPAFSQVDPEVFAALPAELQRELKAAYDQRQRQGENSTHQQSASASVPKNPLLHLKAAVKEKKRNKKKKTIGSPKRIQSPLNNKLLNSPAKTLPGACGSPQKLIDGFLKHEGPPAEKPLEELSASTSGVPGLSSLQSDPAGCVRPPAPNLAGAVEFNDVKTLLREWITTISDPMEEDILQVVKYCTDLIEEKDLEKLDLVIKYMKRLMQQSVESVWNMAFDFILDNVQVVLQQTYGSTLKVT

SEQ ID NO: 48284 - protein, 338 aa, Homo sapiens
MVASKFITLTFKDPDVYSAKQEFLFLTTMPEVRKLPEEKHIPEELKPTGKELPDSQLVQPLVYMERLELIRNVCRDDALKNLSHTPVSKFVLDRIFVCDKHKILFCQTPKVGNTQWKKVLIVLNGAFSSIEEIPENVVHDHEKNGLPRLSSFSDAEIQKRLKTYFKFFIVRDPFERLISAFKDKFVHNPRFEPWYRHEIAPGIIRKYRRNRTETRGIQFEDFVRYLGDPNHRWLDLQFGDHIIHWVTYVELCAPCEIMYSVIGHHETLEDDAPYILKEAGIDHLVSYPTIPPGITVYNRTKVEHYFLGISKRDIRRLYARFEGDFKLFGYQKPDFLLN

SEQ ID NO: 48285 - protein, 782 aa, Homo sapiens
MDKTTVLEKVIGFLQKHNEVSAQTEICDIQQDWKPSFLSNEEFTQLMLEALDGFIIAVTTDGSIIYVSDSITPLLGHLPSDVMDQNLLNFLPEQEHSEVYKILSSHMLVTDSPSPEYLKSDSDLEFYCHLLRGSLNPKEFPTYEYIKFVGNFRSYNNVPSPSCNGFDNTLSRPCRVPLGKEVCFIATVRLATPQFLKEMCIVDEPLEEFTSRHSLEWKFLFLDHRAPPIIGYLPFEVLGTSGYDYYHIDDLELLARCHQHLMQFGKGKSCCYRFLTKGQQWIWLQTHYYITYHQWNSKPEFIVCTHSVVSYADVRVERRQELALEDPPSEALHSSALKDKGSSLEPRQHFNTLDVGASGLNTSHSPSASSRSSHKSSHTAMSEPTSTPTKLMAEASTPALPRSATLPQELPVPGLSQAATMPAPLPSPSSCDLTQQLLPQTVLQSTPAPMAQFSAQFSMFQTIKDQLEQRTRILQANIRWQQEELHKIQEQLCLVQDSNVQMFLQQPAVSLSFSSTQRPEAQQQLQQRSAAVTQPQLGAGPQLPGQISSAQVTSQHLLRESSVISTQGPKPMRSSQLMQSSGRSGSSLVSPFSSATAALPPSLNLTTPASTSQDASQCQPSPDFSHDRQLRLLLSQPIQPMMPGSCDARQPSEVSRTGRQVKYAQSQTVFQNPDAHPANSSSAPMPVLLMGQAVLHPSFPASQPSPLQPAQARQQPPQHYLQVQAPTSLHSEQQDSLLLSTYSQQPGTLGYPQPPPAQPQPLRPPRRVSSLSESSGLQQPPR

SEQ ID NO: 48286 - protein, 227 aa, Homo sapiens
MFLQQPAVSLSFSSTQRPEAQQQLQQRSAAVTQPQLGAGPQLPGQISSAQVTSQHLLRESSVISTQGPKPMRSSQLMQSSGRSGSSLVSPFSSATAALPPSLNLTTPASTSQDASQCQPSPDFSHDRQLRLLLSQPIQPMMPGSCDARQPSEVSRTGRQVKYAQSQTVFQNPDAHPANSSSAPMPVLLMGQAVLHPSFPASQPSPLQPAQARQQPPQHYLQVLGHTL

SEQ ID NO: 48287 - protein, 386 aa, Homo sapiens
MNVAEKHRGNYTCHASYTYLGKQYPITRVIEFITLEENKPTRPVIVSPANETMEVDLGSQIQLICNVTGQLSDIAYWKWNGSVIDEDDPVLGEDYYSVENPANKRRSTLITVLNISEIESRFYKHPFTCFAKNTHGIDAAYIQLIYPVTNFQKHMIGICVTLTVIIVCSVFIYKIFKIDIVLWYRDSCYDFLPIKASDGKTYDAYILYPKTVGEGSTSDCDIFVFKVLPEVLEKQCGYKLFIYGRDDYVGEDIVEVINENVKKSRRLIIILVRETSGFSWLGGSSEEQIAMYNALVQDGIKVVLLELEKIQDYEKMPESIKFIKQKHGAIRWSGDFTQGPQSAKTRFWKNVRYHMPVQRRSPSSKHQLLSPATKEKLQREAHVPLG

SEQ ID NO: 48288 - protein, 842 aa, Homo sapiens [sequence omitted]

SEQ ID NO: 48289 - protein, 32 aa, Homo sapiens
MWAVAAARTRNCCCTRSCCPRSSFSSLWSRRT

SEQ ID NO: 48290 - protein, 159 aa, Homo sapiens [sequence omitted]

SEQ ID NO: 48291 - protein, 1647 aa, Homo sapiens
MMLIQKAKSRCTELEKEIEELRSKPVTEGTGDIIKALTERLDALLLEKAETEQQCLSLKKENIKMKQEVEDSVTKMGDAHKELEQSHINYVKEIENLKNELMAVRSKYSEDKANLQKQLEEAMNTQLELSEQLKFQNNSEDNVKKLQEEIEKIRPGFEEQILYLQKQLDATTDEKKETVTQLQNIIEANSQHYQKNINSLQEELLQLKAIHQEEVKELMCQIEASAKEHEAEINKLNELKENLVKQCEASEKNIQKKYECELENLRKATSNANQDNQICSILLQENTFVEQVVNEKVKHLEDTLKELESQHSILKDEVTYMNNLKLKLEMDAQHIKDEFFHEREDLEFKINELLLAKEEQGCVIEKLKSELAGLNKQFCYTVEQHNREVQSLKEQHQKEISELNETFLSDSEKEKLTLMFEIQGLKEQCENLQQEKQEAILNYESLREIMEILQTELGESAGKISQEFESMKQQQASDVHELQQKLRTAFTEKDALLETVNRLQGENEKLLSQQELVPELENTIKNLQEKNGVYLLSLSQRDTMLKELEGKINSLTEEKDDFINKLKNSHEEMDNFHKKCEREERLILELGKKVEQTIQYNSELEQKVNELTGGLEETLKEKDQNDQKLEKLMVQMKVLSEDKEVLSAEVKSLYEENNKLSSEKKQLSRDLEVFLSQKEDVILKEHITQLEKKLQLMVEEQDNLNKLLENEQVQKLFVKTQLYGFLKEMGSEVSEDSEEKDVVNVLQAVGESLAKINEEKCNLAFQRDEKVLELEKEIKCLQEESVVQCEELKSLLRDYEQEKVLLRKELEEIQSEKEALQSDLLEMKNANEKTRLENQNLLIQVEEVSQTCSKSEIHNEKEKCFIKEHENLKPLLEQKELRDRRAELILLKDSLAKSPSVKNDPLSSVKELEEKIENLEKECKEKEEKINKIKLVAVKAKKELDSSRKETQTVKEELESLRSEKDQLSASMRDLIQGAESYKNLLLEYEKQSEQLDVEKERANNFEHRIEDLTRQLRNSTLQCETINSDNEDLLARIETLQSNAKLLEVQILEVQRAKAMVDKELEAEKLQKEQKIKEHATTVNELEELQVQLQKQKKQLQKTMQELELVKKDAQQTTLMNMEIADYERLMKELNQKLTNKNNKIEDLEQEIKIQKQKQETLQEEITSLQSSVQQYEEKNTKIKQLLVKTKKELADSKQAETDHLILQASLKGELEASQQQVEVYKIQLAEITSEKHKIHEHLKTSAEQHQRTLSAYQQRVTALQEECRAAKAEQATVTSEFESYKVRVHNVLKQQKNKSMSQAETEGAKQEREHLEMLIDQLKIKLQDSQNNLQINVSELQTLQSEHDTLLERHNKMLQETVSKEAELREKLCSIQSENMMMKSEHTQTVSQLTSQNEVLRNSFRDQVRHLQEEHRKTVETLQQQLSKMEAQLFQLKNEPTTRSPVSSQQSLKNLRERRNTDLPLLDMHTVTREEGEGMETTDTESVSSASTYTQSLEQLLNSPETKLEPPLWHAEFTKEELVQKLSSTTKSADHLNGLLRETEATNAILMEQIKLLKSEIRRLERNQEREKSAANLEYLKNVLLQFIFLKPGSERERLLPVINTMLQLSPEEKGKLAAVAQGEEENASRSSGWASYLHSWSGLR

SEQ ID NO: 48292 - protein, 199 aa, Homo sapiens
MHACVNTPGSYRCTCPGGYRTLADGKSCEDVDECVGLQPVCPQGTTCINTGGSFQCVSPECPEGSGNVSYVKTSPFQCERNPCPMDSRPCRHLPKTISFHYLSLPSNLKTPITLFRMATASAPGRAGPNSLRFGIVGGNSRGHFVMQRSDRQTGDLILVQNLEGPQTLEVDVDMSEYLDRSFQANHVSKVTIFVSPYDF

SEQ ID NO: 48293 - protein, 665 aa, Homo sapiens [sequence omitted]

SEQ ID NO: 48294 - protein, 117 aa, Homo sapiens
MRCVAVFVGINHASAKVDFDNNIQLSLTLAALSIGLWWTFDRSRSGFGLGVGIAFLATVVTQLLVYNGVYQYTSPDFLYVRSWLPCIFFAGGITMGNIGRQLAMYECKVIAEKSHQE

SEQ ID NO: 48295 - protein, 718 aa, Homo sapiens
MPLKDDHTSRPLWVAPDGHIFLEAFSPVYKYAQDFLVAIAEPVCRPTHVHEYKLTAYSLYAAVSVGLQTSDITEYLRKLSKTGVPDGIMQFIKLCTVSYGKVKLVLKHNRYFVESCHPDVIQHLLQDPVIRECRLRNSEGEATELITETFTSKSAISKTAESSGGPSTSRVTDPQGKSDIPMDLFDFYEQMDKDEEEEEETQTVSFEVKQEMIEELQKRCIHLEYPLLAEYDFRNDSVNPDINIDLKPTAVLRPYQEKSLRKMFGNGRARSGVIVLPCGAGKSLVGVTAACTVRKRCLVLGNSAVSVEQWKAQFKMWSTIDDSQICRFTSDAKDKPIGCSVAISTYSMLGHTTKRSWEAERVMEWLKTQEWGLMILDEVHTIPAKMFRRVLTIVQAHCKLGLTATLVREDDKIVDLNFLIGPKLYEANWMELQNNGYIAKVQCAEVWCPMSPEFYREYVAIKTKKRILLYTMNPNKFRACQFLIKFHERRNDKIIVFADNVFALKEYAIRLNKPYIYGPTSQGERMQILQNFKHNPKINTIFISKVGDTSFDLPEANVLIQISSHGGSRRQEAQRLGRVLRAKKGMVAEEYNAFFYSLVSQDTQEMAYSTKRQRFLVDQGYSFKVITKLAGMEEEDLAFSTKEEQQQLLQKVLAATDLDAEEEVVAGEFGSRSSQASRRFGTMSSMSGADDTVYMEYHSSRSKAPSKHVHPLFKRFRK

SEQ ID NO: 48296 - protein, 609 aa, Homo sapiens [sequence omitted]

SEQ ID NO: 48297 - protein, 232 aa, Homo sapiens
MNPASGALSPLPRPNGTANTTKNLVVTAEMCCYCFDVLYCHLYGFPQPRLPRFTNDPYPLFVTWKTGRDKRLRGCIGTFSAMNLHSGLREYTLTSALKDSRFPPLTREELPKLFCSVSLLTNFEDASDYLDWEVGVHGIRIEFINEKGVKRTATYLPEVAKEQDWDQIQTIDSLLRKGGFKAPITSEFRKTIKLTRYRSEKVTISYAEYIASRQHCFQNGTLHAPPLYNHYS

SEQ ID NO: 48298 - protein, 1003 aa, Homo sapiens
MSSSSSLQSREEKQEPVVVRPYPQVQMLSTHHAVASATPVAVTAPPAHLTPAVPLSFSEGLMKPPPKPTMPSRPIAPAPPSTLSLPPKVPGQVTVTMESSIPQASAIPVATISGQQGHPSNLHHIMTTNVQMSIIRSNAPGPPLHIGASHLPRGAAAAAVMSSSKVTTVLRPTSQLPNAATAQPAVQHIIHQPIQSRPPVTTSNAIPPAVVATVSATRAQSPVITTTAAHATDSALSRPTLSIQHPPSAAISIQRPAQSRDVTTRITLPSHPALGTPKQQLHTMAQKTIFSTGTPVAAATVAPILATNTIPSATTAGSVSHTQAPTSTIVTMTVPSHSSHATAVTTSNIPVAKVVPQQITHTSPRIQPDYPAERSSLIPISGHRASPNPVAMETRSDNRPSVPVQFQYFLPTYPPSAYPLAAHTYTPITSSVSTIRQYPVSAQAPNSAITAQTGVGVASTVHLNPMQLMTVDASHARHIQGIQPAPISTQGIQPAPIGTPGIQPAPLGTQGIHSATPINTQGLQPAPMGTQQPQPEGKTSVVLADGATIVANPISNPFSAAPAATTVVQTHSQSASTNAPAQGSSPRPSILRKKPATDGMAVRKTLIPPQPPDVASPRVESSMRSTSGSPRPAGAKPKSEIHVSMATPVTVSMETVSNQNNDQPTIAVPPTAQQPPPTIPTMIAAASPPSQPAVALSTIPGAVPITPPITTIAAAPPPSVTVGGSLSSVLGPPVPEIKVKEEVEPMDIMRPVSAVPPLATNTVSPSLALLANNLSMPTSDLPPGASPRKKPRKQQHVISTEEGDMMETNSTDDEKSTAKSLLVKAEKRKSPPKEYIDEEGVRYVPVRPRPPITLLRHYRNPWKAAYHHFQRYSDVRVKEEKKAMLQEIANQKGVSCRAQGWKVHLCAAQLLQLTNLEHDVYERLTNLQEGIIPKKKAATDDDLHRINELIQGNMQRCKLVMDQISEARDSMLKVLDHKDRVLKLLNKNGTVKKVSKLKRKEKV

SEQ ID NO: 48299 - protein, 1531 aa, Homo sapiens
MGVLVVLTVLWLFSSVKADSKAITTSLTTKWFSTPLLLEASEFLAEDSQEKFWNFVEASQNIGSSDHDGTDYSYYHAILEAAFQFLSPLQQNLFKFCLSLRSYSATIQAFQQIAADEPPPEGCNSFFSVHGKKTCESDTLEALLLTASERPKPLLFKGDHRYPSSNPESPVVIFYSEIGSEEFSNFHRQLISKSNAGKINYVFRHYIFNPRKEPVYLSGYGVELAIKSTEYKAKDDTQVKGTEVNTTVIGENDPIDEVQGFLFGKLRDLHPDLEGQLKELRKHLVESTNEMAPLKVWQLQDLSFQTAARILASPVELALVVMKDLSQNFPTKARAITKTAVSSELRTEVEENQKYFKGTLGLQPGDSALFINGLHMDLDTQDIFSLFDVLRNEARVMEGLHRLGIEGLSLHNVLKLNIQPSEADYAVDIRSPAISWVNNLEVDSRYNSWPSSLQELLRPTFPGVIRQIRKNLHNMVFIVDPAHETTAELMNTAEMFLSNHIPLRIGFIFVVNDSEDVDGMQDAGVAVLRAYNYVAQEVDDYHAFQTLTHIYNKVRTGEKVKVEHVVSVLEKKYPYVEVNSILGIDSAYDRNRKEARGYYEQTGVGPLPVVLFNGMPFEREQLDPDELETITMHKILETTTFFQRAVYLGELPHDQDVVEYIMNQPNVVPRINSRILTAERDYLDLTASNNFFVDDYARFTILDSQGKTAAVANSMNYLTKKGMSSKEIYDDSFIRPVTFWIVGDFDSPSGRQLLYDAIKHQKSSNNVRISMINNPAKEISYENTQISRAIWAALQTQTSNAAKNFITKMAKEGAAEALAAGADIAEFSVGGMDFSLFKEVFESSKMDFILSHAVYCRDVLKLKKGQRAVISNGRIIGPLEDSELFNQDDFHLLENIILKTSGQKIKSHIQQLRVEEDVASDLVMKVDALLSAQPKGDPRIEYQFFEDRHSAIKLRPKEGETYFDVVAVVDPVTREAQRLAPLLLVLAQLINMNLRVFMNCQSKLSDMPLKSFYRYVLEPEISFTSDNSFAKGPIAKFLDMPQSPLFTLNLNTPESWMVESVRTPYDLDNIYLEEVDSVVAAEYELEYLLLEGHCYDITTGQPPRGLQFTLGTSANPVIVDTIVMANLGYFQLKANPGAWILRLRKGRSEDIYRIYSHDGTDSPPDADEVVIVLNNFKSKIIKVKVQKKADMVNEDLLSDGTSENESGFWDSFKWGFTGQKTEEVKQDKDDIINIFSVASGHLYERFLRIMMLSVLKNTKTPVKFWFLKNYLSPTFKEFIPYMANEYNFQYELVQYKWPRWLHQQTEKQRIIWGYKILFLDVLFPLVVDKFLFVDADQIVRTDLKELRDFNLDGAPYGYTPFCDSRREMDGYRFWKSGYWASHLAGRKYHISALYVVDLKKFRKIAAGDRLRGQYQGLSQDPNSLSNLDQDLPNNMIHQVPIKSLPQEWLWCETWCDDASKKRAKTIDLCNNPMTKEPKLEAAVRIVPEWQDYDQEIKQLQIRFQKEKETGALYKEKTKEPSREGPQKREEL

SEQ ID NO: 48300 - protein, 193 aa, Homo sapiens [sequence omitted]

SEQ ID NO: 48301 - protein, 1795 aa, Homo sapiens
MEETVRNLLQSQGSPEQKKEETVNIMVYQEKLSEEERKHKEALEDLHMVVDEDSRSESSSTDEGKEKTKLLLERLKALEAENSALALENENQREQYERCLDEVANQVVQALLTQKDLREECVKLKTRVFDLEQQNRTLSILFQQRVRPTSDLLLQKLHSRLLDLSSGDLLSEVERNRSLTQSRTDAEVHEHQLNTKSALKCPGLGAVIPGHLCPRNSYSSSSELSLSSTCSEYSSGSSYTWHDGKNLRKRQSSQNWDKRLSIDSSLPSGFASPTNELPPTRIKESHILEGLRKLQKRKVLLEPPSVITKWGYKDCMNSNEGIYSPGIKSSSLKEYPPCKTADLGSPCKEPHKTFVYDLDSHVDADDDPSTLALLQAVPNQSCRPHGSKLTHSVSDSLFGWETNRKHFLEGTSSVYPKERPEKLTSCASSCPLEMKLCPSVQTPQVQRERGPQGQGHGRMALNLQLSDTDDNETFDELHIESSDEKSPSDVSLAADTDKSVENLDVLVGFGKSLCGSPEEEEKQVPIPSETRPKTFSFIKQQRVVKRTSSEECVTVIFDAEDGEPIEFSSHQTGVVTVTRNEISINSTPAGPKAEHTELLPQGIACLQPRAAARDYTFFKRSEEDTEKNIPKDNVDNVPRVSTESFSSRTVTQNPQQQKLVKPTHNISCQSNSRSSAPMGIYQKQNLTKIPPRGKSSPQKSKLMEPEATTLLPSSGLVTLEKSPALAPGKLSRFMKTESSGPLFELRSDPHIPKHSAQLPHSSRMPSRRDWVQCPKSQTPGSRSRPAIESSDSGEPPTRDEHCGSGPEAGVKSPSPPPPPGRSVSLLARPSYDYSPAPSSTKSETRVPSETARTPFKSPLLKGISAPVISSNPATTEVQRKKPSVAFKKPIFTHPMPSPEAVIQTRCPAHAPSSSFTVMALGPPKVSPKRGVPKTSPRQTLGTPQRDIGLQTPRISPSTHEPLEMTSSKSVSPGRKGQLNDSASTPPKPSFLGVNESPSSQVSSSSSSSSPAKSHNSPHGCQSAHEKGLKTRLPVGLKVLMKSPQLLRKSSTVPGKHEKDSLNEASKSSVAVNKSKPEDSKNPASMEITAGERNVTLPDSQAQGSLADGLPLETALQEPLESSIPGSDGRDGVDNRSMRRSLSSSKPHLKPALGMNGAKARSHSFSTHSGDKPSTPPIEGSGKVRTQIITNTAERGNSLTRQNSSTESSPNKAPSAPMLESLPSVGRPSGHPSSGKGSLGSSGSFSSQHGSPSKLPLRIPPKSEGLLIPPGKEDQQAFTQGECPSANVAVLGEPGSDRRSCPPTPTDCPEALQSPGRTQHPSTFETSSTSKLETSGRHPDASATATDAVSSEAPLSPTIEEKVMLCIQENVEKGQVQTKPTSVEAKQKPGPSFASWFGFRKSRLPALSSRKMDISKTKVEKKDAKVLGFGNRQLKSERKKEKKKPELQCETENELIKDTKSADNPDGGLQSKNNRRTPQDIYNQLKIEPRNRHSPVACSTKDTFMTELLNRVDKKAAPQTESGSSNASCRNVLKGSSQGSCLIGSSISTQGNHKKNMKIKADMEVPKDSLVKEANENLQEDEDDAVADSVFQSHIIESNCQMRTLDSGIGTFPLPDSGNRSTGRYLCQPDSPEDAEPLLPLQSALSAVSSMRAQTLEREVPSSTDGQRPADSAIVHSTSDPIMTARGMRPLQSRLPKPASSGKVSSQKQNEAEPRPQTCSSFGYAEDPMASQPLPDWGSEVAATGTQDKAPRMCTYSASGGSNSDSDLDYGDNGFGAGRGQLVKALKSAAPEIETT

SEQ ID NO: 48302 - protein, 1017 aa, Homo sapiens
MGLGKTIQAIGITYFYKEEWPLLIVVPSSLRYPWTEEIEKWIPELSPEEINVIQNKTDVRRMSTSKVTVLGYGLLTADAKTLIDALNNQNFKVVIVDESHYMKSRNATRSRILLPIVQKARRAILLTGTPALGRPEELFMQIEALFPQKFGRWTDYAKRYCNAHIRYFGKRPQWDCRGASNLNELHQLLSDIMIRRLKTEVLTQLPPKVRQRIPFDLPSAAAKELNTSFEEWEKIMRTPNSGAMETVMGLITRMFKQTAIAKAGAVKDYIKMMLQNDSLKFLVFAHHLSMLQACTEAVIENKTRYIRIDGSVSSSERIHLVNQFQKDPDTRVAILSIQAAGQGLTFTAASHVVFAELYWDPGHIKQAEDRAHRIGQCSSVNIHYLIANGTLDTLMWGMLNRKAQVTGSTLNGRKEKIQAEEGDKEKWDFLQFAEAWTPNDSSEELRKEALFTHFEKEKQHDIRSFFVPQPKKRQLMTSCDESKRFREENTVVSSDPTKTAARDIIDYESDVEPETKRLKLAASEDHCSPSEETPSQSKQIRTPLVESVQEAKAQLTTPAFPVEGWQCSLCTYINNSELPYCEMCETPQGSAVMQIDSLNHIQDKNEKDDSQKDTSKKVQTISDCEKQALAQSEPGQLADSKEETPKIEKEDGLTSQPEQWKSSDTLPVYDTLMFCASRNTDRIHIYTKDGKQMSCNFIPLDIKLDLWEDLPASFQLKQYRSLILRFVREWSSLTAMKQRIIRKSGQLFCSPILALEEITKQQTKQNCTKRYITKEDVAVASMDKVKNVGGHVRLITKESRPRDPFTKKLLEDGACVPFLNPYTVQADLTVKPSTSKGYLQAVDNEGNPLCLRCQQPTCQTKQACKANSWDSRFCSLKCQEEFWIRSNNSYLRAKVFETEHGVCQLCNVNAQELFLRLRDAPKSQRKNLLYATWTSKLPLEQLNEMIRNPGEGHFWQVDHIKPVYGGGGQCSLDNLQTLCTVCHKERTARQAKERSQVRRQSLASKHGSDITRFLVKK

SEQ ID NO: 48303 - protein, 358 aa, Homo sapiens [sequence omitted]

SEQ ID NO: 48304 - protein, 139 aa, Homo sapiens [sequence omitted]

SEQ ID NO: 48305 - protein, 31 aa, Homo sapiens
MTPLLGRNLGSTALSPYPTAISGLQRKLPRD

SEQ ID NO: 48306 - protein, 74 aa, Homo sapiens
MGHPGMHYAPMGMHPMGQRANMPPVPHGMMPQMMPPMGGPPMGQMPGMMSSVMPGMMMSHMSQASMQPALPVIM

SEQ ID NO: 48307 - protein, 235 aa, Homo sapiens
MESTEKCEAVIGHFNGKFIKTPPGVSAPTEPLLCKFADGGQKKRQNPNKYIPNGRPWHREGEVRLAGMTLTYDPTTAAIQNGFYPSPYSIATNRMITQTSITPYIASPVSAYQVAKETRENKYRGSAIKVQSPSWMQPQPYILQHPGAVLTPSMEHTMSLQPASMISPLAQQMSHLSLGSTGTYMPATSAMQGAYLPQYAHMQTTAVPVEEASGQQQVAVETSNDHSPYTFQPNK

SEQ ID NO: 48308 - protein, 713 aa, Homo sapiens
MEVAQPALEGKNIIICLPTGSGKTRVAVYIAKDHLDKKKKASEPGKVIVLVNKVLLVEQLFRKEFQPFLKKWYRVIGLSGDTQLKISFPEVVKSCDIIISTAQILENSLLNLENGEDAGVQLSDFSLIIIDECHHTNKEAVYNNIMRHYLMQKLKNNRLKKENKPVIPLPQILGLTASPGVGGATKQAKAEEHILKLCANLDAFTIKTVKENLDQLKNQIQEPCKKFAIADATREDPFKEKLLEIMTRIQTYCQMSPMSDFGTQPYEQWAIQMEKKAAKEGNRKERVCAEHLRKYNEALQINDTIRMIDAYTHLETFYNEEKDKKFAVIEDDSDEGGDDEYCDGDEDEDDLKKPLKLDETDRFLMTLFFENNKMLKRLAENPEYENEKLTKLRNTIMEQYTRTEESARGIIFTKTRQSAYALSQWITENEKFAEVGVKAHHLIGAGHSSEFKPMTQNEQKEVISKFRTGKINLLIATTVAEEGLDIKECNIVIRYGLVTNEIAMVQARGRARADESTYVLVAHSGSGVIEHETVNDFREKMMYKAIHCVQNMKPEEYAHKILELQMQSIMEKKMKTKRNIAKHYKNNPSLITFLCKNCSVLACSGEDIHVIEKMHHVNMTPEFKELYIVRENKALQKKCADYQINGEIICKCGQAWGTMMVHKGLDLPCLKIRNFVVVFKNNSTKKQYKKWVELPITFPNLDYSECCLFSDED

SEQ ID NO: 48309 - protein, 1881 aa, Homo sapiens
MLSPFSPLRRISIKILVHSLFSMLIMCTILTNCIFMTMNNPPDWTKNVEYTFTGIYTFESLVKILARGFCVGEFTFLRDPWNWLDFVVIVFAYVTEFVDLGNVSALRTFRVLRALKTISVIPGLKTIVGALIQSVKKLSDVMILTVFCLSVFALIGLQLFMGNLKHKCFRNSLENNETLESIMNTLESEEDFRKYFYYLEGSKDALLCGFSTDSGQCPEGYTCVKIGRNPDYGYTSFDTFSWAFLALFRLMTQDYWENLYQQTLRAAGKTYMIFFVVVIFLGSFYLINLILAVVAMAYEEQNQANIEEAKQKELEFQQMLDRLKKEQEEAEAIAAAAAEYTSIRRSRIMGLSESSSETSKLSSKSAKERRNRRKKKNQKKLSSGEEKGDAEKLSKSESEDSIRRKSFHLGVEGHRRAHEKRLSTPNQSPLSIRGSLFSARRSSRTSLFSFKGRGRDIGSETEFADDEHSIFGDNESRRGSLFVPHRPQERRSSNISQASRSPPMLPVNGKMHSAVDCNGVVSLVDGRSALMLPNGQLLPEVIIDKATSDDSGTTNQIHKKRRCSSYLLSEDMLNDPNLRQRAMSRASILTNTVEELEESRQKCPPWWYRFAHKFLIWNCSPYWIKFKKCIYFIVMDPFVDLAITICIVLNTLFMAMEHHPMTEEFKNVLAIGNLVFTGIFAAEMVLKLIAMDPYEYFQVGWNIFDSLIVTLSLVELFLADVEGLSVLRSFRLLRVFKLAKSWPTLNMLIKIIGNSVGALGNLTLVLAIIVFIFAVVGMQLFGKSYKECVCKINDDCTLPRWHMNDFFHSFLIVFRVLCGEWIETMWDCMEVAGQAMCLIVYMMVMVIGNLVVLNLFLALLLSSFSSDNLTAIEEDPDANNLQIAVTRIKKGINYVKQTLREFILKAFSKKPKISREIRQAEDLNTKKENYISNHTLAEMSKGHNFLKEKDKISGFGSSVDKHLMEDSDGQSFIHNPSLTVTVPIAPGESDLENMNAEELSSDSDSEYSKVRLNRSSSSECSTVDNPLPGEGEEAEAEPMNSDEPEACFTDGCVWRFSCCQVNIESGKGKIWWNIRKTCYKIVEHSWFESFIVLMILLSSGALAFEDIYIERKKTIKIILEYADKIFTYIFILEMLLKWIAYGYKTYFTNAWCWLDFLIVDVSLVTLVANTLGYSDLGPIKSLRTLRALRPLRALSRFEGMRVVVNALIGAIPSIMNVLLVCLIFWLIFSIMGVNLFAGKFYECINTTDGSRFPASQVPNRSECFALMNVSQNVRWKNLKVNFDNVGLGYLSLLQVATFKGWTIIMYAAVDSVNVDKQPKYEYSLYMYIYFVVFIIFGSFFTLNLFIGVIIDNFNQQKKKLGGQDIFMTEEQKKYYNAMKKLGSKKPQKPIPRPGNKIQGCIFDLVTNQAFDISIMVLICLNMVTMMVEKEGQSQHMTEVLYWINVVFIILFTGECVLKLISLRHYYFTVGWNIFDFVVVIISIVGMFLADLIETYFVSPTLFRVIRLARIGRILRLVKGAKGIRTLLFALMMSLPALFNIGLLLFLVMFIYAIFGMSNFAYVKKEDGINDMFNFETFGNSMICLFQITTSAGWDGLLAPILNSKPPDCDPKKVHPGSSVEGDCGNPSVGIFYFVSYIIISFLVVVNMYIAVILENFSVATEESTEPLSEDDFEMFYEVWEKFDPDATQFIEFSKLSDFAAALDPPLLIAKPNKVQLIAMDLPMVSGDRIHCLDILFAFTKRVLGESGEMDSLRSQMEERFMSANPSKVSYEPITTTLKRKQEDVSATVIQRAYRRYRLRQNVKNISSIYIKDGDRDDDLLNKKDMAFDNVNENSSPEKTDATSSTTSPPSYDSVTKPDKEKYEQDRTEKEDKGKDSKESKK

SEQ ID NO: 48310 - protein, 1881 aa, Homo sapiens
MLSPFSPLRRISIKILVHSLFSMLIMCTILTNCIFMTMNNPPDWTKNVEYTFTGIYTFESLVKILARGFCVGEFTFLRDPWNWLDFVVIVFAYLTEFVNLGNVSALRTFRVLRALKTISVIPGLKTIVGALIQSVKKLSDVMILTVFCLSVFALIGLQLFMGNLKHKCFRNSLENNETLESIMNTLESEEDFRKYFYYLEGSKDALLCGFSTDSGQCPEGYTCVKIGRNPDYGYTSFDTFSWAFLALFRLMTQDYWENLYQQTLRAAGKTYMIFFVVVIFLGSFYLINLILAVVAMAYEEQNQANIEEAKQKELEFQQMLDRLKKEQEEAEAIAAAAAEYTSIRRSRIMGLSESSSETSKLSSKSAKERRNRRKKKNQKKLSSGEEKGDAEKLSKSESEDSIRRKSFHLGVEGHRRAHEKRLSTPNQSPLSIRGSLFSARRSSRTSLFSFKGRGRDIGSETEFADDEHSIFGDNESRRGSLFVPHRPQERRSSNISQASRSPPMLPVNGKMHSAVDCNGVVSLVDGRSALMLPNGQLLPEVIIDKATSDDSGTTNQIHKKRRCSSYLLSEDMLNDPNLRQRAMSRASILTNTVEELEESRQKCPPWWYRFAHKFLIWNCSPYWIKFKKCIYFIVMDPFVDLAITICIVLNTLFMAMEHHPMTEEFKNVLAIGNLVFTGIFAAEMVLKLIAMDPYEYFQVGWNIFDSLIVTLSLVELFLADVEGLSVLRSFRLLRVFKLAKSWPTLNMLIKIIGNSVGALGNLTLVLAIIVFIFAVVGMQLFGKSYKECVCKINDDCTLPRWHMNDFFHSFLIVFRVLCGEWIETMWDCMEVAGQAMCLIVYMMVMVIGNLVVLNLFLALLLSSFSSDNLTAIEEDPDANNLQIAVTRIKKGINYVKQTLREFILKAFSKKPKISREIRQAEDLNTKKENYISNHTLAEMSKGHNFLKEKDKISGFGSSVDKHLMEDSDGQSFIHNPSLTVTVPIAPGESDLENMNAEELSSDSDSEYSKVRLNRSSSSECSTVDNPLPGEGEEAEAEPMNSDEPEACFTDGCVWRFSCCQVNIESGKGKIWWNIRKTCYKIVEHSWFESFIVLMILLSSGALAFEDIYIERKKTIKIILEYADKIFTYIFILEMLLKWIAYGYKTYFTNAWCWLDFLIVDVSLVTLVANTLGYSDLGPIKSLRTLRALRPLRALSRFEGMRVVVNALIGAIPSIMNVLLVCLIFWLIFSIMGVNLFAGKFYECINTTDGSRFPASQVPNRSECFALMNVSQNVRWKNLKVNFDNVGLGYLSLLQVATFKGWTIIMYAAVDSVNVDKQPKYEYSLYMYIYFVVFIIFGSFFTLNLFIGVIIDNFNQQKKKLGGQDIFMTEEQKKYYNAMKKLGSKKPQKPIPRPGNKIQGCIFDLVTNQAFDISIMVLICLNMVTMMVEKEGQSQHMTEVLYWINVVFIILFTGECVLKLISLRHYYFTVGWNIFDFVVVIISIVGMFLADLIETYFVSPTLFRVIRLARIGRILRLVKGAKGIRTLLFALMMSLPALFNIGLLLFLVMFIYAIFGMSNFAYVKKEDGINDMFNFETFGNSMICLFQITTSAGWDGLLAPILNSKPPDCDPKKVHPGSSVEGDCGNPSVGIFYFVSYIIISFLVVVNMYIAVILENFSVATEESTEPLSEDDFEMFYEVWEKFDPDATQFIEFSKLSDFAAALDPPLLIAKPNKVQLIAMDLPMVSGDRIHCLDILFAFTKRVLGESGEMDSLRSQMEERFMSANPSKVSYEPITTTLKRKQEDVSATVIQRAYRRYRLRQNVKNISSIYIKDGDRDDDLLNKKDMAFDNVNENSSPEKTDATSSTTSPPSYDSVTKPDKEKYEQDRTEKEDKGKDSKESKK

SEQ ID NO: 48311 - protein, 246 aa, Homo sapiens
MANRGKDTNGSQFFITTKPTPHLDGHHVVFGQVISGQEVVREIENQKTDAASKPFAEVRILSCGELIPKSKVKKEEKKRHKSSSSSSSSSSDSDSSSDSQSSSDSSDSESATEEKSKKRKKKHRKNSRKHKKEKKKRKKSKKSASSESEAENLEAQPQSTVRPEEIPPIPENRFLMRKSPPKADEKERKNRERERERECNPPNSQPASYQRRLLVTRSGRKIKGRGPRVGDSFPRDLHNIAFVFLK

SEQ ID NO: 48312 - protein, 1728 aa, Homo sapiens
MFRSQAGGACDCGDSNVMRESGFCKRHQIKSSSNIPCVPKDLLMMSEFVLPRFIFCLIQYLREGYNEPAADGPSEKDLNKVLQLLEPQISFLEDLTKMGGAMRSVLTQVLTNQQNYKDLTSGLGENACVKKSHEKYLIALKSSGLTYPEDKLVYGVQEPSAGTSSLAVQGFIGATGTLGQVDSSDEDDQDGSQGLGKRKRVKLSSGTKDQSIMDVLKHKSFLEELLFWTIKYEFPQKMVTFLLNMLPDQEYKVAFTKTFVQHYAFIMKTLKKSHESDTMSNRIVHISVQLFSNEELARQVTEECQLLDIMVTVLLYMMESCLIKSELQDEENSLHVVVNCGEALLKNNTYWPLVSDFINILSHQSVAKRFLEDHGLLVTWMNFVSFFQGMNLNKRELNEHVEFESQTYYAAFAAELEACAQPMWGLLSHCKVRETQEYTRNVVRYCLEALQDWFDAINFVDEPAPNQVTFHLPLHRYYAMFLSKAVKCQELDLDSVLPDQEMLMKLMIHPLQIQASLAEIHSNMWVRNGLQIKGQAMTYVQSHFCNSMIDPDIYLLQVCASRLDPDYFISSVFERFKVVDLLTMASQHQNTVLDAEHERSMLEGALTFLVILLSLRLHLGMSDDEILRAEMVAQLCMNDRTHSSLLDLIPENPNPKSGIIPGSYSFESVLSAVADFKAPVFEPGGSMQQGMYTPKAEVWDQEFDPVMVILRTVYRRDVQSAMDRYTAFLKQSGKFPGNPWPPYKKRTSLHPSYKGLMRLLHCKTLHIVLFTLLYKILMDHQNLSEHVLCMVLYLIELGLENSAEEESDEEASVGGPERCHDSWFPGSNLVSNMRHFINYVRVRVPETAPEVKRDSPASTSSDNLGSLQNSGTAQVFSLVAERRKKFQEIINRSSSEANQVVRPKTSSKWSAPGSAPQLTTAILEIKESILSLLIKLHHKLSGKQNSYYPPWLDDIEILIQPEIPKYSHGDGITAVERILLKAASQSRMNKRIIEEICRKVTPPVPPKKVTAAEKKTLDKEERRQKARERQQKLLAEFASRQKSFMETAMDVDSPENDIPMEITTAEPQVSEAVYDCVICGQSGPSSEDRPTGLVVLLQASSVLGQCRDNVEPKKLPISEEEQIYPWDTCAAVHDVRLSLLQRYFKDSSCLLAVSIGWEGGVYVQTCGHTLHIDCHKSYMESLRNDQVLQGFSVDKGEFTCPLCRQFANSVLPCYPGSNVENNPWQRPSNKSIQDLIKEVEELQGRPGAFPSETNLSKEMESVMKDIKNTTQKKYRDYSKTPGSPDNDFLFMYSVARTNLELELIHRGGNLCSGGASTAGKRSCLNQLFHVLALHMRLYSIDSEYNPWRKLTQLEEMNPQLGYEEQQPEVPILYHDVTSLLLIQILMMPQPLRKDHFTCIVKVLFTLLYTQALAALSVKCSEEDRSAWKHAGALKKSTCDAEKSYEVLLSFVISELFKGKLYHEEGTQECAMVNPIAWSPESMEKCLQDFCLPFLRITSLLQHHLFGEDLPSCQEEEEFSVLASCLGLLPTFYQTEHPFISASCLDWPVPAFDIITQWCFEIKSFTERHAEQGKALLIQESKWKLPHLLQLPENYNTIFQYYHRKTCSVCTKVPKDPAVCLVCGTFVCLKGLCCKQQSYCECVLHSQNCGAGTGIFLLINASVIIIIRGHRFCLWGSVYLDAHGEEDRDLRRGKPLYICKERYKVLEQQWISHTFDHINKRWGPHYNGL

SEQ ID NO: 48313 - protein, 405 aa, Homo sapiens [sequence omitted]

SEQ ID NO: 48314 - protein, 289 aa, Homo sapiens
MIWRNSISCLRLGKVPHRYQSGYHPVAPLGSRILTDPAKVFEHNMWDHMQWSKEEEAAARKKVKENSAVRVLLEEQVKYEREASKYWDTFYKIHKNKFFKDRNWLLREFPEILPVDQKPEEKARESSWDHVKTSATNRFSRMHCPTVPDEKNHYEKSSGSSEGQSKTESDFSNLDSEKHKKGPMETGLFPGSNATFRILEVGCGAGNSVFPILNTLENSPESFLYCCDFASGAVELVKSHSSYRATQCFAFVHDVCDDGLPYPFPDGILDVILLVFVLSSIHPDRTLFI

SEQ ID NO: 48315 - protein, 466 aa, Homo sapiens [sequence omitted]

SEQ ID NO: 48316 - protein, 855 aa, Homo sapiens
MTKTLPTAVTHGFNSTNDPPSMSITRLFPALLECFGIVLCGYIAGRANVITSTQAKGLGNFVSRFALPALLFKNMVVLNFSNVDWSFLYSILIAKASVFFIVCVLTLLVASPDSRFSKAGLFPIFATQSNDFALGYPIVEALYQTTYPEYLQYIYLVAPISLMMLNPIGFIFCEIQKWKDTQNASQNKIKIVGLGLLRVLQNPIVFMVFIGIAFNFILDRKVPVYVENFLDGLGNSFSGSALFYLGLTMVGKIKRLKKSAFVVLILLITAKLLVLPLLCREMVELLDKGDSVVNHTSLSNYAFLYGVFPVAPGVAIFATQFNMEVEIITSGMVISTFVSAPIMYVSAWLLTFPTMDPKPLAYAIQNVSFDISIVSLISLIWSLAILLLSKKYKQLPHMLTTNLLIAQSIVCAGMMIWNFVKEKNFVGQILVFVLLYSSLYSTYLWTGLLAISLFLLKKRERVQIPVGIIIISGWGIPALLVGVLLITGKHNGDSIDSAFFYGKEQMITTAVTLFCSILIAGISLMCMNQTAQAGSYEGFDQSQSHKVVEPGNTAFEESPAPVNEPELFTSSIPETSCCSCSMGNGELHCPSIEPIANTSTSEPVIPSFEKNNHCVSRCNSQSCILAQEEEQYLQSGDQQLTRHVLLCLLLIIGLFANLSSCLWWLFNQEPGRLYVELQFFCAVFNFGQGFISFGIFGLDKHLIILPFKRRLEFLWNNKDTAENRDSPVSEEIKMTCQQFIHYHRDLCIRNIVKERRCGAKTSAGTFCGCDLVSWLIEVGLASDRGEAVIYGDRLVQGGVIQHITNEYEFRDEYLFYRFLQKSPEQSPPAINANTLQQERYKEIEHSSPPSHSPKT

SEQ ID NO: 48317 - protein, 403 aa, Homo sapiens
MPKLRSTANRDNDSGGSRPPLLPPGGRSTSAKPFSPPSGPGRFPVPSPGHRSGPPEPQRNRMPPPRPDVGSKPDSIPPPVPSTPRPIQSSPHNRGSPPVPGGPRQPSPGPTPPPFPGNRGTALGGGSIRQSPLSSSSPFSNRPPLPPTPSRALDDKPPPPPPPVGNRPSIHREAVPPPPPQNNKPPVPSTPRPSASSQAPPPPPPPSRPGPPPLPPSSSGNDETPRLPQRNLSLSSSTPPLPSPGRSGPLPPPPSERPPPPVRDPPGRSGPLPPPPPVSRNGSTSRALPATPQLPSRSGVDSPRSGPRPPLPPDRPSAGAPPPPPPSTSIRNGFQDSPCEDEWESRFYFHPISDLPPPEPYVQTTKSYPSKLARNESRSGSNRRERGAPPLPPIPRPPKQAAE

SEQ ID NO: 48318 - protein, 396 aa, Homo sapiens [sequence omitted]

SEQ ID NO: 48319 - protein, 342 aa, Homo sapiens
MSSSGTLSNYYVDSLIGHEGDEVFAARFGPPGPGAQGRPAGVADGPAATAAEFASCSFAPRSAVFSASWSAVPSQPPAAAAMSGLYHPYVPPPPLAASASEPGRYVRSWMEPLPGFPGGAGGGGGGGGGGPGRGPSPGPSGPANGRHYGIKPETRAAPAPATAASTTSSSSTSLSSSSKRTECSVARESQGSSGPEFSCNSFLQEKAAAATGGTGPGAGIGAATGTGGSSEPSACSDHPIPGCSLKEEEKQHSQPQQQQLDPNNPAANWIHARSTRKKRCPYTKYQTLELEKEFLFNMYLTRDRRYEVARILNLTERQVKIWFQNRRMKMKKMSKEKCPKGD

SEQ ID NO: 48320 - protein, 101 aa, Homo sapiens [sequence omitted]

SEQ ID NO: 48321 - protein, 123 aa, Homo sapiens
MTDMCPGEKRKVVIPPSFAYGKEGYAEGKIPPDATLIFEIELYAVTKGPRSIETFKQIDMDNDRQLSKAEINLYLQREFEKDEKPRDKSYQDAVLEDIFKKNDHDGDGFISPKEYNVYQHDEL

SEQ ID NO: 48322 - protein, 122 aa, Homo sapiens
MTDMCPGEKRKVVIPPSFAYGKEGYEGKIPPDATLIFEIELYAVTKGPRSIETFKQIDMDNDRQLSKAEINLYLQREFEKDEKPRDKSYQDAVLEDIFKKNDHDGDGFISPKEYNVYQHDEL

SEQ ID NO: 48323 - protein, 1084 aa, Homo sapiens
MNSTGSGKSSGTVSSVSELLELYEEDPEEILYNLGFGRDEPDIASKIPSRFFNSSSFAKGIDIKVFLSAQMQRMEVENPNYALTSRFRQIEVLTTVANAFSSLYSQVSGTPLQRIGSMSSVTSNKETDPPPPLTRSNTANRLMKTLSKLNLCVDKTEKGESSSPSPSAEKGKILNVSVIEESGNKNDQKSQKIMKKKESSSMLATVKEEVSGSSAAVTENADSDRISDEANSNFNQGTENEQSKETQSHESKLGEESGIVESKLDSDFNISSHSELENSSELKSVHISTPEKEPCAPLTIPSIRNIMTQQKDSFEMEEVQSTEGEAPHVPATYQLGLTKSKRDHLLRTASQHSDSSGFAEDSTDCLSLNHLQVQESLQAMGSSADSCDSETTVTSLGEDLATPTAQDQPYFNESEEESLVPLQKGLEKAAAVADKRKSGSQDFPQCNTIENTGTKQSTCSPGDHIIEITEVEEDLFPAETVELLREASAESDVGKSSESEFTQYTTHHILKSLASIEAKCSDMSSENTTGPPSSMDRVNTALQRAQMKVCSLSNQRMGRSLLKSKDLLKQRYLFAKAGYPLRRSQSLPTTLLSPVRVVSSVNVRLSPGKETRCSPPSFTYKYTPEEEQELEKRVMEHDGQSLVKSTIFISPSSVKKEEAPQSEAPRVEECHHGRTPTCSRLAPPPMSQSTCSLHSIHSEWQERPLCEHTRTLSTHSVPNISGATCSAFASPFGCPYSHRHATYPYRVCSVNPPSAIEMQLRRVLHDIRNSLQNLSQYPMMRGPDPAAAPYSTQKSSVLPLYENTFQELQVMRRSLNLFRTQMMDLELAMLRQQTMVYHHMTEEERFEVDQLQGLRNSVRMELQDLELQLEERLLGLEEQLRAVRMPSPFRSSALMVTELMQEQSYLKSELGLGLGEMGFEIPPGESSESVFSQATSESSSVCSGPSHANRRTGVPSTASVGKSKTPLVARKKVFRASVALTPTAPSRTGSVQTPPDLESSEEVDAAEGAPEVVGPKSEVEEGHGKLPSMPAAEEMHKNVEQDELQQVIREIKESIVGEIRREIVSGLLAAVSSSKASNSKQDYH

SEQ ID NO: 48324 - protein, 1106 aa, Homo sapiens
MNSTGSGKSSGTVSSVSELLELYEEDPEEILYNLGFGRDEPDIASKIPSRFFNSSSFAKGIDIKVFLSAQMQRMEVENPNYALTSRFRQIEVLTTVANAFSSLYSQVSGTPLQRIGSMSSVTSNKETDPPPPLTRSNTANRLMKTLSKLNLCVDKTEKGESSSPSPSAEKGKILNVSVIEESGNKNDQKSQKIMKKKESSSMLATVKEEVSGSSAAVTENADSDRISDEANSNFNQGTENEQSKETQSHESKLGEESGIVESKLDSDFNISSHSELENSSELKSVHISTPEKEPCAPLTIPSIRNIMTQQKDSFEMEEVQSTEGEAPHVPATYQLGLTKSKRDHLLRTASQHSDSSGFAEDSTDCLSLNHLQVQESLQAMGSSADSCDSETTVTSLGEDLATPTAQDQPYFNESEEESLVPLQKGLEKAAAVADKRKSGSQDFPQCNTIENTGTKQSTCSPGDHIIEITEVEEDLFPAETVELLREASAESDVGKSSESEFTQYTTHHILKSLASIEAKCSDMSSENTTGPPSSMDRVNTALQRAQMKVCSLSNQRMGRSLLKSKDLLKQRYLFAKAGYPLRRSQSLPTTLLSPVRVVSSVNVRLSPGKETRCSPPSFTYKYTPEEEQELEKRVMEHDGQSLVKSTIFISPSSVKKEEAPQSEAPRVEECHHGRTPTCSRLAPPPMSQSTCSLHSIHSEWQERPLCEHTRTLSTHSVPNISGATCSAFASPFGCPYSHRHATYPYRVCSVNPPSAIEMQLRRVLHDIRNSLQNLSQYPMMRGPDPAAAPYSTQKSSVLPLYENTFQELQVMRRSLNLFRTQMMDLELAMLRQQTMVYHHMTEEERFEVDQLQGLRNSVRMELQDLELQLEERLLGLEEQLRAVRMPSPFRSSALMGMCGSRSADNLSCPSPLNVMEPVTELMQEQSYLKSELGLGLGEMGFEIPPGESSESVFSQATSESSSVCSGPSHANRRTGVPSTASVGKSKTPLVARKKVFRASVALTPTAPSRTGSVQTPPDLESSEEVDAAEGAPEVVGPKSEVEEGHGKLPSMPAAEEMHKNVEQDELQQVIREIKESIVGEIRREIVSGLLAAVSSSKASNSKQDYH

SEQ ID NO: 48325 - protein, 768 aa, Homo sapiens
MAILVGTDQDFYSLLGVSKTASSREIRQAFKKLALKLHPDKNPNNPNAHGDFLKINRAYEVLKDEDLRKKYDKYGEKGLEDNQGGQYESWNYYRYDFGIYDDDPEIITLERREFDAAVNSGELWFVNFYSPGCSHCHDLAPTWRDFAKEVDGLLRIGAVNCGDDRMLCRMKGVNSYPSLFIFRSGMAPVKYHGDRSKESLVSFAMQHVRSTVTELWTGNFVNSIQTAFAAGIGWLITFCSKGGDCLTSQTRLRLSGMLDGLVNVGWMDCATQDNLCKSLDITTSTTAYFPPGATLNNKEKNSILFLNSLDAKEIYLEVIHNLPDFELLSANTLEDRLAHHRWLLFFHFGKNENSNDPELKKLKTLLKNDHIQVGRFDCSSAPDICSNLYVFQPSLAVFKGQGTKEYEIHHGKKILYDILAFAKESVNSHVTTLGPQNFPANDKEPWLVDFFAPWCPPCRALLPELRRASNLLYGQLKFGTLDCTVHEGLCNMYNIQAYPTTVVFNQSNIHEYEGHHSAEQILEFIEDLMNPSVVSLTPTTFNELVTQRKHNEVWMVDFYSPWCHPCQVLMPEWKRMARTLTGLINVGSIDCQQYHSFCAQENVQRYPEIRFFPPKSNKAYHYHSYNGWNRDAYSLRIWGLGFLPQVSTDLTPQTFSEKVLQGKNHWVIDFYAPWCGPCQNFAPEFELLARMIKGKVKAGKVDCQAYAQTCQKAGIRAYPTVKFYFYERAKRNFQEEQINTRDAKAIAALISEKLETLRNQGKRNKDEL

SEQ ID NO: 48326 - protein, 377 aa, Homo sapiens
MQLCPDYFQDFDPSEKVTKICDQDGNWFRHPASNRTWTNYTQCNVNTHEKVKTALNLFYLTIIGHGLSIASLLISLGIFFYFKSLSCQRITLHKNLFFSFVCNSVVTIIHLTAVANNQALVATNPVSCKVSQFIHLYLMGCNYFWMLCEGIYLHTLIVVAVFAEKQHLMWYYFLGWGFPLIPACIHAIARSLYYNDNCWISSDTHLLYIIHGPICAALLVNLFFLLNIVRVLITKLKVTHQAESNLYMKAVRATLILVPLLGIEFVLIPWRPEGKIAEEVYDYIMHILMHFQGLLVSTIFCFFNGEVQAILRRNWNQYKIQFGNSFSNSEALRSASYTVSTISDGPGYSHDCPSEHLNGKSIHDIENVLLKPENLYN

SEQ ID NO: 48327 - protein, 137 aa, Homo sapiens
MNSRGMWLTYALGVGLLHIVLLSIPFFSVPVAWTLTNIIHNLGMYVFLHAVKGTPFETPDQGKARLLTHWEQLDYGVQFTSSRKFFTISPIILYFLASFYTKYDPTHFILNTASLLSVLIPKMPQLHGVRIFGINKY

SEQ ID NO: 48328 - protein, 335 aa, Homo sapiens [sequence omitted]

SEQ ID NO: 48329 - protein, 559 aa, Homo sapiens
MVNQEVLTLQEMLNSLDFKRKEALSKMTQIIHETDLLMNTMLIEELQDWKRRQQIACIGGPLHNGLDQLQNCFTLLAESLFQLRRQLEKLEEQSTKMTYEGDPIPMQRTHMLERVTFLIYNLFKNSFVVERQPCMPTHPQRPLVLKTLIQFTVKLRLLIKLPELNYQVKVKASIDKNVSTLSNRRFVLCGTNVKAMSIEESSNGSLSVEFRHLQPKEMKSSAGGKGNEGCHMVTEELHSITFETQICLYGLTIDLETSSLPVVMISNVSQLPNAWASIIWYNVSTNDSQNLVFFNNPPPATLSQLLEVMSWQFSSYVGRGLNSDQLHMLAEKLTVQSSYSDGHLTWAKFCKEHLPGKSFTFWTWLEAILDLIKKHILPLWIDGYVMGFVSKEKERLLLKDKMPGTFLLRFSESHLGGITFTWVDHSESGEVRFHSVEPYNKGRLSALPFADILRDYKVIMAENIPENPLKYLYPDIPKDKAFGKHYSSQPCEVSRPTERGDKGYVPSVFIPISTIRSDSTEPHSPSDLLPMSPSVYAVLRENLSPTTIETAMKSPYSAE

SEQ ID NO: 48330 - protein, 358 aa, Homo sapiens
MLDAVQENQHKMEQRQISLEGSVKGIQNDLTKLSKYQASTSNTVSKLLEKSRKVSAHTRAVKERMDRQCAQVKRLENNHAQLLRRNHFKVLIFQEENEIPASVFVKQPVSGAVEGKEELPDENKSLEETLHTVDLSSDDDLPHDEEALEDSAEEKVEESRAEKIKRSSLKKVDSLKKAFSRQNIEKKMNKLGTKIVSVERREKIKKSLTSNHQKISSGKSSPFKVSPLTFGRKKVREGESHAENETKSEDLPSSEQMPNDQEEESFAEGHSEASLASALVEGEIAEEAAEKATSRGSNSGMDSNIDLTIVEDEEEESVALEQAQKVRYEGSYALTSEEAERSDGDPVQPAVLQVHQTS

SEQ ID NO: 48331 - protein, 543 aa, Homo sapiens
MLGENEDDEEEEEEEEEEEEEEETPEQPTAGDVFVLEMVLNRETKKMMKEKRPRSKLPRALRGLMGEANIRFARGEREEAILMCMEIIRQAPLAYEPFSTLAMIYEDQGDMEKSLQFELIAAHLNPSDTEEWVRLAEMSLEQDNIKQAIFCYTKALKYEPTNVRYLWERSSLYEQMGDHKMAMDGYRRILNLLSPSDGERFMQLARDMAKSYYEANDVTSAINIIDEAFSKHQGLVSMEDVNIAAELYISNKQYDKALEIITDFSGIVLEKKTSEEGTSEENKAPENVTCTIPDGVPIDITVKLMVCLVHLNILEPLNPLLTTLVEQNPEDMGDLYLDVAEAFLDVGEYNSALPLLSALVCSERYNLAVVWLRHAECLKALGYMERAAESYGKVVDLAPLHLDARISLSTLQQQLGQPEKALEALEPMYDPDTLAQDANAAQQELKLLLHRSTLLFSQGKMYGYVDTLLTMLAMLLKVAMNRAQVCLISSSKSGERHLYLIKVSRDKISDSNDQESANCDAKGLSKGGFLQRTKEEKEVVKET

SEQ ID NO: 48332 - protein, 390 aa, Homo sapiens
MLASMFSGRFPLKTDESGACVIDRDGRLFKYLLDYLHGEVQIPTDEQTRIALQEEADYFGIPYPYSLSDHLANEMETYSLRSNIELKKALTDFCDSYGLVCNKPTVWVLHYLNTSGASCESRIIGVYATKTDGTDAIEKQLGGRIHSKGIFKREAGNNVQYIWSYYSVAELKKMMDAFDAWEGKGVSYWRVPHELIECWTLEERPLLGSLRHMAPIRKRRLITFNEADESVNYKTGPKPVRFLGPSTSTQIKVKNSASVTVSPASAIQTSAGATANRFQSGSRRKAAQRSAPSRATALVGTGAPGHPQASPGAASAENGGTHLPPAKVLLSDKKPTPQRVIKLKRTPLCATAPCLPSPTATRQANSLKPLPGEAARALGVRTENGKNKGN

SEQ ID NO: 48333 - protein, 1186 aa, Homo sapiens [sequence omitted]

SEQ ID NO: 48334 - protein, 276 aa, Homo sapiens
MDFSRNLYDIGEQLDSEDLASLKFLSLDYIPQRKQEPIKDALMLFQRLQEKRMLEESNLSFLKELLFRINRLDLLITYLNTRKEEMERELQTPGRAQISAYRVMLYQISEEVSRSELRSFKFLLQEEISKCKLDDDMNLLDIFIEMEKRVILGEGKLDILKRVCAQINKSLLKIINDYEEFSKERSSSLEGSPDEFSNGEELCGVMTISDSPREQDSESQTLDKVYQMKSKPRGYCLIINNHNFAKAREKVPKLHSIRDRNGTHLDAGTVEPKREK

SEQ ID NO: 48335 - protein, 801 aa, Homo sapiens
MVTHLLAERDRDLELAARIGQALLKRNHVLSEQNESLEEQLGQAFDQVNQLQHELCKKDELLRIVSIASEESETDSSCSTPLRFNESFSLSQGLLQLEMLQEKLKELEEENMALRSKACHIKTETVTYEEKEQQLVSDCVKELRETNAQMSRMTEELSGKSDELIRYQEELSSLLSQIVDLQHKLKEHVIEKEELKLHLQASKDAQRQLTMELHELQDRNMECLGMLHESQEEIKELRSRSGPTAHLYFSQSYGAFTGESLAAEIEGTMRKKLSLDEESSLFKQKAQQKRVFDTVRIANDTRGRSISFPALLPIPGSNRSSVIMTAKPFESGLQQTEDKSLLNQGSSSEEVAGSSQKMGQPGPSGDSDLATALHRLSLRRQNYLSEKQFFAEEWQRKIQVLADQKEGVSGCVTPTESLASLCTTQSEITDLSSASCLRGFMPEKLQIVKPLEGSQTLYHWQQLAQPNLGTILDPRPGVITKGFTQLPGDAIYHISDLEEDEEEGITFQVQQPLEVEEKLSTSKPVTGIFLPPITSAGGPVTVATANPGKCLSCTNSTFTFTTCRILHPSDITQVTPSSGFPSLSCGSSGSSSSNTAVNSPALSYRLSIGESITNRRDSTTTFSSTMSLAKLLQERGISAKVYHSPISENPLQPLPKSLAIPSTPPNSPSHSPCPSPLPFEPRVHLSENFLASRPAETFLQEMYGLRPSRNPPDVGQLKMNLVDRLKRLGIARVVKNPGAQENGRCQEAEIGPQKPDSAVYLNSGSSLLGGLRRNQSLPVIMGSFAAPVCTSSPKMGVLKED

SEQ ID NO: 48336 - protein, 4 aa, Homo sapiens
MDML

SEQ ID NO: 48337 - protein, 390 aa, Homo sapiens [sequence omitted]

SEQ ID NO: 48338 - protein, 103 aa, Homo sapiens
MEFQYQATGGRGVALQVVREASQESKLLWVIREDQGGEWKHGRIILPSYDMEYQIVFEGVIGKGRSGEIAIDDIRISTDVPLENCMEPISAFAVPGYQGSGFS

SEQ ID NO: 48339 - protein, 726 aa, Homo sapiens
MQKEITLPSRLIYYINQDSESPYHVLDTKARHQQKHNKAVHLAQASFQIEAFGSKFILDLILNNGLLSSDYVEIHYENGKPQYSKGGEHCYYHGSIRGVKDSKVALSTCNGLHGMFEDDTFVYMIEPLELVHDEKSTGRPHIIQKTLAGQYSKQMKNLTMERGDQWPFLSELQWLKRRKRAVNPSRGIFEEMKYLELMIVNDHKTYKKHRSSHAHTNNFAKSVVNLVDSIYKEQLNTRVVLVAVETWTEKDQIDITTNPVQMLHEFSKYRQRIKQHADAVHLISRVTFHYKRSSLSYFGGVCSRTRGVGVNEYGLPMAVAQVLSQSLAQNLGIQWEPSSRKPKCDCTESWGGCIMEETGVSHSRKFSKCSILEYRDFLQRGGGACLFNRPTKLFEPTECGNGYVEAGEECDCGFHVECYGLCCKKCSLSNGAHCSDGPCCNNTSCLFQPRGYECRDAVNECDITEYCTGDSGQCPPNLHKQDGYACNQNQGRCYNGECKTRDNQCQYIWGTKAAGSDKFCYEKLNTEGTEKGNCGKDGDRWIQCSKHDVFCGFLLCTNLTRAPRIGQLQGEIIPTSFYHQGRVIDCSGAHVVLDDDTDVGYVEDGTPCGPSMMCLDRKCLQIQALNMSSCPLDSKGKVCSGHGVCSNEATCICDFTWAGTDCSIRDPVRNLHPPKDEGPKVNMATSRLIGAVAGTILALGVIFGGTGWGIENVKKRRFDPTQQGPI

SEQ ID NO: 48340 - protein, 670 aa, Homo sapiens
MRLCCLGLCKPKIVHSNWNILNNFHNRMQSTDIIRYLFQDAFIFKSDVGFQTKGISTLTALRIERLLYAKRLFFDSKQSLVPVDKSDDELKKVNLNHEVSNEDVLTKETKPNRISSRKLSEECNSLSDVLDAFSKAPTFPSSNYFTAMWTIAKRLSDDQKRFEKRLMFSHPAFNQLCEHMMREAKIMQYKYLLFSLHAIVKLGIPQNTILVQTLLRVTQERINECDEICLSVLSTVLEAMEPCKNVHVLRTGFRILVDQQVWKIEDVFTLQVVMKCIGKDAPIALKRKLEMKALRELDRFSVLNSQHMFEVLAAMNHRSLILLDECSKVVLDNIHGCPLRIMINILQSCKDLQYHNLDLFKGLADYVAATFDIWKFRKVLFILILFENLGFRPVGLMDLFMKRIVEDPESLNMKNILSILHTYSSLNHVYKCQNKEQFVEVMASALTGYLHTISSENLLDAVYSFCLMNYFPLAPFNQLLQKDIISELLTSDDMKNAYKLHTLDTCLKLDDTVYLRDIALSLPQLPRELPSSHTNAKVAEVLSSLLGGEGHFSKDVHLPHNYHIDFEIRMDTNRNQVLPLSDVDTTSATDIQRVAVLCVSRSAYCLGSSHPRGFLAMKMRHLNAMGFHVILVNNWEMDKLEMEDAVTFLKTKIYSVEALPVAAVNVQSTQ

SEQ ID NO: 48341 - protein, 397 aa, Homo sapiens [sequence omitted]

SEQ ID NO: 48342 - protein, 26 aa, Homo sapiens
MKRRAVGIWHCGSCMKTVAGGAWTYK

SEQ ID NO: 48343 - protein, 46 aa, Homo sapiens
MKRRAVGIWHCGSCMKTVAGGAWTYNTTSAVTVKSAIRRLKELKDQ

SEQ ID NO: 48344 - protein, 216 aa, Homo sapiens [sequence omitted]

SEQ ID NO: 48345 - protein, 245 aa, Homo sapiens
MVSISLKFYKELQAHGADELLKRVYGSFLVNPESGYNVSLLYDLENLPASKDSIVHQAGMLKRNCFASVFEKYFQFQEEGKEGENRAVIHYRDDETMYVESKKDRVTVVFSTVFKDDDDVVIGKVFMQEFKEGRRASHTAPQVLFSHREPPLELKDTDAAVGDNIGYITFVLFPRHTNASARDNTINLIHTFRDYLHYHIKCSKAYIHTRMRAKTSDFLKVLNRARPDAEKKEMKTITGKTFSSR

SEQ ID NO: 48346 - protein, 869 aa, Homo sapiens
MKPSQGSGSFGAILGSRTSQKETSRQLSYSDNQASAKRGSLETKDDIPFRKVLGNPGRGSIKTVAGSGIARTIPSLTSTSTPLRSGLLENRTEKRKRMISTGSELNEDYPKENDSSSNNKAMTDPSRKYLTSSREKQLSLKQSEENRTSGLLPLQSSSFYGSRAGSKEHSSGGTNLDRTNVSSQTPSAKRSLGFLPQPVPLSVKKLRCNQDYTGWNKPRVPLSSHQQQQLQGFSNLGNTCYMNAILQSLFSLQSFANDLLKQGIPWKKIPLNALIRRFAHLLVKKDICNSETKKDLLKKVKNAISATAERFSGYMQNDAHEFLSQCLDQLKEDMEKLNKTWKTEPVSGEENSPDISATRAYTCPVITNLEFEVQHSIICKACGEIIPKREQFNDLSIDLPRRKKPLPPRSIQDSLDLFFRAEELEYSCEKCGGKCALVRHKFNRLPRVLILHLKRYSFNVALSLNNKIGQQVIIPRYLTLSSHCTENTKPPFTLGWSAHMAISRPLKASQMVNSCITSPSTPSKKFTFKSKSSLALCLDSDSEDELKRSVALSQRLCEMLGNEQQQEDLEKDSKLCPIEPDKSELENSGFDRMSEEELLAAVLEISKRDASPSLSHEDDDKPTSSPDTGFAEDDIQEMPENPDTMETEKPKTITELDPASFTEITKDCDENKENKTPEGSQGEVDWLQQYDMEREREEQELQQALAQSLQEQEAWEQKEDDDLKRATELSLQEFNNSFVDALGSDEDSGNEDVFDMEYTEAEAEELKRNAETGNLPHSYRLISVVSHIGSTSSSGHYISDVYDIKKQAWFTYNDLEVSKIQEAAVQSDRDRSGYIFFYMHKEIFDELLETEKNSQSLSTEVGKTTRQAL

SEQ ID NO: 48347 - protein, 347 aa, Homo sapiens
MLYELIEKGKEILTDNNIPHGQCVICLYGFQEKEAFTKTPCYHYFHCHCLARYIQHMEQELKAQGQEQEQERQHATTKQKAVGVQCPVCREPLVYDLASLKAAPEPQQPMELYQPSAESLRQQEERKRLYQRQQERGGIIDLEAERNRYFISLQQPPAPAEPESAVDVSKGSQPPSTLAAELSTSPAVQSTLPPPLPVATQHICEKIPGTRSNQQRLGETQKAMLDPPKPSRGPWRQPERRHPKGGECHAPKGTRDTQELPPPEGPLKEPMDLKPEPHSQGVEGPPQEKGPGSWQGPPPRRTRDCVRWERSKGRTPGSSYPRLPRGQGAYRPGTRRESLGLESKDGS

SEQ ID NO: 48348 - protein, 1250 aa, Homo sapiens
MLDSFETDKEVVVVTDYAEGELFQILEDDGKLPEDQVQAIAAQLVSALYYLHSHRILHRDMKPQNILLAKGGGIKLCDFGFARAMSTNTMVLTSIKGTPLYMSPELVEERPYDHTADLWSVGCILYELAVGTPPFYATSIFQLVSLILKDPVRWPSTISPCFKNFLQGLLTKDPRQRLSWPDLLYHPFIAGHVTIITEPAGPDLGTPFTSRLPPELQVLKDEQAHRLAPKGNQSRILTQAYKRMAEEAMQKKHQNTGPALEQEDKTSKVAPGTAPLPRLGATPQESSLLAGILASELKSSWAKSGTGEVPSAPRENRTTPDCERAFPEERPEVLGQRSTDVVDLENEEPDSDNEWQHLLETTEPVPIQLKAPLTLLCNPDFCQRIQSQLHEAGGQILKGILEGASHILPAFRVLSSLLSSCSDSVALYSFCREAGLPGLLLSLLRHSQESNSLQQQSWYGTFLQDLMAVIQAYFACTFNLERSQTSDSLQVFQEAANLFLDLLGKLLAQPDDSEQTLRRDSLMCFTVLCEAMDGNSRAISKAFYSSLLTTQQVVLDGLLHGLTVPQLPVHTPQGAPQVSQPLREQSEDIPGAISSALAAICTAPVGLPDCWDAKEQVCWHLANQLTEDSSQLRPSLISGLQHPILCLHLLKVLYSCCLVSEGLCRLLGQEPLALESLFMLIQGKVKVVDWEESTEVTLYFLSLLVFRLQNLPCGMEKLGSDVATLFTHSHVVSLVSAAACLLGQLGQQGVTFDLQPMEWMAAATHALSAPAEVRLTPPGSCGFYDGLLILLLQLLTEQGKASLIRDMSSSEMWTVLWHRFSMVLRLPEEASAQEGELSLSSPPSPEPDWTLISPQGMAALLSLAMATFTQEPQLCLSCLSQHGSILMSILKHLLCPSFLNQLRQAPHGSEFLPVVVLSVCQLLCFPFALDMDADLLIGVLADLRDSEVAAHLLQVCCYHLPLMQVELPISLLTRLALMDPTSLNQFVNTVSASPRTIVSFLSVALLSDQPLLTSDLLSLLAHTARVLSPSHLSFIQELLAGSDESYRPLRSLLGHPENSVRAHTYRLLGHLLQHSMALRGALQSQSGLLSLLLLGLGDKDPVVRCSASFAVGNAAYQAGPLGPALAAAVPSMTQLLGDPQAGIRRNVASALGNLGPEGLGEELLQCEVPQRLLEMACGDPQPNVKEAALIALRSLQQEPGIHQVLVSLGASEKLSLLSLGNQSLPHSSPRPASAKHCRKLIHLLRPAHSM

SEQ ID NO: 48349 - protein, 163 aa, Homo sapiens
MSLALQCQVRELATLLHMKDLEIQDYQESGATLIRDRLKTEPFEENSFLEQFMIEKLPEACSIGDGKPFVMNLQDLYMAVTTQEVQVGQKHQGAGEPSRGDPHTSNSASLQGIDSQCVNQPEQLVSSAPTLSAPEKESTGTSGPLQRPQLSKVKRKKPRGLFS

SEQ ID NO: 48350 - protein, 3159 aa, Homo sapiens
MAQNERGRASCEAVLTVLEVGDSETAEDDISDVQGTQRLELRDDGAFSTPTGGSDTLVGTSLDTPPTSVTGTSEEQVSWWGSGQTVLEQEAGSGGGTRRLPGSPRQAQATGAGPRHLGVEPLVRASRANLVGASWGSEDSLSVASDLYGSAFSLYRGRALSIHVSVPQSGLRREEPDLQPQLASEAPRRPAQPPPSKSALLPPPSPRVGKRSPPGPPAQPAATPTSPHRRTQEPVLPEDTTTEEKRGKKSKSSGPSLAGTAESRPQTPLSEASGRLSALGRSPRLVRAGSRILDKLQFFEERRRSLERSDSPPAPLRPWVPLRKARSLEQPKSERGAPWGTPGASQEELRAPGSVAERRRLFQQKAASLDERTRQRSPASDLELRFAQELGRIRRSTSREELVRSHESLRATLQRAPSPREPGEPPLFSRPSTPKTSRAVSPAAAQPPSPSSAEKPGDEPGRPRSRGPAGRTEPGEGPQQEVRRRDQFPLTRSRAIQECRSPVPPPAADPPEARTKAPPGRKREPPAQAVRFLPWATPGLEGAAVPQTLEKNRAGPEAEKRLRRGPEEDGPWGPWDRRGARSQGKGRRARPTSPELESSDDSYVSAGEEPLEAPVFEIPLQNVVVAPGADVLLKCIITANPPPQVSWHKDGSALRSEGRLLLRAEGERHTLLLREARAADAGSYMATATNELGQATCAASLTVRPGGSTSPFSSPITSDEEYLSPPEEFPEPGETWPRTPTMKPSPSQNRRSSDTGSKAPPTFKVSLMDQSVREGQDVIMSIRVQGEPKPVVSWLRNRQPVRPDQRRFAEEAEGGLCRLRILAAERGDAGFYTCKAVNEYGARQCEARLEVRAHPESRSLAVLAPLQDVDVGAGEMALFECLVAGPTDVEVDWLCRGRLLQPALLKCKMHFDGRKCKLLLTSVHEDDSGVYTCKLSTAKDELTCSARLTVRPSLAPLFTRLLEDVEVLEGRAARFDCKISGTPPPVVTWTHFGCPMEESENLRLRQDGGLHSLHIAHVGSEDEGLYAVSAVNTHGQAHCSAQLYVEEPRTAASGPSSKLEKMPSIPEEPEQGELERLSIPDFLRPLQDLEVGLAKEAMLECQVTGLPYPTISWFHNGHRIQSSDDRRMTQYRDVHRLVFPAVGPQHAGVYKSVIANKLGKAACYAHLYVTDVVPGPPDGAPQVVAVTGRMVTLTWNPPRSLDMAIDPDSLTYTVQHQVLGSDQWTALVTGLREPGWAATGLRKGVQHIFRVLSTTVKSSSKPSPPSEPVQLLEHGPTLEEAPAMLDKPDIVYVVEGQPASVTVTFNHVEAQVVWRSCRGALLEARAGVYELSQPDDDQYCLRICRVSRRDMGALTCTARNRHGTQTCSVTLELAEAPRFESIMEDVEVGAGETARFAVVVEGKPLPDIMWYKDEVLLTESSHVSFVYEENECSLVVLSTGAQDGGVYTCTAQNLAGEVSCKAELAVHSAQTAMEVEGVGEDEDHRGRRLSDFYDIHQEIGRGAFSYLRRIVERSSGLEFAAKFIPSQAKPKASARREARLLARLQHDCVLYFHEAFERRRGLVIVTELCTEELLERIARKPTVCESEIRAYMRQVLEGIHYLHQSHVLHLDVKPENLLVWDGAAGEQQVRICDFGNAQELTPGEPQYCQYGTPEFVAPEIVNQSPVSGVTDIWPVGVVAFLCLTGISPFVGENDRTTLMNIRNYNVAFEETTFLSLSREARGFLIKVLVQDRLRPTAEETLEHPWFKTQAKGAEVSTDHLKLFLSRRRWQRSQISYKCHLVLRPIPELLRAPPERVWVTMPRRPPPSGGLSSSSDSEEEELEELPSVPRPLQPEFSGSRVSLTDIPTEDEALGTPETGAATPMDWQEQGRAPSQDQEAPSPEALPSPGQEPAAGASPRRGELRRGSSAESALPRAGPRELGRGLHKAASVELPQRRSPSPGATRLARGGLGEGEYAQRLQALRQRLLRGGPEDGKVSGLRGPLLESLGGRARDPRMARAASSEAAPHHQPPLENRGLQKSSSFSQGEAEPRGRHRRAGAPLEIPVARLGARRLQESPSLSALSEAQPSSPARPSAPKPSTPKSAEPSATTPSDAPQPPAPQPAQDKAPEPRPEPVRASKPAPPPQALQTLALPLTPYAQIIQSLQLSGHAQGPSQGPAAPPSEPKPHAAVFARVASPPPGAPEKRVPSAGGPPVLAEKARVPTVPPRPGSSLSSSIENLESEAVFEAKFKRSRESPLSLGLRLLSRSRSEERGPFRGAEEEDGIYRPSPAGTPLELVRRPERSRSVQDLRAVGEPGLVRRLSLSLSQRLRRTPPAQRHPAWEARGGDGESSEGGSSARGSPVLAMRRRLSFTLERLSSRLQRSGSSEDSGGASGRSTPLFGRLRRATSEGESLRRLGLPHNQLAAQAGATTPSAESLGSEASATSGSSAPGESRSRLRWGFSRPRKDKGLSPPNLSASVQEELGHQYVRSESDFPPVFHIKLKDQVLLEGEAATLLCLPAACPAPHISWMKDKKSLRSEPSVIIVSCKDGRQLLSIPRAGKRHAGLYECSATNVLGSITSSCTVAVARVPGKLAPPEVPQTYQDTALVLWKPGDSRAPCTYTLERRVDGESVWHPVSSGIPDCYYNVTHLPVGVTVRFRVACANRAGQGPFSNSSEKVFVRGTQDSSAVPSAAHQEAPVTSRPARARPPDSPTSLAPPLAPAAPTPPSVTVSPSSPPTPPSQALSSLKAVGPPPQTPPRRHRGLQAARPAEPTLPSTHVTPSEPKPFVLDTGTPIPASTPQGVKPVSSSTPVYVVTSFVSAPPAPEPPAPEPPPEPTKVTVQSLSPAKEVVSSPGSSPRSSPRPEGTTLRQGPPQKPYTFLEEKARGRFGVVRACRENATGRTFVAKIVPYAAEGKRRVLQEYEVLRTLHHERIMSLHEAYITPRYLVLIAESCGNRELLCGLSDRFRYSEDDVATYMVQLLQGLDYLHGHHVLHLDIKPDNLLLAPDNALKIVDFGSAQPYNPQALRPLGHRTGTLEFMAPEMVKGEPIGSATDIWGAGVLTYIMLSGRSPFYEPDPQETEARIVGGRFDAFQLYPNTSQSATLFLRKVLSVHPWSRPSLQDCLAHPWLQDAYLMKLRRQTLTFTTNRLKEFLGEQRRRRAEAATRHKVLLRSYPGGP

SEQ ID NO: 48351 - protein, 422 aa, Homo sapiens
MAHHGIRPCVISRQLRVSHGCVSKILCRYQETGSIRPGAIGGSKPKVTTPDVEKKIEEYKRENPGMFSWEIRDKLLKDAVCDRNTVPSVSSISRILRSKFGKGEEEEADLERKEAEESEKKAKHSIDGILSERASAPQSDEGSDIDSEPDLPLKRKQRRSRTTFTAEQLEELERAFERTHYPDIYTREELAQRAKLTEARVQVWFSNRRARWRKQAGANQLMAFNHLIPGGFPPTAMPTLPTYQLSETSYQPTSIPQAVSDPSSTVHRPQPLPPSTVHQSTIPSNPDSSSAYCLPSTRHGFSSYTDSFVPPSGPSNPMNPTIGNGLSPQVMGLLTNHGGVPHQPQTDYALSPLTGGLEPTTTVSASCSQRLDHMKSLDSLPTSQSYCPPTYSTTGYSMDPVTGYQYGQYGQSAFHYLKPDIA

SEQ ID NO: 48352 - protein, 490 aa, Homo sapiens
MPDGKIQKLIITEETAKIRPFAVAAVLRNIKFTKDRYDSFIELQEKLHQNICRKRALVAIGTHDLDTLSGPFTYTAKRPSDIKFKPLNKTKEYTACELMNIYKTDNHLKHYLHIIENKPLYPVIYDSNGVVLSMPPIINGDHSRITVNTRNIFIECTGTDFTKAKIVLDIIVTMFSEYCENQFTVEAAEVVFPNGKSHTFPELAYRKEMVRADLINKKVGIRETPENLAKLLTRMYLKSEVIGDGNQIEIEIPPTRADIIHACDIVEDAAIAYGYNNIQMTLPKTYTIANQFPLNKLTELLRHDMAAAGFTEALTFALCSQEDIADKLGVDISATKAVHISNPKTAEFQVARTTLLPGLLKTIAANRKMPLPLKLFEISDIVIKDSNTDVGAKNYRHLCAVYYNKNPGFEIIHGLLDRIMQLLDVPPGEDKGGYVIKASEGPAFFPGRCAEIFARGQSVGKLGVLHPDVITKFELTMPCSSLEINVGPFL

SEQ ID NO: 48353 - protein, 170 aa, Homo sapiens
MLKMEPLNSTHPGTAASSSPLESRAAGGGSGNGNEYFYILVVMSFYGIFLIGIMLGYMKSKRREKKSSLLLLYKDEERLWGEAMKPLPVVSGLRSVQVPLMLNMLQESVAPALSCTLCSMEGDSVSSESSSPDVHLTIQEEGADDELEETSETPLNESSEGSSENIHQNS

SEQ ID NO: 48354 - protein, 678 aa, Homo sapiens
MSEDEEDDSSGEEVVIPQKKGKKAAATSAKKVVVSPTKKVAVATPAKKAAVTPGKKAAATPAKKTVTPAKAVTTPGKKGATPGKALVATPGKKGAAIPAKGAKNGKNAKKEDSDEEEDDDSEEDEEDDEDEDEDEDEIEPAAMKAAAAAPASEDEDDEDDEDDEDDDDDEEDDSEEEAMETTPAKGKKAAKVVPVKAKNVAEDEDEEEDDEDEDDDDDEDDEDDDDEDDEEEEEEEEEEPVKEAPGKRKKEMAKQKAAPEAKKQKVEGTEPTTAFNLFVGNLNFNKSAPELKTGISDVFAKNDLAVVDVRIGMTRKFGYVDFESAEDLEKALELTGLKVFGNEIKLEKPKGKDSKKERDARTLLAKNLPYKVTQDELKEVFEDAAEIRLVSKDGKSKGIAYIEFKTEADAEKTFEEKQGTEIDGRSISLYYTGEKGQNQDYRGGKNSTWSGESKTLVLSNLSYSATEETLQEVFEKATFIKVPQNQNGKSKGYAFIEFASFEDAKEALNSCNKREIEGRAIRLELQGPRGSPNARSQPSKTLFVKGLSEDTTEETLKESFDGSVRARIVTDRETGSSKGFGFVDFNSEEDAKAAKEAMEDGEIDGNKVTLDWAKPKGEGGFGGRGGGRGGFGGRGGGRGGRGGFGGRGRGGFGGRGGFRGGRGGGGDHKPQGKKTKFE

SEQ ID NO: 48355 - protein, 358 aa, Homo sapiens
MSEDEEDDSSGEEVVIPQKKGKKAAATSAKKVVVSPTKKVAVATPAKKAAVTPGKKAAATPAKKTVTPAKAVTTPGKKGATPGKALVATPGKKGAAIPAKGAKNGKNAKKEDSDEEEDDDSEEDEEDDEDEDEDEDEIEPAAMKAAAAAPASEDEDDEDDEDDEDDDDDEEDDSEEEAMETTPAKGKKAAKVVPVKAKNVAEDEDEEEDDEDEDDDDDEDDEDDDDEDDEEEEEEEEEEPVKEAPGKRKKEMAKQKAAPEAKKQKVEGTEPTTAFNLFVGNLNFNKSAPELKTGISDVFAKNDLAVVDVRIGMTRKFGYVDFESAEDLEKALELTGLKVFGNEIKLEKPKGKDSKKGM

SEQ ID NO: 48356 - protein, 723 aa, Homo sapiens
MWVDAVIFVFSLEDEISFQTVYHYYSRMANYRNTSEIPLVLVGTQDAISSANPRVIDDARARKLSNDLKRCTYYETCATYGLNVERVFQDVAQKIVATRKKQQLSIGPCKSLPNSPSHSSVCSAQVSAVHISQTSNGGGSLSDYSSSVPSTPSTSQKELRIDVPPTANTPTPVRKQSKRRSNLFTSRKGSDPDKEKKGLESRADSIGSGRAIPIKQGMLLKRSGKSLNKEWKKKYVTLCDNGVLTYHPSLHDYMQNVHGKEIDLLRTTVKVPGKRPPRATSACAPISSPKTNGLSKDMSSLHISPNSGNVTSASGSQMASGISLVSFNSRPDGMHQRSYSVSSADQWSEATVIANSAISSDTGLGDSVCSSPSISSTTSPKLDPPPSPHANRKKHRRKKSTSNFKADGLSGTAEEQEENFEFIIVSLTGQTWHFEATTYEERDAWVQAIESQILASLQSCESSKNKSRLTSQSEAMALQSIRNMRGNSHCVDCETQNPNWASLNLGALMCIECSGIHRNLGTHLSRVRSLDLDDWPVELIKVMSSIGNELANSVWEESSQGRTKPSVDSTREEKERWIRAKYEQKLFLAPLPCTELSLGQHLLRATADEDLRTAILLLAHGSRDEVNETCGEGDGRTALHLACRKGNVVLAQLLIWYGVDVTARDAHGNTALAYARQASSQECIDVLLQYGCPDERFVLMATPNLSRRNNNRNNSSGRVPTII

SEQ ID NO: 48357 - protein, 3069 aa, Homo sapiens
MSYIGGTNQTGKGLEYIMQSHLTKAAGSRAGDGVPQVIVVLTDGHSKDGLALPSAELKSADVNVFAIGVEDADEGALKEIASEPLNMHMFNLENFTSLHDIVGNLVSCVHSSVSPERAGDTETLKDITAQDSADIIFLIDGSNNTGSVNFAVILDFLVNLLEKLPIGTQQIRVGVVQFSDEPRTMFSLDTYSTKAQVLGAVKALGFAGGELANIGLALDFVVENHFTRAGGSRVEEGVPQVLVLISAGPSSDEIRYGVVALKQASVFSFGLGAQAASRAELQHIATDDNLVFTVPEFRSFGDLQEKLLPYIVGVAQRHIVLKPPTIVTQVIEVNKRDIVFLVDGSSALGLANFNAIRDFIAKVIQRLEIGQDLIQVAVAQYADTVRPEFYFNTHPTKREVITAVRKMKPLDGSALYTGSALDFVRNNLFTSSAGYRAAEGIPKLLVLITGGKSLDEISQPAQELKRSSIMAFAIGNKGADQAELEEIAFDSSLVFIPAEFRAAPLQGMLPGLLAPLRTLSGTPEVHSNKRDIIFLLDGSANVGKTNFPYVRDFVMNLVNSLDIGNDNIRVGLVQFSDTPVTEFSLNTYQTKSDILGHLRQLQLQGGSGLNTGSALSYVYANHFTEAGGSRIREHVPQLLLLLTAGQSEDSYLQAANALTRAGILTFCVGASQANKAELEQIAFNPSLVYLMDDFSSLPALPQQLIQPLTTYVSGGVEEVPLAQPESKRDILFLFDGSANLVGQFPVVRDFLYKIIDELNVKPEGTRIAVAQYSDDVKVESRFDEHQSKPEILNLVKRMKIKTGKALNLGYALDYAQRYIFVKSAGSRIEDGVLQFLVLLVAGRSSDRVDGPASNLKQSGVVPFIFQAKNADPAELEQIVLSPAFILAAESLPKIGDLHPQIVNLLKSVHNGAPAPVSGEKDVVFLLDGSEGVRSGFPLLKEFVQRVVESLDVGQDRVRVAVVQYSDRTRPEFYLNSYMNKQDVVNAVRQLTLLGGPTPNTGAALEFVLRNILVSSAGSRITEGVPQLLIVLTADRSGDDVRNPSVVVKRGGAVPIGIGIGNADITEMQTISFIPDFAVAIPTFRQLGTVQQVISERVTQLTREELSRLQPVLQPLPSPGVGGKRDVVFLIDGSQSAGPEFQYVRTLIERLVDYLDVGFDTTRVAVIQFSDDPKVEFLLNAHSSKDEVQNAVQRLRPKGGRQINVGNALEYVSRNIFKRPLGSRIEEGVPQFLVLISSGKSDDEVDDPAVELKQFGVAPFTIARNADQEELVKISLSPEYVFSVSTFRELPSLEQKLLTPITTLTSEQIQKLLASTRYPPPAVESDAADIVFLIDSSEGVRPDGFAHIRDFVSRIVRRLNIGPSKVRVGVVQFSNDVFPEFYLKTYRSQAPVLDAIRRLRLRGGSPLNTGKALEFVARNLFVKSAGSRIEDGVPQHLVLVLGGKSQDDVSRFAQVIRSSGIVSLGVGDRNIDRTELQTITNDPRLVFTVREFRELPNIEERIMNSFGPSAATPAPPGVDTPPPSRPEKKKADIVFLLDGSINFRRDSFQEVLRFVSEIVDTVYEDGDSIQVGLVQYNSDPTDEFFLKDFSTKRQIIDAINKVVYKGGRHANTKVGLEHLRVNHFVPEAGSRLDQRVPQIAFVITGGKSVEDAQDVSLALTQRGVKVFAVGVRNIDSEEVGKIASNSATAFRVGNVQELSELSEQVLETLHDAMHETLCPGVTDAAKACNLDVILGFDGSRDQNVFVAQKGFESKVDAILNRISQMHRVSCSGGRSPTVRVSVVANTPSGPVEAFDFDEYQPEMLEKFRNMRSQHPYVLTEDTLKVYLNKFRQSSPDSVKVVIHFTDGADGDLADLHRASENLRQEGVRALILVGLERVVNLERLMHLEFGRGFMYDRPLRLNLLDLDYELAEQLDNIAEKACCGVPCKCSGQRGDRGPIGSIGPKGIPGEDGYRGYPGDEGGPGERGPPGVNGTQGFQGCPGQRGVKGSRGFPGEKGEVGEIGLDGLDGEDGDKGLPGSSGEKGNPGRRGDKGPRGEKGERGDVGIRGDPGNPGQDSQERGPKGETGDLGPMGVPGRDGVPGGPGETGKNGGFGRRGPPGAKGNKGGPGQPGFEGEQGTRGAQGPAGPAGPPGLIGEQGISGPRGSGGAAGAPGERGRTGPLGRKGEPGEPGPKGGIGNRGPRGETGDDGRDGVGSEGRRGKKGERGFPGYPGPKGNPGEPGLNGTTGPKGIRGRRGNSGPPGIVGQKGDPGYPGPAGPKGNRGDSIDQCALIQSIKDKCPCCYGPLECPVFPTELAFALDTSEGVNQDTFGRMRDVVLSIVNDLTIAESNCPRGARVAVVTYNNEVTTEIRFADSKRKSVLLDKIKNLQVALTSKQQSLETAMSFVARNTFKRVRNGFLMRKVAVFFSNTPTRASPQLREAVLKLSDAGITPLFLTRQEDRQLINALQINNTAVGHALVLPAGRDLTDFLENVLTCHVCLDICNIDPSCGFGSWRPSFRDRRAAGSDVDIDMAFILDSAETTTLFQFNEMKKYIAYLVRQLDMSPDPKASQHFARVAVVQHAPSESVDNASMPPVKVEFSLTDYGSKEKLVDFLSRGMTQLQGTRALGSAIEYTIENVFESAPNPRDLKIVVLMLTGEVPEQQLEEAQRVILQAKCKGYFFVVLGIGRKVNIKEVYTFASEPNDVFFKLVDKSTELNEEPLMRFGRLLPSFVSSENAFYLSPDIRKQCDWFQGDQPTKNLVKFGHKQVNVPNNVTSSPTSNPVTTTKPVTTTKPVTTTTKPVTTTTKPVTIINQPSVKPAAAKPAPAKPVAAKPVATKMATVRPPVAVKPATAAKPVAAKPAAVRPPAAAAAKPVATKPEVPRPQAAKPAATKPATTKPMVKMSREVQVFEITENSAKLHWERAEPPGPYFYDLTVTSAHDQSLVLKQNLTVTDRVIGGLLAGQTYHVAVVCYLRSQVRATYHGSFSTKKSQPPPPQPARSASSSTINLMVSTEPLALTETDICKLPKDEGTCRDFILKWYYDPNTKSCARFWYGGCGGNENKFGSQKECEKVCAPVLAKPGVISVMGT

SEQ ID NO: 48358 - protein, 767 aa, Homo sapiens
MKELERQQKEEDSERYSRRSRRNTSASDEDERMSVGSRGSLRVEERPEKDFTEKGSRNMPGLSAATLASLGGTSSRRGSGDTSISIDTEASIREIKELNELKDQIQDVEGKYMQGLKEMKDSLAEVEEKYKKAMVSNAQLDNEKTNFMYQVDTLKDMLLELEEQLAESRRQYEEKNKEFEREKHAHSILQFQFAEVKEALKQREEMLEKHGIILNSEIATNGETSDTLNNVGYQGPTKMTKEELNALKSTGDGTLGRASEVEVKNEIVANVGKREILHNTEKEQHTEDTVKDCVDIEVFPAGENTEDQKSSEDTAPFLGTLAGATYEEQVQSQILESSSLPENTVQVESNEVMGAPDDRTRTPLEPSNCWSDLDGGNHTENVGEAAVTQVEEQAGTVASCPLGHSDDTVYHDDKCMVEVPQELETSTGHSLEKEFTNQEAAEPKEVPAHSTEVGRDHNEEEGEETGLRDEKPIKTEVPGSPAGTEGNCQEATGPSTVDTQNEPLDMKEPDEEKSDQQGEALDSSQKKTKNKKKKNKKKKSPVPVETLKDVKKELTYQNTDLSEIKEEEQVKSTDRKSAVEAQNEVTENPKQKIAAESSENVDCPENPKIKLDGKLDQEGDDVQTAAEEVLADGDTLDFEDDTVQSSGPRAGGEELDEGVAKDNAKIDGATQSSPAEPKSEDADRCTLPEHESPSQDISDACEAESTERCEMSEHPSQTVRKALDSNSLENDDLSAPGREPGHFNPESREDTRGGNEKGKSKEDCTMS

SEQ ID NO: 48359 - protein, 392 aa, Homo sapiens
MWEAWGNPSSPYSAGRKAKDIINAARESLAKMIGGKPQDIIFTSGGTESNNLVIHSVVKHFHANQTSKGHTGGHHSPVKGAKPHFITSSVEHDSIRLPLEHLVEEQVAAVTFVPVSKVSGQAEVDDILAAVRPTTRLVTIMLANNETGIVMPVPEISQRIKALNQERVAAGLPPILVHTDAAQALGKQRVDVEDLGVDFLTIVGHKFYGPRIGALYIRGLGEFTPLYPMLFGGGQERNFRPGTENTPMIAGLGKAAELVTQNCEAYEAHMRDVRDYLEERLEAEFGQKRIHLNSQFPGTQRLPNTCNFSIRGPRLQGHVVLAQCRVLMASVGAACHSDHGDQPSPVLLSYGVPFDVARNALRLSVGRSTTRAEVDLVVQDLKQAVAQLEDQA

SEQ ID NO: 48360 - protein, 618 aa, Homo sapiens [sequence omitted]

SEQ ID NO: 48361 - protein, 272 aa, Homo sapiens
MQDAHVILNDITEECRPPSSLITRVSYFAVFDGHGGIRASKFAAQNLHQNLIRKFPKGDVISVEKTVKRCLLDTFKHTDEEFLKQASSQKPAWKDGSTATCVLAVDNILYIANLGDSRAILCRYNEESQKHAALSLSKEHNPTQYEERMRIQKAGGNVRDGRVLGVLEVSRSIGDGQYKRCGVTSVPDIRRCQLTPNDRFILLACDGLFKVFTPEEAVNFILSCLEDEKIQTREGKSAADARYEAACNRLANKAVQRGSADNVTVMVVRIGH

SEQ ID NO: 48362 - protein, 1036 aa, Homo sapiens
MDLRLDHQFSLPVAEPALREQQLQQELLALKQKQQIQRQILIAEFQRQHEQLSRQHEAQLHEHIKQQQEMLAMKHQQELLEHQRKLERHRQEQELEKQHREQKLQQLKNKEKGKESAVASTEVKMKLQEFVLNKKKALAHRNLNHCISSDPRYWYGKTQHSSLDQSSPPQSGVSTSYNHPVLGMYDAKDDFPLRKTASEPNLKLRSRLKQKVAERRSSPLLRRKDGPVVTALKKRPLDVTDSACSSAPGSGPSSPNNSSGSVSAENGIAPAVPSIPAETSLAHRLVAREGSAAPLPLYTSPSLPNITLGLPATGPSAGTAGQQDAERLTLPALQQRLSLFPGTHLTPYLSTSPLERDGGAAHSPLLQHMVLLEQPPAQAPLVTGLGALPLHAQSLVGADRVSPSIHKLRQHRPLGRTQSAPLPQNAQALQHLVIQQQHQQFLEKHKQQFQQQQLQMNKIIPKPSEPARQPESHPEETEEELREHQALLDEPYLDRLPGQKEAHAQAGVQVKQEPIESDEEEAEPPREVEPGQRQPSEQELLFRQQALLLEQQRIHQLRNYQASMEAAGIPVSFGGHRPLSRAQSSPASATFPVSVQEPPTKPRFTTGLVYDTLMLKHQCTCGSSSSHPEHAGRIQSIWSRLQETGLRGKCECIRGRKATLEELQTVHSEAHTLLYGTNPLNRQKLDSKKLLGSLASVFVRLPCGGVGVDSDTIWNEVHSAGAARLAVGCVVELVFKVATGELKNGFAVVRPPGHHAEESTPMGFCYFNSVAVAAKLLQQRLSVSKILIVDWDVHHGNGTQQAFYSDPSVLYMSLHRYDDGNFFPGSGAPDEVGTGPGVGFNVNMAFTGGLDPPMGDAEYLAAFRTVVMPIASEFAPDVVLVSSGFDAVEGHPTPLGGYNLSARCFGYLTKQLMGLAGGRIVLALEGGHDLTAICDASEACVSALLGNELDPLPEKVLQQRPNANAVRSMEKVMEIHSKYWRCLQRTTSTAGRSLIEAQTCENEEAETVTAMASLSVGVKPAEKRPDEEPMEEEPPL

SEQ ID NO: 48363 - protein, 50 aa, Homo sapiens
MFPEGAGPYVDLDEAGGSTGLLMDLAANEKAVHADFFNDFEDLFDDDDIQ

SEQ ID NO: 48364 - protein, 225 aa, Homo sapiens
MRELDQRTEDKKAEIDILAAEYISTVKTLSPDQRVERLQKIQNAYSKCKEYSDDKVQLAMQTYEMVDKHIRRLDADLARFEADLKDKMEGSDFESSGGRGLKKGRGQKEKRGSRGRGRRTSEEDTPKKKKHKGGGNSVLSLPAPSCSEPEGPVPTVPFLRESGTPPGLFLTQCCFSRWQCCSCPIARRRDRLVRPALKLGSDVQGAKEAPSRGTGGWCRWADGSS

SEQ ID NO: 48365 - protein, 366 aa, Homo sapiens [sequence omitted]

SEQ ID NO: 48366 - protein, 98 aa, Homo sapiens
MRGCPRTSMWLGPLRSWLVPSSSTPFSLGPMGTCTAWCEAATVSLSLRLPCSSARWPPPWRTVTSTVWSCVISSCVALSSLTVRGRSWCWRTWRTPAC

SEQ ID NO: 48367 - protein, 193 aa, Homo sapiens
MATALAHCHQHGLVLRDLKLCRFVFADRERKKLVLENLEDSCVLTGPDDSLWDKHACPAYVGPEILSSRASYSGKAADVWSLGVALFTMLAGHYPFQDSEPVLLFGKIRRGAYALPAGLSAPARCLVRCLLRREPAERLTATGILLHPWLRQDPMPLAPTRSHLWEAAQVVPDGLGLDEAREEEGDREVVLYG

SEQ ID NO: 48368 - protein, 177 aa, Homo sapiens
MALRSAQGDGPTSGHWDGGAEKADFNAKRKKKVAEIHQALNSDPTDVAALRRMAISEGGLLTDEIRRKVWPKLLNVNANDPPPISGKNLRQMSKDYQQVLLDVRRSLRRFPPGMPEEQREGLQEELIDIILLILERNPQLHYYQGYHDIVVTFLLVVGERLATSLVEKLSTHHLRYQ

SEQ ID NO: 48369 - protein, 256 aa, Homo sapiens
MKMRRKRKARGAKEHGAVAVERVTKSPGETSKPRPFAGGGYRLGAAPEEESAYVAGEKRQHSSQDVHVVLKLWKSGFSLDNGELRSYQDPSNAQFLESIRRGEVPAELRRLAHGGQVNLDMEDHRDEDFVKPKGAFKAFTGEGQKLGSTAPQVLSTSSPAQQAENEAKASSSILIDESEPTTNIQIRLADGGRLVQKFNHSHRISDIRLFIVDARPAMAATSFILMTTFPNKELADESQTLKEANLLNAVIVQRLT

SEQ ID NO: 48370 - protein, 62 aa, Homo sapiens
MLQHIDYRMRCILQDGRIFIGTFKAFDKHMNLILCDCDEFRKIKCVRGESLSFWPHCLFVKL

SEQ ID NO: 48371 - protein, 149 aa, Homo sapiens
MERYQHYRQTVRALRMEFVSEVQRKVHEARAGVLAERKALKDAAEHRELMAWNQAENRRLHELRIARLRQEEREQEQRQALEQARKAEEVQAWAQRKEREVLQLQEEVKNFITRENLEARVEAALDSRKNYNWAITREGLVVRPQRRDS

SEQ ID NO: 48372 - protein, 723 aa, Homo sapiens
MGLVALEAEGQELLLELEKNHRLLAPGYIETHYGPDGQPVVLAPNHTDHCHYQGRVRGFPDSWVVLCTCSGMSGLITLSRNASYYLRPWPPRGSKDFSTHEIFRMEQLLTWKGTCGHRDPGNKAGMTSLPGGPQSRGRREARRTRKYLELYIVADHTLFLTRHRNLNHTKQRLLEVANYVDQLLRTLDIQVALTGLEVWTERDRSRVTQDANATLWAFLQWRRGLWAQRPHDSAQLLTGRAFQGATVGLAPVEGMCRAESSGGVSTDHSELPIGAAATMAHEIGHSLGLSHDPDGCCVEAAAESGGCVMAAATGHPFPRVFSACSRRQLRAFFRKGGGACLSNAPDPGLPVPPALCGNGFVEAGEECDCGPGQECRDLCCFAHNCSLRPGAQCAHGDCCVRCLLKPAGALCRQAMGDCDLPEFCTGTSSHCPPDVYLLDGSPCARGSGYCWDGACPTLEQQCQQLWGPGSHPAPEACFQVVNSAGDAHGNCGQDSEGHFLPCAGRDALCGKLQCQGGKPSLLAPHMVPVDSTVHLDGQEVTCRGALALPSAQLDLLGLGLVEPGTQCGPRMVCNSNHNCHCAPGWAPPFCDKPGFGGSMDSGPVQAENHDTFLLAMLLSVLLPLLPGAGLAWCCYRLPGAHLQRCSWGCRRDPACSGPKDGPHRDHPLGGVHPMELGPTATGQPWPLDPENSHEPSSHPEKPLPAVSPDPQADQVQMPRSCLW

SEQ ID NO: 48373 - protein, 438 aa, Homo sapiens
MERHGRASATSVSSAGEQAAGDPEGRRQEPLRRRASSASVPAVGASAEGTRRDRLGSYSGPTSVSRQRVESLRKKRPLFPWFGLDIGGTLVKLVYFEPKDITAEEEEEEVESLKSIRKYLTSNVAYGSTGIRDVHLELKDLTLCGRKGNLHFIRFPTHDMPAFIQMGRDKNFSSLHTVFCATGGGAYKFEQDFLTIGDLQLCKLDELDCLIKGILYIDSVGFNGRSQCYYFENPADSEKCQKLPFDLKNPYPLLLVNIGSGVSILAVYSKDNYKRVTGTSLGGGTFFGLCCLLTGCTTFEEALEMASRGDSTKVDKLVRDIYGGDYERFGLPGWAVASSFGNMMSKEKREAVSKEDLARATLITITNNIGSIARMCALNENINQVVFVGNFLRINTIAMRLLAYALDYWSKGQLKALFSEHEGYFGAVGALLELLKIP

SEQ ID NO: 48374 - protein, 776 aa, Homo sapiens
MQSTLDRFIPYKGWKLYFSEVYSDSSPLIEKIQAFEKFFTRHIDLYDKDEIERKGSILVDFKELTEGGEVTNLIPDIATELRDAPEKTLACMGLAIHQVLTKDLERHAAELQAQEGLSNDGETMVNVPHIHARVYNYEPLTQLKNVRANYYGKYIALRGTVVRVSNIKPLCTKMAFLCAACGEIQSFPLPDGKYSLPTKCPVPVCRGRSFTALRSSPLTVTMDWQSIKIQELMSDDQREAGRIPRTIECELVHDLVDSCVPGDTVTITGIVKVSNAEEGSRNKNDKCMFLLYIEANSISNSKGQKTKSSEDGCKHGMLMEFSLKDLYAIQEIQAEENLFKLIVNSLCPVIFGHELVKAGLALALFGGSQKYADDKNRIPIRGDPHILVVGDPGLGKSQMLQAACNVAPRGVYVCGNTTTTSGLTVTLSKDSSSGDFALEAGALVLGDQGICGIDEFDKMGNQHQALLEAMEQQSISLAKAGVVCSLPARTSIIAAANPVGGHYNKAKTVSENLKMGSALLSRFDLVFILLDTPNEHHDHLLSEHVIAIRAGKQRTISSATVARMNSQDSNTSVLEVVSEKPLSERLKVVPGETIDPIPHQLLRKYIGYARQYVYPRLSTEAARVLQDFYLELRKQSQRLNSSPITTRQLESLIRLTEARARLELREEATKEDAEDIVEIMKYSMLGTYSDEFGNLDFERSQHGSGMSNRSTAKRFISALNNVAERTYNNIFQFHQLRQIAKELNIQVADFENFIGSLNDQGYLLKKGPKVYQLQTM

SEQ ID NO: 48375 - protein, 111 aa, Homo sapiens
MTRIGLAPVLGYLIIEEDFNIALGVFALAGLTDLLDGFIARNWANQRSALGSALDPLADKILISILYVSLTYADLIPGKNASCVLLNSTGKNDISQLRISLERQIIFVPKI

SEQ ID NO: 48376 - protein, 572 aa, Homo sapiens
MVRLRVSFSAVVFKAVSDICKILNIRRSEELSLLKPSGDYFKKKKKKDKNNKEPIIEDILNLESSPTASGSSVSPGLYSKTMTPIYDPINGTPASSTMTWFSDSPLTEQNCSILAFSQPPQSPEALADMYQPRSLVDKAKLNAGWLDSSRSLMEQGIQEDEQLLLRFKYYSFFDLNPKYDAVRINQLYEQARWAILLEEIDCTEEEMLIFAALQYHISKLSLSAETQDFAGESEVDEIEAALSNLEVTLEGGKADSLLEDITDIPKLADNLKLFRPKKLLPKAFKQYWFIFKDTSIAYFKNKELEQGEPLEKLNLRGCEVVPDVNVAGRKFGIKLLIPVADGMNEMYLRCDHENQYAQWMAACMLASKGKTMADSSYQPEVLNILSFLRMKNRNSASQVASSLENMDMNPECFVSPRCAKRHKSKQLAARILEAHQNVAQMPLVEAKLRFIQAWQSLPEFGLTYYLVRFKGSKKDDILGVSYNRLIKIDAATGIPVTTWRFTNIKQWNVNWETRQVVIEFDQNVFTAFTCLSADCKIVHEYIGGYIFLSTRSKDQNETLDEDLFHKLTGGQD

SEQ ID NO: 48377 - protein, 294 aa, Homo sapiens [sequence omitted]

SEQ ID NO: 48378 - protein, 349 aa, Homo sapiens [sequence omitted]

SEQ ID NO: 48379 - protein, 1241 aa, Homo sapiens
MVFKTLGTDVVKSAFEGYNACVFAYGQTGSGKSYTMMGNSGDSGLIPRICEGLFSRINETTRWDEASFRTEVSYLEIYNERVRDLLRRKSSKTFNLRVREHPKEGPYVEDLSKHLVQNYGDVEELMDAGNINRTTAATGMNDVSSRSHAIFTIKFTQAKFDSEMPCETVSKIHLVDLAGSERADATGATGVRLKEGGNINKSLVTLGNVISALADLSQDAANTLAKKKQVFVPYRDSVLTWLLKDSLGGNSKTIMIATISPADVNYGETLSTLRYANRAKNIINKPTINEDANVKLIRELRAEIARLKTLLAQGNQIALLDSPTALSMEEKLQQNEARVQELTKEWTNKWNETQNILKEQTLALRKEGIGVVLDSELPHLIGIDDDLLSTGIILYHLKEGQTYVGRDDASTEQDIVLHGLDLESEHCIFENIGGTVTLIPLSGSQCSVNGVQIVEATHLNQGAVILLGRTNMFRFNHPKEAAKLREKRKSGLLSSFSLSMTDLSKSRENLSAVMLYNPGLEFERQQREELEKLESKRKLIEEMEEKQKSDKAELERMQQEVETQRKETEIVQLQIRKQEESLKRRSFHIENKLKDLLAEKEKFEEERLREQQEIELQKKRQEEETFLRVQEELQRLKELNNNEKAEKFQIFQELDQLQKEKDEQYAKLELEKKRLEEQEKEQVMLVAHLEEQLREKQEMIQLLRRGEVQWVEEEKRDLEGIRESLLRVKEARAGGDEDGEELEKAQLRFFEFKRRQLVKLVNLEKDLVQQKDILKKEVQEEQEILECLKCEHDKESRLLEKHDESVTDVTEVPQDFEKIKPVEYRLQYKERQLQYLLQNHLPTLLEEKQRAFEILDRGPLSLDNTLYQVEKEMEEKEEQLAQYQANANQLQKLQATFEFTANIARQEEKVRKKEKEILESREKQQREALERALARLERRHSALQRHSTLGMEIEEQRQKLASLNSGSREQSGLQASLEAEQEALEKDQERLEYEIQQLKQKIYEVDGVQKDHHGTLEGKVASSSLPVSAEKSHLVPLMDARINAYIEEEVQRRLQDLHRVISEGCSTSADTMKDNEKLHNGTIQRKLKYERMVSRSLGANPDDLKDPIKISIPRYVLCGQGKDAHFEFEVKITVLDETWTVFRRYSRFREMHKTLKLKYAELAALEFPPKKLFGNKDERVIAERRSHLEKYLRDFFSVMLQSATSPLHINKVGLTLSKHTICEFSPFFKKGVFDYSSHGTG

SEQ ID NO: 48380 - protein, 1316 aa, Homo sapiens
MVFKTLGTDVVKSAFEGYNACVFAYGQTGSGKSYTMMGNSGDSGLIPRICEGLFSRINETTRWDEASFRTEVSYLEIYNERVRDLLRRKSSKTFNLRVREHPKEGPYVEDLSKHLVQNYGDVEELMDAGNINRTTAATGMNDVSSRSHAIFTIKFTQAKFDSEMPCETVSKIHLVDLAGSERADATGATGVRLKEGGNINKSLVTLGNVISALADLSQDAANTLAKKKQVFVPYRDSVLTWLLKDSLGGNSKTIMIATISPADVNYGETLSTLRYANRAKNIINKPTINEDANVKLIRELRAEIARLKTLLAQGNQIALLDSPTALSMEEKLQQNEARVQELTKEWTNKWNETQNILKEQTLALRKEGIGVVLDSELPHLIGIDDDLLSTGIILYHLKEGQTYVGRDDASTEQDIVLHGLDLESEHCIFENIGGTVTLIPLSGSQCSVNGVQIVEATHLNQGAVILLGRTNMFRFNHPKEAAKLREKRKSGLLSSFSLSMTDLSKSRENLSAVMLYNPGLEFERQQREELEKLESKRKLIEEMEEKQKSDKAELERMQQEVETQRKETEIVQLQIRKQEESLKRRSFHIENKLKDLLAEKEKFEEERLREQQEIELQKKRQEEETFLRVQEELQRLKELNNNEKAEKFQIFQELDQLQKEKDEQYAKLELEKKRLEEQEKEQVMLVAHLEEQLREKQEMIQLLRRGEVQWVEEEKRDLEGIRESLLRVKEARAGGDEDGEELEKAQLRFFEFKRRQLVKLVNLEKDLVQQKDILKKEVQEEQEILECLKCEHDKESRLLEKHDESVTDVTEVPQDFEKIKPVEYRLQYKERQLQYLLQNHLPTLLEEKQRAFEILDRGPLSLDNTLYQVEKEMEEKEEQLAQYQANANQLQKLQATFEFTANIARQEEKVRKKEKEILESREKQQREALERALARLERRHSALQRHSTLGMEIEEQRQKLASLNSGSREQSGLQASLEAEQEALEKDQERLEYEIQQLKQKIYEVDGVQKDHHGTLEGKVASSSLPVSAEKSHLVPLMDARINAYIEEEVQRRLQDLHRVISEGCSTSADTMKDNEKLHNGTIQRKLKYELCRDLLCVLMPEPDAAACANHPLLQQDLVQLSLDWKTEIPDLVLPNGVQVSSKFQTTLVDMIYFLHGNMEVNVPSLAEVQLLLYTTVKVMGDSGHDQCQSLVLLNTHIALVKEDCVFYPRIRSRNIPPPGAQFDVIKCHALSEFRCVVVPEKKNVSTVELVFLQKLKPSVGSRNSPPEHLQEAPNVQLFTTPLYLQGSQNVAPEVWKLTFNSQDEALWLISHLTRL

SEQ ID NO: 48381 - protein, 945 aa, Homo sapiens
MKETSYEEALANQRKEMAKTHHQKVEKKKKEKTVEKKGKTKKKEEKPNGKIPDHDPAPNVTVLLREPVRAPAVAVAPTPVQPPIIVAPVATVPAMPQEKLASSPKDKKKKEKKVAKVEPAVSSVVNSIQVLTSKAAILETAPKEGRNTDVAQSPEAPKQEAPAKKKSGSKKKGPPDADGPLYLPYKTLVSTVGSMVFNEGEAQRLIEILSEKAGIIQDTWHKATQKGDPVAILKRQLEEKEKLLATEQEDAAVAKSKLRELNKEMAAEKAKAAAGEAKVKKQLVAREQEITAVQARMQASYREHVKEVQQLQGKIRTLQEQLENGPNTQLARLQQENSILRDALNQATSQVESKQNAELAKLRQELSKVSKELVEKSEAVRQDEQQRKALEAKAAAFEKQVLQLQASHRESEEALQKRLDEVSRELCHTQSSHASLRADAEKAQEQQQQMAELHSKLQSSEAEVRSKCEELSGLHGQLQEARAENSQLTERIRSIEALLEAGQARDAQDVQASQAEADQQQTRLKELESQVSGLEKEAIELREAVEQQKVKNNDLREKNWKAMEALATAEQACKEKLLSLTQAKEESEKQLCLIEAQTMEALLALLPELSVLAQQNYTEWLQDLKEKGPTLLKHPPAPAEPSSDLASKLREAEETQSTLQAECDQYRSILAETEGMLRDLQKSVEEEEQVWRAKVGAAEEELQKSRVTVKHLEEIVEKLKGELESSDQVREHTSHLEAELEKHMAAASAECQNYAKEVAGLRQLLLESQSQLDAAKSEAQKQSDELALVRQQLSEMKSHVEDGDIAGAPASSPEAPPAEQDPVQLKTQLEWTEAILEDEQTQRQKLTAEFEEAQTSACRLQEELEKLRTAGPLESSETEEASQLKERLEKEKKLTSDLGRAATRLQELLKTTQEQLAREKDTVKKLQEQLEKAEDGSSSKEGTSV

SEQ ID NO: 48382 - protein, 1378 aa, Homo sapiens
MKETSYEEALANQRKEMAKTHHQKVEKKKKEKTVEKKGKTKKKEEKPNGKIPDHDPAPNVTVLLREPVRAPAVAVAPTPVQPPIIVAPVATVPAMPQEKLASSPKDKKKKEKKVAKVEPAVSSVVNSIQVLTSKAAILETAPKEVPMVVVPPVGAKGNTPATGTTQGKKAEGTQNQSKKAEGAPNQGRKAEGTPNQGKKTEGTPNQGKKAEGTPNQGKKAEGTPNQGKKAEGAQNQGKKVDTTPNQGKKVEGAPTQGRKAEGAQNQAKKVEGAQNQGKKAEGAQNQGKKGEGAQNQGKKAEGAQNQGKKAEGAQNQGKKAEGAQNQGKKAEGAQNQGKKAEGAQNQGKKAEGAQNQGKKVEGAQNQGKKAEGAQNQGKKAEGAQNQGKKAEGAQNQGKKAEGAQNQGKKAEGAQNQGKKAEGAQNQGKKAEGAQNQGKKVEGAQNQGKKAEGAQNQGKKAEGAQNQGKKAEGAQNQGQKGEGAQNQGKKTEGAQGKKAERSPNQGKKGEGAPIQGKKADSVANQGTKVEGITNQGKKAEGSPSEGKKAEGSPNQGKKADAAANQGKKTESASVQGRNTDVAQSPEAPKQEAPAKKKSGSKKKGEPGPPDADGPLYLPYKTLVSTVGSMVFNEGEAQRLIEILSEKAGIIQDTWHKATQKGDPVAILKRQLEEKEKLLATEQEDAAVAKSKLRELNKEMAAEKAKAAAGEAKVKKQLVAREQEITAVQARMQASYREHVKEVQQLQGKIRTLQEQLENGPNTQLARLQQENSILRDALNQATSQVESKQNAELAKLRQELSKVSKELVEKSEAVRQDEQQRKALEAKAAAFEKQVLQLQASHRESEEALQKRLDEVSRELCHTQSSHASLRADAEKAQEQQQQMAELHSKLQSSEAEVRSKCEELSGLHGQLQEARAENSQLTERIRSIEALLEAGQARDAQDVQASQAEADQQQTRLKELESQVSGLEKEAIELREAVEQQKVKNNDLREKNWKAMEALATAEQACKEKLLSLTQAKEESEKQLCLIEAQTMEALLALLPELSVLAQQNYTEWLQDLKEKGPTLLKHPPAPAEPSSDLASKLREAEETQSTLQAECDQYRSILAETEGMLRDLQKSVEEEEQVWRAKVGAAEEELQKSRVTVKHLEEIVEKLKGELESSDQVREHTSHLEAELEKHMAAASAECQNYAKEVAGLRQLLLESQSQLDAAKSEAQKQSDELALVRQQLSEMKSHVEDGDIAGAPASSPEAPPAEQDPVQLKTQLEWTEAILEDEQTQRQKLTAEFEEAQTSACRLQEELEKLRTAGPLESSETEEASQLKERLEKEKKLTSDLGRAATRLQELLKTTQEQLAREKDTVKKLQEQLEKAEDGSSSKEGTSV

SEQ ID NO: 48383 - protein, 204 aa, Homo sapiens
MTKQQVFLLERWKQRMILELGEDGFKEYTSNVFLQGKRFHEALESILSPQETLKERDENLLKSGYIESVQHILKDVSGVRALESAVQHETLNYIGLLDCVAEYQGKLCVIDWKTSEKPKPFIQSTFDNPLQVVAYMGAMNHDTNYSFQVQCGLIVVAYKDGSPAHPHFMDAELCSQYWTKWLLRLEEYTEKKKNQNIQKPEYSE

SEQ ID NO: 48384 - protein, 734 aa, Homo sapiens [sequence omitted]

SEQ ID NO: 48385 - protein, 169 aa, Homo sapiens
MVRKILNLRVFEDESGKHWSKSVMDKQYEILCVSQFTLQCVLKGNKPDFHLAMPTEQAEGFYNSFLEQLRKTYRPELIKDGKFGAYMQVHIQNDGPVTIELESPAPGTATSDPKQTDSRSVSQAGVQWRDLRSLQAPPPGFMPFFGLSLPSSWDYRHVPPCPANFFVFF

SEQ ID NO: 48386 - protein, 193 aa, Homo sapiens
MLTKRQIPKGRFTIAAKHHITIAEIYETELVDIEKAIAHYEQSADYYKGEESNSSANKCLLKVAAYAAQLEQYQKAIEIYEQVGANTMDNPLLKYSAKDYFFKAALCHFIVDELNAKLALEKYEEMFPAFTDSRECKLLKKLLEAHEEQNSEAYTEAVKEFDSISRLDQWLTTMLLRIKKSIQGDGEGDGDLK

SEQ ID NO: 48387 - protein, 249 aa, Homo sapiens
MLVHSKISDAGKRNGLINTRNLMAESRDGLVSVYPAPQYQSHRVGASTVPASLDSSRSEPMQQLLDPNTLQQSVESRYRPNIILYSEGVLRSWGDGVAADCCETTFIEDRSPTKDSLEYPDGKFIDLSADDIKIHTLSYDVEEEEEFQELESDYSSDTESEDNFLMMPPRDHLGLSVFSMLCCFWPLGIAAFYLSHETNKAVAKGDLHQASTSSRRALFLAVLSITIGTGVYVGVAVALIAYLSKNNHL

SEQ ID NO: 48388 - protein, 347 aa, Homo sapiens [sequence omitted]

SEQ ID NO: 48389 - protein, 341 aa, Homo sapiens [sequence omitted]

SEQ ID NO: 48390 - protein, 76 aa, Homo sapiens
MVCFGNMFIKMPHPETKEMIEKDQDHLDKEIEKLRKQLKVKVNRLFEAQGKPELKGFNLNPLNQDELKALKVILKG

SEQ ID NO: 48391 - protein, 1513 aa, Homo sapiens
MTPKQILQVIEAEGLKEMRSGTSPLACLNAMLHSNSRGGEGLFYKLPGRISLFTLKKDALQWSRHPATVEGEEPEDTADVESCGSNEASTVSGENDVSLDETSSNASCSTESQSRPLSNPRDSYRASSQANKQKKKTGVMLPRVVLTPLKVNGAHVESASGFSGCHADGESGSPSSSSSGSLALGSAAIRGQAEVTQDPAPLLRGFRKPATGQMKRNRGEEIDFETPGSILVNTNLRALINSRTFHALPSHFQQQLLFLLPEVDRQVGTDGLLRLSSSALNNEFFTHAAQSWRERLADGEFTHEMQVRIRQEMEKEKKVEQWKEKFFEDYYGQKLGLTKEESLQQNVGQEEAEIKSGLCVPGESVRIQRGPATRQRDGHFKKRSRPDLRTRARRNLYKKQESEQAGVAKDAKSVASDVPLYKDGEAKTDPAGLSSPHLPGTSSAAPDLEGPEFPVESVASRIQAEPDNLARASASPDRIPSLPQETVDQEPKDQKRKSFEQAASASFPEKKPRLEDRQSFRNTIESVHTEKPQPTKEEPKVPPIRIQLSRIKPPWVVKGQPTYQICPRIIPTTESSCRGWTGARTLADIKARALQVRGARGHHCHREAATTAIGGGGGPGGGGGGATDEGGGRGSSSGDGGEACGHPEPRGGPSTPGKCTSDLQRTQLLPPYPLNGEHTQAGTAMSRARREDLPSLRKEESCLLQRATVGLTDGLGDASQLPVAPTGDQPCQALPLLSSQTSVAERLVEQPQLHPDVRTECESGTTSWESDDEEQGPTVPADNGPIPSLVGDDTLEKGTGQALDSHPTMKDPVNVTPSSTPESSPTDCLQNRAFDDELGLGGSCPPMRESDTRQENLKTKALVSNSSLHWIPIPSNDEVVKQPKPESREHIPSVEPQVGEEWEKAAPTPPALPGDLTAEEGLDPLDSLTSLWTVPSRGGSDSNGSYCQQVDIEKLKINGDSEALSPHGESTDTASDFEGHLTEDSSEADTREAAVTKGSSVDKDEKPNWNQSAPLSKVNGDMRLVTRTDGMVAPQSWVSRVCAVRQKIPDSLLLASTEYQPRAVCLSMPGSSVEATNPLVMQLLQGSLPLEKVLPPAHDDSMSESPQVPLTKDQSHGSLRMGSLHGLGKNSGMVDGSSPSSLRALKEPLLPDSCETGTGLARIEATQAPGAPQKNCKAVPSFDSLHPVTNPITSSRKLEEMDSKEQFSSFSCEDQKEVRAMSQDSNSNAAPGKSPGDLTTSRTPRFSSPNVISFGPEQTGRALGDQSNVTGQGKKLFGSGNVAATLQRPRPADPMPLPAEIPPVFPSGKLGPSTNSMSGGVQTPREDWAPKPHAFVGSVKNEKTFVGGPLKANAENRKATGHSPLELVGHLEGMPFVMDLPFWKLPREPGKGLSEPLEPSSLPSQLSIKQAFYGKLSKLQLSSTSFNYSSSSPTFPKGLAGSVVQLSHKANFGASHSASLSLQMFTDSSTVESISLQCACSLKAMIMCQGCGAFCHDDCIGPSKLCVLCLVVR

SEQ ID NO: 48392 - protein, 353 aa, Homo sapiens [sequence omitted]

SEQ ID NO: 48393 - protein, 245 aa, Homo sapiens
MFVRLFVDENLDRMVPISKQPKEKIQAIIESCSRQFPEFQERARKRIRTYLKSCRRMKKNGMEMTRPTPPHLTSAMAENILAAACESETRKAAKRMRLEIYQSSQDEPIALDKQHSRDSAAITHSTYSLPASSYSQDPVYANGGLNYSYRGYGALSSNLQPPASLQTGNHSNGPTDLSMKGGASTTSTTPTPTPSSTSTSRPVPTAQLSPTEISAVRQLIAGYRESAAFLLRSADELENLILQQN

SEQ ID NO: 48394 - protein, 71 aa, Homo sapiens
MINQLIDMEWKFGVTSGSSELEKVGSIFLQLKLVVKKGNQTENVYIELTLPQFYSFLHEMERVRTSMECFC

SEQ ID NO: 48395 - protein, 548 aa, Homo sapiens [sequence omitted]

SEQ ID NO: 48396 - protein, 400 aa, Homo sapiens [sequence omitted]

SEQ ID NO: 48397 - protein, 351 aa, Homo sapiens [sequence omitted]

SEQ ID NO: 48398 - protein, 2432 aa, Homo sapiens
MKPQSLQLVLEEQVLALQQQMAENQAASWRKLKNSQEAQQRQATLVRKLQAKVLQYRSWCQELEKRLEATGGPIPQRWENVEEPNLDELLVRLEEEQQRCESLAEVNTQLRLHMEKADVVNKALREDVEKLTVDWSRARDELMRKESQWQMEQEFFKGYLKGEHGRLLSLWREVVTFRRHFLEMKSATDRDLMELKAEHVRLSGSLLTCCLRLTVGAQSREPNGSGRMDGREPAQLLLLLAKTQELEKEAHERSQELIQLKSQGDLEKAELQDRVTELSALLTQSQKQNEDYEKMIKALRETVEILETNHTELMEHEASLSRNAQEEKLSLQQVIKDITQVMVEEGDNIAQGSGHENSLELDSSIFSQFDYQDADKALTLVRSVLTRRRQAVQDLRQQLAGCQEAVNLLQQQHDQWEEEGKALRQRLQKLTGERDTLAGQTVDLQGEVDSLSKERELLQKAREELRQQLEVLEQEAWRLRRVNVELQLQGDSAQGQKEEQQEELHLAVRERERLQEMLMGLEAKQSESLSELITLREALESSHLEGELLRQEQTEVTAALARAEQSIAELSSSENTLKTEVADLRAAAVKLSALNEALALDKVGLNQQLLQLEEENQSVCSRMEAAEQARNALQVDLAEAEKRREALWEKNTHLEAQLQKAEEAGAELQADLRDIQEEKEEIQKKLSESRHQQEAATTQLEQLHQEAKRQEEVLARAVQEKEALVREKAALEVRLQAVERDRQDLAEQLQGLSSAKELLESSLFEAQQQNSVIEVTKGQLEVQIQTVTQAKEVIQGEVRCLKLELDTERSQAEQERDAAARQLAQAEQEGKTALEQQKAAHEKEVNQLREKWEKERSWHQQELAKALESLEREKMELEMRLKEQQTEMEAIQAQREEERTQAESALCQMQLETEKERVSLLETLLQTQKELADASQQLERLRQDMKVQKLKEQETTGILQTQLQEAQRELKEAARQHRDDLAALQEESSSLLQDKMDLQKQVEDLKSQLVAQDDSQRLVEQEVQEKLRETQEYNRIQKELEREKASLTLSLMEKEQRLLVLQEADSIRQQELSALRQDMQEAQGEQKELSAQMELLRQEVKEKEADFLAQEAQLLEELEASHITEQQLRASLWAQEAKAAQLQLRLRSTESQLEALAAEQQPGNQAQAQAQLASLYSALQQALGSVCESRPELSGGGDSAPSVWGLEPDQNGARSLFKRGPLLTALSAEAVASALHKLHQDLWKTQQTRDVLRDQVQKLEERLTDTEAEKSQVHTELQDLQRQLSQNQEEKSKWEGKQNSLESELMELHETMASLQSRLRRAELQRMEAQGERELLQAAKENLTAQVEHLQAAVVEARAQASAAGILEEDLRTARSALKLKNEEVESERERAQALQEQGELKVAQGKALQENLALLTQTLAEREEEVETLRGQIQELEKQREMQKAALELLSLDLKKRNQEVDLQQEQIQELEKCRSVLEHLPMAVQEREQKLTVQREQIRELEKDRETQRNVLEHQLLELEKKDQMIESQRGQVQDLKKQLVTLECLALELEENHHKMECQQKLIKELEGQRETQRVALTHLTLDLEERSQELQAQSSQIHDLESHSTVLARELQERDQEVKSQREQIEELQRQKEHLTQDLERRDQELMLQKERIQVLEDQRTRQTKILEEDLEQIKLSLRERGRELTTQRQLMQERAEEGKGPSKAQRGSLEHMKLILRDKEKEVECQQEHIHELQELKDQLEQQLQGLHRKVGETSLLLSQREQEIVVLQQQLQEAREQGELKEQSLQSQLDEAQRALAQRDQELEALQQEQQQAQGQEERVKEKADALQGALEQAHMTLKERHGELQDHKEQARRLEEELAVEGRRVQALEEVLGDLRAESREQEKALLALQQQCAEQAQEHEVETRALQDSWLQAQAVLKERDQELEALRAESQSSRHQEEAARARAEALQEALGKAHAALQGKEQHLLEQAELSRSLEASTATLQASLDACQAHSRQLEEALRIQEGEIQDQDLRYQEDVQQLQQALAQRDEELRHQQEREQLLEKSLAQRVQENMIQEKQNLGQEREEEEIRGLHQSVRELQLTLAQKEQEILELRETQQRNNLEALPHSHKTSPMEEQSLKLDSLEPRLQRELERLQAALRQTEAREIEWREKAQDLALSLAQTKASVSSLQEVAMFLQASVLERDSEQQRLQDELELTRRALEKERLHSPGATSTAELGSRGEQGVQLGEVSGVEAEPSPDGMEKQSWRQRLEHLQQAVARLEIDRSRLQRHNVQLRSTLEQVERERRKLKREAMRAAQAGSLEISKATASSPTQQDGRGQKNSDAKCVAELQKEVVLLQAQLTLERKQKQDYITRSAQTSRELAGLHHSLSHSLLAVAQAPEATVLEAETRRLDESLTQSLTSPGPVLLHPSPSTTQAASR

SEQ ID NO: 48399 - protein, 396 aa, Homo sapiens
MEVEARNLDKKDFLGKSDPFLEFFRQGDGKWHLVYRSEVIKNNLNPTWKRFSVPVQHFCGGNPSTPIQVQCSDYDSDGSHDLIGTFHTSLAQLQAVPAEFECIHPEKQQKKKSYKNSGTIRVKICRVETEYSFLDYVMGGCQINFTVGVDFTGSNGDPSSPDSLHYLSPTGVNEYLMALWSVGSVVQDYDSDKLFPAFGFGAQVPPDWQVSHEFALNFNPSNPYCAGIQGIVDAYRQALPQVRLYGPTNFAPIINHVARFAAQAAHQGTASQYFMLLLLTDGAVTDVEATREAVVRASNLPMSVIIVGVGGADFEAMEQLDADGGPLHTRSGQAAARDIVQFVPYRRFQNAPREALAQTVLAEVPTQLVSYFRAQGWAPLKPLPPSAKDPAQAPQA

SEQ ID NO: 48400 - protein, 916 aa, Homo sapiens
MDIRHFFSGLTIPDGGVHIVGGELGEAFIVFATDEDARLGMMRTGGTIKGSKVTLLLSSKTEMQNMIELSRRRFETANLDIPPANASRSGPPPSSGMSSRVNLPTTVSNFNNPSPSVVTATTSVHESNKNIQTFSTASVGTAPPNMGASFGSPTFSSTVPSTASPMNTVPPPPIPPIPAMPSLPPMPSIPPIPVPPPVPTLPPVPPVPPIPPVPSVPPMTPLPPMSGMPPLNPPPVAPLPAGMNGSGAPMNLNNNLNPMFLGPLNPVNPIQMNSQSSVKPLPINPDDLYVSVHGMPFSAMENDVRDFFHGLRVDAVHLLKDHVGRNNGNGLVKFLSPQDTFEALKRNRMLMIQRYVEVSPATERQWVAAGGHITFKQNMGPSGQTHPPPQTLPRSKSPSGQKRSRSRSPHEAGFCVYLKGLPFEAENKHVIDFFKKLDIVEDSIYIAYGPNGKATGEGFVEFRNEADYKAALCRHKQYMGNRFIQVHPITKKGMLEKIDMIRKRLQNFSYDQREMILNPEGDVNSAKVCAHITNIPFSITKMDVLQFLEGIPVDENAVHVLVDNNGQGLGQALVQFKNEDDARKSERLHRKKLNGREAFVHVVTLEDMREIEKNPPAQGKKGLKMPVPGNPAVPGMPNAGLPGVGLPSAGLPGAGLPSTGLPGSAITSAGLPGAGMPSAGIPSAGGEEHAFLTVGSKEANNGPPFNFPGNFGGSNAFGPPIPPPGLGGGAFGDARPGMPSVGNSGLPGLGLDVPGFGGGPNNLSGPSGFGGGPQNFGNGPGSLGGPPGFGSGPPGLGSAPGHLGGPPAFGPGPGPGPGPGPIHIGGPPGFASSSGKPGPTVIKVQNMPFTVSIDEILDFFYGYQVIPGSVCLKYNEKGMPTGEAMVAFESRDEATAAVIDLNDRPIGSRKVKLVLG

SEQ ID NO: 48401 - protein, 59 aa, Homo sapiens
MGFVMGCAVGMAAGALFGTFSCLRIGMRGRELMGGIGKTMMQSGGTFGTFMAIGMGIRC

SEQ ID NO: 48402 - protein, 512 aa, Homo sapiens [sequence omitted]

SEQ ID NO: 48403 - protein, 279 aa, Homo sapiens
MVRKEYPNLSTSLDDAFLLRFLRARKFDYDRALQLLVNYHSCRRSWPEVFNNLKPSALKDVLASGFLTVLPHTDPRGCHVVCIRPDRWIPSNYPITENIRAIYLTLEKLIQSEETQVNGIVILADYKGVSLSKASHFGPFIAKKVIGILQDGFPIRIKAVHVVNEPRIFKGIFAIIKPFLKEKIANRFFLHGSDLNSLHTNLPRSILPKEYGGTAGELDTATWNAVLLASEDDFVKEFCQPVPACDSILGQTLLPEGLTSDAQCDDSLRAVKSQLYSCY

SEQ ID NO: 48404 - protein, 295 aa, Homo sapiens
MPAIAGCREAIKRIAYEFVEMKAKEGVVYVEVRYSPHLLANSKVEPIPWNQAEGDLTPDEVVALVGQGLQEGERDFGVKARSILCCMRHQPNWSPKVVELCKKYQQQTVVAIDLAGDETIPGSSLLPGHVQAYQEAVKSGIHRTVHAGEVGSAEVVKEAVDILKTERLGHGYHTLEDQALYNRLRQENMHFEICPWSSYLTGAWKPDTEHAVIRLKNDQANYSLNTDDPLIFKSTLDTDYQMTKRDMGFTEEEFKRLNINAAKSSFLPEDEKRELLDLLYKAYGMPPSASAGQNL

SEQ ID NO: 48405 - protein, 118 aa, Homo sapiens
MSGDKGISAFPESDNLFKWVGTIHGAAGTAVGSIRTSSTVCLLSGPRETQDSSKPLVWGLGWDMRLLLELTLQLFLQMPEPNIDSPLNTHAAELWKNPTAFKKYLQETYSKQVTSQEP

SEQ ID NO: 48406 - protein, 575 aa, Homo sapiens
MCLQRLQPVQPTTKKDLDTAEKSLVEPSFCLDKVQVSSKPEQEGITPSDLAKIAKVMKNFLKVDEGSMASFSVGDSQHLDRLSFQSSKMTDLFIRFPENLLLHRVENTQGHILYAFLVENKERESRVVHFAVLKAETVTSVAKMLSIFTEFNSDWPKVKVVFVDPSFHYRAILQEIFPAARILLSIYHTTRLLEKKLHRSSANPSFKRLMKEALREAVFVTSEASLKNLCQMSQAVLDEDLFNFLQAHWFTCELLWYMHVRKGLLACNTYMDSLDIVTSKVSSLFREQQSLLDCILCFVDYIDFFNTKGLKNLPTPPPKLKRARPASMPLKSKKAFGICGESLTSLPAEETKPDAQQVQVQQQSQVPPSQVGMLDTLHQSGSELAYKLCHNEWEVVQNSTHLVDMAGSSVDVQLLEDSHQVSKDGCSCSCSFQQWYHLPCRHILALLHTSQQPVGEAMVCRRWQKKYQYLLGPNGELQDRGMVPNTGQPEKQGRNDMIQDLSRELANLLMQTEGPELEERYSTLRKIVDIWAGPSQPSELFQQPGDFKDVGRLPFLWGKQEEGEGFPPATAVMHY

SEQ ID NO: 48407 - protein, 463 aa, Homo sapiens
MIRAAPPPLFLLLLLLLLLVSWASRGEAAPDQDEIQRLPGLAKQPSFRQYSGYLKGSGSKHLHYWFVESQKDPENSPVVLWLNGGPGCSSLDGLLTEHGPFLIANVLYLESPAGVGFSYSDDKFYATNDTEVAQSNFEALQDFFRLFPEYKNNKLFLTGESYAGIYIPTLAVLVMQDPSMNLQGLAVGNGLSSYEQNDNSLVYFAYYHGLLGNRLWSSLQTHCCSQNKCNFYDNKDLECVTNLQEVARIVGNSGLNIYNLYAPCAGGVPSHFRYEKDTVVVQDLGNIFTRLPLKRMWHQALLRSGDKVRMDPPCTNTTAASTYLNNPYVRKALNIPEQLPQWDMCNFLVNLQYRRLYRSMNSQYLKLLSSQKYQILLYNGDVDMACNFMGDEWFVDSLNQKMEVQRRPWLVKYGDSGEQIAGFVKEFSHIAFLTIKGAGHMVPTDKPLAAFTMFSRFLNKQPY

SEQ ID NO: 48408 - protein, 467 aa, Homo sapiens
MRDSRDPMYRREGSYDRYLRMDDYCRRKDDSYFDRYRDSFDGRGPPGPESQSRAKERLKREERRREELYRQYFEEIQRRFDAERPVDCSVIVVNKQTKDYAESVGRKVRDLGMVVDLIFLNTEVSLSQALEDVSRGGSPFAIVITQQHQIHRSCTVNIMFGTPQEHRNMPQADAMVLVARNYERYKNECREKEREEIARQAAKMADEAILQERERGGPEEGVRGGHPPAIQSLINLLADNRYLTAEETDKIINYLRERKERLMRSSTDSLPGPISRQPLGATSGASLKTQPSSQPLQSGQVLPSATPTPSAPPTSQQELQAKILSLFNSGTVTANSSSASPSVAAGNTPNQNFSTAANSQPQQRSQASGNQPPSILGQGGSAQNMGPRPGAPSQGLFGQPSSRLAPASNMTSQRPVSSTGINFDNPSVQKALDTLIQSGPALSHLVSQTTAQMGQPQAPMGSYQRHY

SEQ ID NO: 48409 - protein, 477 aa, Homo sapiens
MRGGAYPPRYFYPFPVPPLLYQVELSVGGQQFNGKGKTRQAAKHDAAAKALRILQNEPLPERLEVNGRESEEENLNKSEISQVFEIALKRNLPVNFESFPLKQVARESGPPHMKNFVTKVSVGEFVGEGEGKSKKISKKNAAIAVLEELKKLPPLPAVERVKPRIKKKTKPIVKPQTSPEYGQGINPISRLAQIQQAKKEKEPEYTLLTERGLPRRREFVMQVKVGNHTAEGTGTNKKVAKRNAAENMLEILGFKVPQAQPTKPALKSEEKTPIKKPGDGRKVTFFEPGSGDENGTSNKEDEFRMPYLSHQQLPAGILPMVPEVAQAVGVSQGHHTKDFTRAAPNPAKATVTAMIARELLYGGTSPTAETILKNNISSGHVPHGPLTRPSEQLDYLSRVQGFQVEYKDFPKNNKNEFVSLINCSSQPPLISHGIGKDVESCHDMAALNILKLLSELDQQSTEMPRTGNGPMSVCGRC

SEQ ID NO: 48410 - protein, 444 aa, Homo sapiens [sequence omitted]

SEQ ID NO: 48411 - protein, 111 aa, Homo sapiens
MEGVKATIKDASLQPRNVPNRYTFPCPYCPEKNFDQEGLVEHCKLFHSTDTKSVVCPICASMPWGDPNYRSANFREHIQRRHRFSYDTFVDYDVDEEDMMNQVLQRSIIDQ

SEQ ID NO: 48412 - protein, 221 aa, Homo sapiens
MAYKFRTHSPEALEQLYPWECFVFCLIIFGTFTNQIHKWSHTYFGLPRWVTLLQDWHVILPRKHHRIHHVSPHETYFCITTGVKVPRNFRLLEELEEGQKGVGDGTVSWGLEDDEDMTLTRWTGMIIGPPRTIYENRIYSLKIECGPKYPEAPPFVRFVTKINMNGVNSSNGVVDPRAISVLAKWQNSYSIKVVLQELRRLMMSKENMKLPQPPEGQCYSN

SEQ ID NO: 48413 - protein, 121 aa, Homo sapiens
MAYKFRTHSPEALEQLYPWECFVFCLIIFGTFTNQIHKWSHTYFGLPRWVTLLQDWHVILPRKHHRIHHVSPHETYFCITTGWLNYPLEKIGFWRRLEDLIQGLTGEKPRADDMKWAQKIK

SEQ ID NO: 48414 - protein, 342 aa, Homo sapiens
MSNLARQVLHGEALAGQAKAFSAAASLRRLNSAVECVPYTQALTPATALDLVRRYDVVADCSDNVPTRYLVNDACVLAGRPLVSASALRFEGQITVYHYDGGPCYRCIFPQPPPAETVTNCADGGVLGVVTGVLGCLQALEVLKIAAGLGPSYSGSLLLFDALRGHFRSIRLRSRRLDCAACGERPTVTDLLDYEAFCGSSATDKCRSLQLLSPEERVSVTDYKRLLDSGAFHLLLDVRPQVEVDICRLPHALHIPLKHLERRDAESLKLLKEAIWEEKQGTQEGAAVPIYVICKLGNDSQKAVKILQSLSAAQELDPLTVRDVVGGLMAWAAKIDGTFPQY

SEQ ID NO: 48415 - protein, 152 aa, Homo sapiens [sequence omitted]

SEQ ID NO: 48416 - protein, 172 aa, Homo sapiens
MLQPFDYDPNEKSKHKFMVQSMFAPTDTSDMEAVWKEAKPEDLMDSKLRCVFELPAENDKPHDVEINKIISTTASKTETPIVSKSLSSSLDDTEVKKVMEECKRLQGEVQRLREENKQFKEEDGLRMRKTVQSNSPISALAPTGKEEGLSTRLLALVVLFFIVGVIIGKIAL

SEQ ID NO: 48417 - protein, 35 aa, Homo sapiens
MNQSWTAVLSKWDDVGKAPKTRAWHRAVLDNADSW

SEQ ID NO: 48418 - protein, 281 aa, Homo sapiens
MVCEQPEVFASACALARAFPLFTHRSGASRRLEKKTVTVEFFLVGQDNGPVEVSTLQCLANATDGVRLAARIVDTPCNEMNTDTFLEEINKVGKELGIIPTIIRDEELKTRGFGGIYGVGKAALHPPALAVLSHTPDGATQTIAWVGKGIVYDTGGLSIKGKTTMPGMKRDCGGAAAVLGAFRAAIKQGFKDNLHAVFCLAENSVGPNATRPDDIHLLYSGKYVWPSHSFLPTVGTRDPSRPAMPAHSRHIGRALSVGVPWAAGSLLPGGLGSFGSRRTSR

SEQ ID NO: 48419 - protein, 336 aa, Homo sapiens
MRILHVNGFNGEGGEEDPQAARSNSDGSEKATKVQDIKNNLKEAIETIVAAMSNLVPPVELANPENQFRVDYILSVMNVPDFDFPPEFYEHAKALWEDEGVRACYERSNEYQLIDCAQYFLDKIDVIKQADYVPSDQDLLRCRVLTSGIFETKFQVDKVNFHMFDVGGQRDERRKWIQCFNDVTAIIFVVASSSYNMVIREDNQTNRLQEALNLFKSIWNNRWLRTISVILFLNKQDLLAEKVLAGKSKIEDYFPEFARYTTPEDATPEPGEDPRVTRAKYFIRDEFLRISTASGDGRHYCYPHFTCAVDTENIRRVFNDCRDIIQRMHLRQYELL

SEQ ID NO: 48420 - protein, 321 aa, Homo sapiens
MRILHVNGFNGDSEKATKVQDIKNNLKEAIETIVAAMSNLVPPVELANPENQFRVDYILSVMNVPDFDFPPEFYEHAKALWEDEGVRACYERSNEYQLIDCAQYFLDKIDVIKQADYVPSDQDLLRCRVLTSGIFETKFQVDKVNFHMFDVGGQRDERRKWIQCFNDVTAIIFVVASSSYNMVIREDNQTNRLQEALNLFKSIWNNRWLRTISVILFLNKQDLLAEKVLAGKSKIEDYFPEFARYTTPEDATPEPGEDPRVTRAKYFIRDEFLRISTASGDGRHYCYPHFTCAVDTENIRRVFNDCRDIIQRMHLRQYELL

SEQ ID NO: 48421 - protein, 219 aa, Homo sapiens
MLSKGALNPADITVLFKMFTSMDPPPVELIRVPAFLDLFMQSLFKPGARINQDHKHKYIHILAYAASVVETWKKNKRVSINKDELKSTSKAVETVHNLCCNENKGASELVAELSTLYQCIRFPVVAMGVLKWVDWTVSEPRYFQLQTDHTPVHLALLDEISTCHQLLHPQVLQLLVKLFETEHSQLDVMEQLELKKTLLDRMVHLLSRGAGRHCSSLYL

SEQ ID NO: 48422 - protein, 173 aa, Homo sapiens [sequence omitted]

SEQ ID NO: 48423 - protein, 266 aa, Homo sapiens
MAPYGPLAASSLLSQQYAASLGLGAGFPSIPVGKSPMVEQAVQTGSADNLNAKKLLPGKGTTGTQLNGRQAQPSSKTASDVVQPAAVQAQGQVNDENRRPQRRRSGNRRTRNRSRGQNRPTNVKENTIKFEGDFDFESANAQFNREELDKEFKKKLNFKDDKAEKGEEKDLAVVTQSAEAPAEEDLLGPNCYYDKSKSFFDNISSELKTSSRRTTWAEERKLNTETFGVSGRFLRGRSSRGGFRGGRGNGTTRRNPTSHRAGTGRV

SEQ ID NO: 48424 - protein, 369 aa, Homo sapiens
MLLSEAGAAEKTSGGGDGARARADGAAKEGAGAAAAAAGPDGAPEARAKPAVRVRLEDRFNSIPAEPPPAPRGPEPPEPGGALNNLVTLIRHPSELMNVPLQQQNKCTALVKNKTAATTTALQFTYPLFTTNACSTSGNSNLSQTQSSSNSCSVLEAAKHQDIGLPRAFSFCYQQEIESTKQTLGSRNKVLPEQVWIKVGEAALCKQALKRNRSRMRQLDTNVERRALGEIQNVGEGATATQGAWQSSESSQANLGEQAQSGPQGGRSQRRERHNRMERDRRRRIRICCDELNLLVPFCNAETDKATTLQWTTAFLKYIQERHGDSLKKEFESVFCGKTGRRLKLTRPDSLVTCPAQGSLQSSPSMEIK

SEQ ID NO: 48425 - protein, 380 aa, Homo sapiens [sequence omitted]

SEQ ID NO: 48426 - protein, 343 aa, Homo sapiens
MDKWKDIELEKMKAGGNAKFREFLESQEDYDPCWSLQEKYNSRAAALFRDKVVALAEGREWSLESSPAQNWTPPQPRTLPSMVHRVSGQPQSVTASSDKAFEDWLNDDLGSYQGAQGNRYVGFGNTPPPQKKEDDFLNNAMSSLYSGWSSFTTGASRFASAAKEGATKFGSQASQKASELGHSLNENVLKPAQEKVKEGKIFDDVSSGVSQLASKVQGVGSKGWRDVTTFFSGKAEGPLDSPSEGHSYQNSGLDHFQNSNIDQSFWETFGSAEPTKTRKSPSSDSWTCADTSTERRSSDSWEVWGSASTNRNSNSDGGEGGEGTKKAVPPAVPTDDGWDNQNW

SEQ ID NO: 48427 - protein, 931 aa, Homo sapiens [sequence omitted]

SEQ ID NO: 48428 - protein, 265 aa, Homo sapiens
MVGLILGPFGVNHGVELHSDVIEYAKQKLDFFIRTSDSFDKFDFCEPSFVTGNCLEISPDCSQYDRVYCGAGVQKEHEEYMKNLLKVGGILVMPLEEKLTKITRTGPSAWETKKILAVSFAPLIQPCHSESGKSRLVQLPPVAVRSLQDLARIAIRGTIKKIIHQETVSKNGNGLKNTPRFKRRRVRRRRMETIVFLDKEVFASRISNPSDDNSCEDLEEERREEEEKTPPETKPDPPVNFLRQKVLSLPLPDPLKYYLLYYREK

SEQ ID NO: 48429 - protein, 1053 aa, Homo sapiens [sequence omitted]

SEQ ID NO: 48430 - protein, 28 aa, Homo sapiens
MFGNADMNTFPTFKFEDPKFEVIEKPQA

SEQ ID NO: 48431 - protein, 652 aa, Homo sapiens
MARLYGRGLQHYLLTLASIANRLYSHASIENHIRLAVVKVVVLGDKDKSLEVSKNAATTLKNFCKWQHQHNQLGDDHEEHYDAAILFTREDLCGHHSCDTLGMADVGTICSPERSCAVIEDDGLHAAFTVAHEIGHLLGLSHDDSKFCEETFGSTEDKRLMSSILTSIDASKPWSKCTSATITEFLDDGHGNCLLDLPRKQILGPEELPGQTYDATQQCNLTFGPEYSVCPGMDVCARLWCAVVRQGQMVCLTKKLPAVEGTPCGKGRICLQGKCVDKTKKKYYSTSSHGNWGSWGSWGQCSRSCGGGVQFAYRHCNNPAPRNNGRYCTGKRAIYRSCSLMPCPPNGKSFRHEQCEAKNGYQSDAKGVKTFVEWVPKYAGVLPADVCKLTCRAKGTGYYVVFSPKVTDGTECRLYSNSVCVRGKCVRTGCDGIIGSKLQYDKCGVCGGDNSSCTKIVGTFNKKSKGYTDVVRIPEGATHIKVRQFKAKDQTRFTAYLALKKKNGEYLINGKYMISTSETIIDINGTVMNYSGWSHRDDFLHGMGYSATKEILIVQILATDPTKPLDVRYSFFVPKKSTPKVNSVTSHGSNKVGSHTSQPQWVTGPWLACSRTCDTGWHTRTVQCQDGNRKLAKGCPLSQRPSAFKQCLLKKC

SEQ ID NO: 48432 - protein, 1496 aa, Homo sapiens
MGLRPVSYTDSSVTPSVDSSIVLTAASVQSMPDTEESRLYGDDATYLAEGGRRQHSYTSNGPTFMETASFKKKRSKSADIWREDSLEFSLSDLSQEHLTSNEEILGSAEEKDCEEARGMETRASPRQLSTCQRANSLGDLYAQKNSGVTANGGPGSKFAGYCRNLVSDIPNLANHKMPPAAAEETPPYSNYNTLPCRKSHCLSEGATNPQISHSNSMQGRRAKTTQDVNAGEGSEFADSGIEGATTDTDLLSRRSNATNSSYSPTTGRAFVGSDSGSSSTGDAARQGVYENFRRELEMSTTNSESLEEAGSAHSDEQSSGTLSSPGQSDILLTAAQGTVRKAGALAVKNFLVHKKNKKVESATRRKWKHYWVSLKGCTLFFYESDGRSGIDHNSIPKHAVWVENSIVQAVPEHPKKDFVFCLSNSLGDAFLFQTTSQTELENWITAIHSACATAVARHHHKEDTLRLLKSEIKKLEQKIDMDEKMKKMGEMQLSSVTDSKKKKTILDQIFVWEQNLEQFQMDLFRFRCYLASLQGGELPNPKRLLAFASRPTKVAMGRLGIFSVSSFHALVAARTGETGVRRRTQAMSRSASKRRSRFSSLWGLDTTSKKKQGRPSINQVFGEGTEAVKKSLEGIFDDIVPDGKREKEVVLPNVHQHNPDCDIWVHEYFTPSWFCLPNNQPALTVVRPGDTARDTLELICKTHQLDHSAHYLRLKFLIENKMQLYVPQPEEDIYELLYKEIEICPKVTQSIHIEKSDTAADTYGFSLSSVEEDGIRRLYVNSVKETGLASKKGLKAGDEILEINNRAADALNSSMLKDFLSQPSLGLLVRTYPELEEGVELLESPPHRVDGPADLGESPLAFLTSNPGHSLCSEQGSSAETAPEETEGPDLESSDETDHSSKSTEQVAAFCRSLHEMNPSDQSPSPQDSTGPQLATMRQLSDADKLRKVICELLETERTYVKDLNCLMERYLKPLQKETFLTQDELDVLFGNLTEMVEFQVEFLKTLEDGVRLVPDLEKLEKVDQFKKVLFSLGGSFLYYADRFKLYSAFCASHTKVPKVLVKAKTDTAFKAFLDAQNPKQQHSSTLESYLIKPIQRILKYPLLLRELFALTDAESEEHYHLDVAIKTMNKVASHINEMQKIHEEFGAVFDQLIAEQTGEKKEVADLSMGDLLLHTTVIWLNPPASLGKWKKEPELAAFVFKTAVVLVYKDGSKQKKKLVGSHRLSIYEDWDPFRFRHMIPTEALQVRALASADAEANAVCEIVHVKSESEGRPERVFHLCCSSPESRKDFLKAVHSILRDKHRRQLLKTESLPSSQQYVPFGGKRLCALKGARPAMSRAVSAPSKSLGRRRRRLARNRFTIDSDAVSASSPEKESQQPPGGGDTDRWVEEQFDLAQYEEQDDIKETDILSDDDEFCESVKGASVDRDLQERLQATSISQRERGRKTLDSHASRMAQLKKQAALSGINGGLESASEEVIWVRREDFAPSRKLNTEI

SEQ ID NO: 48433 - protein, 1131 aa, Homo sapiens
MKPPISRAKMILITKAAIKAIKLYKHVVQIVEKFIKKCKPEYKVPGLYVIDSIVRQSRHQFGTDKDVFGPRFSKNITATFQYLYLCPSEDKSKIVRVLNLWQKNGVFKIEIIQPLLDMAAGTSNAAPVAENVTNNEGSPPPPVKVSSEPPTQATPNSVPAVPQLPSSDAFAAVAQLFQTTQGQQLQQILQTFQQPPKPQSPALDNAVMAQVQAITAQLKTTPTQPSEQKAAFPPPEQKTAFDKKLLDRFDYDDEPEAVEESKKEDTTAVTTTAPAAAVPPAPTATVPAAAAPAAASPPPPQAPFGFPGDGMQQPAYTQHQNMDQFQPRMMGIQQDPMHHQVPLPPNGQMPGFGLLPTPPFPPMAQPVIPPTPPVQQPFQASFQAQNEPLTQKPHQQEMEVEQPCIQEVKRHMSDNRKSRSRSASRSPKRRRSRSGSRSRRSRHRRSRSRSRDRRRHSPRSRSQERRDREKERERRQKGLPQVKPETASVCSTTLWVGQLDKRTTQQDVASLLEEFGPIESINMIPPRGCAYIVMVHRQDAYRALQKLSRGNYKVNQKSIKIAWALNKGIKADYKQYWDVELGVTYIPWDKVKPEELESFCEGGMLDSDTLNPDWKGIPKKPENEVAQNGGAETSHTEPVSPIPKPLPVPVPPIPVPAPITVPPPQVPPHQPGPPVVGALQPPAFTPPLGIPPPGFGPGVPPPPPPPPFLRPGFNPMHLPPGFLPPGPPPPITPPVSIPPPHTPPISIPNSTIAGINEDTTKDLSIGNPIPTVVSGARGNAESGDSVKMYGSAVPPAAPTNLPTPPVTQPVSLLGTQGVAPGPVIGLQAPSTGLLGARPGLIPLQRPPGMPPPHLQRFPLMPPRPMPPHMMHRGPPPGPGGFAMPPPHGMKGPFPPHGPFVRPGGMPGLGGPGPGPGGPEDRDGRQQPPQQPQQQPQPQAPQQPQQQQQQQPPPSQQPPPTQQQPQQFRNDNRQQFNSGRDQERFGRRSFGNRVENDRERYGNRNDDRDNSNRDRREWGRRSPDRDRHRDLEERNRRSSGHRDRERDSRDRESRREKEEARGKEKPEVTDRAGGNKTVEPPISQVGNVDTASELEKGVSEAAVLKPSEELPAEATSSVEPEKDSGSAAEAPR

SEQ ID NO: 48434 - protein, 297 aa, Homo sapiens
MKPPISRAKMILITKAAIKAIKLYKHVVQIVEKFIKKCKPEYKVPGLYVIDSIVRQSRHQFGTDKDVFGPRFSKNITATFQYLYLCPSEDKSKIVRVLNLWQKNGVFKIEIIQPLLDMAAGTSNAAPVAENVTNNEGSPPPPVKVSSEPPTQATPNSVPAVPQLPSSDAFAAVAQLFQTTQGQQLQQILQTFQQPPKPQSPALDNAVMAQVQAITAQLKTTPTQPSEQKAAFPPPEQKTAFDKVYFSHITHPTIYITQLELWKLSLLYPFCGLFIMSFCNLRDFPPQQENIDYFPWF

SEQ ID NO: 48435 - protein, 586 aa, Homo sapiens
MWSGCGAAAAELRDCGSRRISRSPSSNSHLSPRISLSGNLGPQTSRLGGPPSPSATWSVFWQLPRQQSLPGRGSANLLPSVRSESAVLSDCVGGFPGRSSVRAWIAGPRCTPASPTRVLSLSWRLFNSASLLLLATSTSGSECRFPRSPRARERGIPDCERLLVRRSCWRSGDPRPAGPAGHAAGAFSTPQYLGGTAMVLLHVKRGDESQFLLQAPGSTELEELTVQVARVYNGRLKVQRLCSEMEELAEHGIFLPPNMQGLTDDQIEELKLKDEWGEKCVPSGGAVFKKDDIGRRNGQAPNEKMKQVLKKTIEEAKAIISKKQVEAGVCVTMEMVKDALDQLRGAVMIVYPMGLPPYDPIRMEFENKEDLSGTQAGLNVIKEAEAQLWWAAKELRRTKKLSDYVGKNEKTKIIAKIQQPLQQQIIRLHQELGRQKSLWADVHGKLRSHIDALREQNMELREKLRALQLQRWKARKKSAASPHAGQESHTLALEPAFGKISPLSADEETIPKYAGHKNQSATLLGQRSSSNNSAPPKPMSLKIERISSWKTPPQENRDKNLSRRRQDRRATPTGRPTPCAERRGGV

SEQ ID NO: 48436 - protein, 403 aa, Homo sapiens
MWALDGLSFTYSLVIWKNSSGVEERIENIYSRHKIYKLSPETTYCLKVKAALLTSWKIGVYSPVHCIKTTVENELPPPENIEVSVQNQNYVLKWDYTYANMTFQVQWLHAFLKRNPGNHLYKWKQIPDCENVKTTQCVFPQNVFQKGIYLLRVQASDGNNTSFWSEEIKFDTEIQAFLLPPVFNIRSLSDSFHIYIGAPKQSGNTPVIQDYPLIYEIIFWENTSNAERKIIEKKTDVTVPNLKPLTVYCVKARAHTMDEKLNKSSVFSDAVCEKTKPGNTSKIWLIVGICIALFALPFVIYAAKVFLRCINYVFFPSLKPSSSIDEYFSEQPLKNLLLSTSEEQIEKCFIIENISTIATVEETNQTDEDHKKYSSQTSQDSGNYSNEDESESKTSEELQQDFV

SEQ ID NO: 48437 - protein, 295 aa, Homo sapiens
MKKDLFPVGREIAGIVLDVGSKVSFFQPDDEVVGILPLDSEDPGLCEVVRVHEHYLVHKPEKVTWTEAAGSIRDGVRAYTALHYLSHLSPGKSVLIMDGASAFGTIAIQLAHHRGAKVISTACSLEDKQCLERFRPPIARVIDVSNGKVHVAESCLEETGGLGVDIVLDAGVRLYSKDDEPAVKLQLLPHKHDIITLLGVGGHWVTTEENLQLDPPDSHCLFLKGATLAFLNDEVWNLSNVQQGKYLCILKDVMEKLSTGVFRPQLDEPIPLYEAKVSMEAVQKNQGRKKQVVQF

SEQ ID NO: 48438 - protein, 1149 aa, Homo sapiens
MNNDGRMDQVEFSIAMKLIKLKLQGYQLPSALPPVMKQQPVAISSAPAFGMGGIASMPPLTAVAPVPMGSIPVVGMSPTLVSSVPTAAVPPLANGAPPVIQPLPAFAHPAATLPKSSSFSRSGPGSQLNTKLQKAQSFDVASVPPVAEWAVPQSSRLKYRQLFNSHDKTMSGHLTGPQARTILMQSSLPQAQLASIWNLSDIDQDGKLTAEEFILAMHLIDVAMSGQPLPPVLPPEYIPPSFRRVRSGSGISVISSTSVDQRLPEEPVLEDEQQQLEKKLPVTFEDKKRENFERGNLELEKRRQALLEQQRKEQERLAQLERAEQERKERERQEQERKRQLELEKQLEKQRELERQREEERRKEIERREAAKRELERQRQLEWERNRRQELLNQRNKEQEDIVVLKAKKKTLEFELEALNDKKHQLEGKLQDIRCRLTTQRQEIESTNKSRELRIAEITHLQQQLQESQQMLGRLIPEKQILNDQLKQVQQNSLHRDSLVTLKRALEAKELARQHLRDQLDEVEKETRSKLQEIDIFNNQLKELREIHNKQQLQKQKSMEAERLKQKEQERKIIELEKQKEEAQRRAQERDKQWLEHVQQEDEHQRPRKLHEEEKLKREESVKKKDGEEKGKQEAQDKLGRLFHQHQEPAKPAVQAPWSTAEKGPLTISAQENVKVVYYRALYPFESRSHDEITIQPGDIVMVDESQTGEPGWLGGELKGKTGWFPANYAEKIPENEVPAPVKPVTDSTSAPAPKLALRETPAPLAVTSSEPSTTPNNWADFSSTWPTSTNEKPETDNWDAWAAQPSLTVPSAGQLRQRSAFTPATATGSSPSPVLGQGEKVEGLQAQALYPWRAKKDNHLNFNKNDVITVLEQQDMWWFGEVQGQKGWFPKSYVKLISGPIRKSTSMDSGSSESPASLKRVASPAAKPVVSGEEFIAMYTYESSEQGDLTFQQGDVILVTKKDGDWWTGTVGDKAGVFPSNYVRLKDSEGSGTAGKTGSLGKKPEIAQVIASYTATGPEQLTLAPGQLILIRKKNPGGWWEGELQARGKKRQIGWFPANYVKLLSPGTSKITPTEPPKSTALAAVCQVIGMYDYTAQNDDELAFNKGQIINVLNKEDPDWWKGEVNGQVGLFPSNYVKLTTDMDPSQQ

SEQ ID NO: 48439 - protein, 429 aa, Homo sapiens
MSEALPLGAPDAGAALAGKLRSGDRSMVEVLADHPGELVRTDSPNFLCSVLPTHWRCNKTLPIAFKVVALGDVPDGTLVTVMAGNDENYSAELRNATAAMKNQVARFNDLRFVGRSGRGKSFTLTITVFTNPPQVATYHRAIKITVDGPREPRRHRQKLDDQTKPGSLSFSERLSELEQLRRTAMRVSPHHPAPTPNPRASLNHSTAFNPQPQSQMQDTRQIQPSPPWSYDQSYQYLGSIASPSVHPATPISPGRASGMTTLSAELSSRLSTAPDLTAFSDPRQFPALPSISDPRMHYPGAFTYSPTPVTSGIGIGMSAMGSATRYHTYLPPPYPGSSQAQGGPFQASSPSYHLYYGASAGSYQFSMVGGERSPPRILPPCTNASTGSALLNPSLPNQSDVVEAEGSHSNSPTNMAPSARLEEAVWRPY

SEQ ID NO: 48440 - protein, 365 aa, Homo sapiens
MSEALPLGAPDAGAALAGKLRSGDRSMVEVLADHPGELVRTDSPNFLCSVLPTHWRCNKTLPIAFKVVALGDVPDGTLVTVMAGNDENYSAELRNATAAMKNQVARFNDLRFVGRSGRGKSFTLTITVFTNPPQVATYHRAIKITVDGPREPRNTRQIQPSPPWSYDQSYQYLGSIASPSVHPATPISPGRASGMTTLSAELSSRLSTAPDLTAFSDPRQFPALPSISDPRMHYPGAFTYSPTPVTSGIGIGMSAMGSATRYHTYLPPPYPGSSQAQGGPFQASSPSYHLYYGASAGSYQFSMVGGERSPPRILPPCTNASTGSALLNPSLPNQSDVVEAEGSHSNSPTNMAPSARLEEAVWRPY

SEQ ID NO: 48441 - protein, 683 aa, Homo sapiens
MPQTFRDPATAPLRKLSVDLIKTYKHINEVYYAKKKRRHQQGQGDDSSHKKERKVYNDGYDDDNYDYIVKNGEKWMDRYEIDSLIGKGSFGQVVKAYDRVEQEWVAIKIIKNKKAFLNQAQIEVRLLELMNKHDTEMKYYIVHLKRHFMFRNHLCLVFEMLSYNLYDLLRNTNFRGVSLNLTRKFAQQMCTALLFLATPELSIIHCDLKPENILLCNPKRSAIKIVDFGSSCQLGQRIYQYIQSRFYRSPEVLLGMPYDLAIDMWSLGCILVEMHTGEPLFSGANEVDQMNKIVEVLGIPPAHILDQAPKARKFFEKLPDGTWNLKKTKDGKREYKPPGTRKLHNILGVETGGPGGRRAGESGHTVADYLKFKDLILRMLDYDPKTRIQPYYALQHSFFKKTADEGTNTSNSVSTSPAMEQSQSSGTTSSTSSSSGGSSGTSNSGRARSDPTHQHRHSGGHFTAAVQAMDCETHSPQVRQQFPAPLGWSGTEAPTQVTVETHPVQETTFHVAPQQNALHHHHGNSSHHHHHHHHHHHHHGQQALGNRTRPRVYNSPTNSSSTQDSMEVGHSHHSMTSLSSSTTSSSTSSSSTGNQGNQAYQNRPVAANTLDFGQNGAMDVNLTVYSNPRQETGIAGHPTYQFSANTGPAHYMTEGHLTMRQGADREESPMTGVCVQQSPVASS

SEQ ID NO: 48442 - protein, 128 aa, Homo sapiens
MHHKLEAILTENQFLKQLQLRHLKAIGKYENSQNNLPQIMAKHQNEVKNLRQLLRKSQEKERTLSRKLRETDSQLLKTKDILQALQKLSEDKNLAEREELTHKLSIITTKMDANDKKIQVCISGAQTV

SEQ ID NO: 48443 - protein, 423 aa, Homo sapiens
MLIGTPPQKLQILVDTGSSNFAVAGTPHSYIDTYFDTERSSTYRSKGFDVTVKYTQGSWTGFVGEDLVTIPKGFNTSFLVNIATIFESENFFLPGIKWNGILGLAYATLAKPSSSLETFFDSLVTQANIPNVFSMQMCGAGLPVAGSGTNGGSLVLGGIEPSLYKGDIWYTPIKEEWYYQIEILKLEIGGQSLNLDCREYNADKAIVDSGTTLLRLPQKVFDAVVEAVARASLIPEFSDGFWTGSQLACWTNSETPWSYFPKISIYLRDENSSRSFRITILPQLYIQPMMGAGLNYECYRFGISPSTNALVIGATVMEGFYVIFDRAQKRVGFAASPCAEIAGAAVSEISGPFSTEDVASNCVPAQSLSEPILWIVSYALMSVCGAILLVLIVLLLLPFRCQRRPRDPEVVNDESSLVRHRWK

SEQ ID NO: 48444 - protein, 1024 aa, Homo sapiens
MLVRPAAEAEHQNLTAYQHGSDVYFTTSRDIPPGTELRVWYAAFYAKKMDKPMLKQAGSGVHAAGTPENSAPVESEPSQWACKVCSATFLELQLLNEHLLGHLEQAKSLPPGSQSEAAAPEKEQDTPRGEPPAVPESENVATKEQKKKPRRGRKPKVSKAEQPLVIVEDKEPTEQVAEIITEVPPDEPVSATPDERIMELVLGKLATTTTDTSSVPKFTHHQNNTITLKRSLILSSRHGIRRKLIKQLGEHKRVYQCNICSKIFQNSSNLSRHVRSHGDKLFKCEECAKLFSRKESLKQHVSYKHSRNEVDGEYRYRCGTCEKTFRIESALEFHNCRTDDKTFQCEMCFRFFSTNSNLSKHKKKHGDKKFACEVCSKMFYRKDVMLDHQRRHLEGVRRVKREDLEAGGENLVRYKKEPSGCPVCGKVFSCRSNMNKHLLTHGDKKYTCEICGRKFFRVDVLRDHIHVHFKDIALMDDHQREEFIGKIGISSEENDDNSDESADSEPHKYSCKRCQLTFGRGKEYLKHIMEVHKEKGYGCSICNRRFALKATYHAHMVIHRENLPDPNVQKYIHPCEICGRIFNSIGNLERHKLIHTGVKSHACEQCGKSFARKDMLKEHMRVHDNVREYLCAECGKGMKTKHALRHHMKLHKGIKEYECKECHRRFAQKVNMLKHCKRHTGIKDFMCELCGKTFSERNTMETHKLIHTVGKQWTCSVCDKKYVTEYMLQKHVQLTHDKVEAQSCQLCGTKVSTRASMSRHMRRKHPEVLAVRIDDLDHLPETTTIDASSIGIVQPELTLEQEDLAEGKHGKAAKRSHKRKQKPEEEAGAPVPEDATFSEYSEKETEFTGSVGDETNSAVQSIQQVVVTLGDPNVTTPSSSVGLTNITVTPITTAAATQFTNLQPVAVGHLTTPERQLQLDNSILTVTFDTVSGSAMLHNRQNDVQIHPQPEASNPQSVAHFINLTTLVNSITPLGSQLSDQHPLTWRAVPQTDVLPPSQPQAPPQQAAQPQVQAEQQQQQMYSY

SEQ ID NO: 48445 - protein, 456 aa, Homo sapiens
MLQEAQVFRGLASTVSLSAESGKSEKGQPQNSKKQSPPKNVVEPKERGKLLATQTAAELSKNLSSPSSYPPAVNKGRKVASPSPSGSVLFTDEGVPKFLSRKTLVEFPQKVLSPFRKQGSDSEARQVGRKVTSPSSSSSSSSSDSESDDEADVSEVTPRVVSKGRGGLRKPEASHSFENRAPRVTVSAKEKTLLQKPHVDITDPEKPHQPKKKGSPAKPSEGRENARPKTTMPRSQVDEEFLKQSLKEKQLQKTFRLNEIDKESQKPFEVKGPLPVHTKSGLSAPPKGSPAPAVLAEEARAEGQLQASPPGAAEGHLEKPVPEPQRKAAPPLPRKETSGTQGIEGHLKGGQAIVEDQIPPSNLETVPVENNHGFHEKTAALKLEAEGEAMEDAAAPGDDRGGTQEPAPVPAEPFDNTTYKNLQHHDYSTYTFLDLNLELSKFRMPQPSSGRESPRH

SEQ ID NO: 48446 - protein, 435 aa, Homo sapiens
MATQTLSIDSYQDGQQMQVVTELKTEQDPNCSEPDAEGVSPPPVESQTPMDVDKQAIYRHPLFPLLALLFEKCEQSTQGSEGTTSASFDVDIENFVRKQEKEGKPFFCEDPETDNLMVKAIQVLRIHLLELEKVNELCKDFCSRYIACLKTKMNSETLLSGEPGSPYSPVQSQQIQSAITGTISPQGIVVPASALQQGNVAMATVAGGTVYQPVTVVTPQGQVVTQTLSPGTIRIQNSQLQLQLNQDLSILHQDDGSSKNKRGVLPKHATNVMRSWLFQHIGHPYPTEDEKKQIAAQTNLTLLQVNNWFINARRRILQPMLDSSCSETPKTKKKTAQNRPVQRFWPDSIASGVAQPPPSELTMSEGAVVTITTPVNMNVDSLQSLSSDGATLAVQQVMMAGQSEDESVDSTEEDAGALAPAHISGLVLENSDSLQ

SEQ ID NO: 48447 - protein, 397 aa, Homo sapiens
MQDKPLLQEELGRTISQLVHAFQTTEAQHLFLQAFWQTMNREWTGIDRLRLDKFYMLMRMVLNESLKVLKMQGWEERQIEELLELLMTEILHPSSQAPNGVKSHFIEIFLEELTKVGAEELTADQNLKFIDPFCRIAARTKDSLVLNNITRGIFETIVEQAPLAIEDLLNELDTQDEEVASDSDESSEGGERGDALSQKRSEKPPAGSICRAEPEAGEEQAGDDRDSGGPVLQFDYEAVANRLFEMASRQSTPSQNRKRLYKVIRKLQDLAGGIFPEDEIPEKACRRLLEGRRQKKTKKQKRLLRLQQERGKGEKEPPSPGMERKRSRRRGVGADPEARAEAGEQPGTAERALLRDQPRGRGQRGARQRRRTPRPLTSARAKAANVQEPEKKKKRRE

SEQ ID NO: 48448 - protein, 101 aa, Homo sapiens
MCVRRFPLEDIPLDEKEAAQWLHKLYQEKDALQEIYNQKGMFPGEQFKPARRPWTLLNFLSWATILLSPLFSFVLGVFASGSPLLILTFLGFVGAGNGHCR

SEQ ID NO: 48449 - protein, 433 aa, Homo sapiens
MKGEKGDRGDAGQKGERGEPGGGGFFGSSLPGPPGPPGPPGPRGYPGIPGPKGESIRGQPGPPGPQGPPGIGYEGRQGPPGPPGPPGPPSFPGPHRQTISVPGPPGPPGPPGPPGTMGASSGQVRLWATRQAMLGQVHEVPEGWLIFVAEQEELYVRVQNGFRKVQLEARTPLPRGTDNEVAALQPPVVQLHDSNPYPRREHPHPTARPWRADDILASPPRLPEPQPYPGAPHHSSYVHLRPARPTSPPAHSHRDFQPVLHLVALNSPLSGGMRGIRGADFQCFQQARAVGLAGTFRAFLSSRLQDLYSIVRRADRAAVPIVNLKDELLFPSWEALFSGSEGPLKPGARIFSFDGKDVLRHPTWPQKSVWHGSDPNGRRLTESYCETWRTEAPSATGQASSLLGGRLLGQSAASCHHAYIVLCIENSFMTASK

SEQ ID NO: 48450 - protein, 240 aa, Homo sapiens
MIAYKFEEDIINSMSNSPATSKPPVTLRLVVPASQCGSLIGKGGSKIKEIRESTGAQVQVAGDMLPNSTERAVTISGTPDAIIQCVKQICVVMLEAYTIQGQYAIPHPDLTKLHQLAMQQTPFPPLGQTNPAFPGEKLPLHSSEEAQNLMGQSSGLDASPPASTHELTIPNDLIGCIIGRQGTKINEIRQMSGAQIKIANATEGSSERQITITGTPANISLAQYLINARLTSEVTGMGTL

SEQ ID NO: 48451 - protein, 163 aa, Homo sapiens
MLADQPRTTKYHSVILQNKESLTDKVILDVGCGTGIISLFCAHYARPRAVYAVEASEMAQHTGQLVLQNGFADIITVYQQKVEDVVLPEKVDVLVSEWMGTCLLFEFMIESILYARDAWLKEDGVIWPTMAALHLVPCSADKDYRSKVLFWDNAYEFNLSALK

SEQ ID NO: 48452 - protein, 255 aa, Homo sapiens
MVDLERRLKTTPLPRNDFPRIEGVLLLGEPVRWETSLQLIMDVLLSNGSPGAGLATPPYPHLPVLASNMDLLWMAEAKMPRFGHGTFLLCLETIYQKVTGKELRYEGLMGKPSILTYQYAEDLIRRQAERRGWAAPIRKLYAVGDNPMSDVYGANLFHQYLQKATHDGAPELGAGGTRQQQPSASQSCISILVCTGVYNPRNPQSTEPVLGGGEPPFHGHRDLCFSPGLMEASHVVNDVNEAVQLVFRKEGWALE

SEQ ID NO: 48453 - protein, 211 aa, Homo sapiens [sequence omitted]

SEQ ID NO: 48454 - protein, 112 aa, Homo sapiens
MRRDKTLKICANHYITPMMELKPNAGSDRAWVWNTHADFADECPKPELLAIRFLNAENAQKFKTKFEECRKEIEEREKKAGSGKNDHAEKVAEKLEALSVKEETKEDAEEKQ

SEQ ID NO: 48455 - protein, 111 aa, Homo sapiens
MRRDKTLKICANHYITPMMELKPNAGSDRAWVWNTHADFADECPKPELLAIRFLNAENAQKFKTKFEECRKEIEEREKKGSGKNDHAEKVAEKLEALSVKEETKEDAEEKQ

SEQ ID NO: 48456 - protein, 1936 aa, Homo sapiens
MCQALEIQDKEYLCKYAIPCLIGISRAFGRYSNMEESLLSKLFPKIPPHSLRVLEELEGVRRRSFNDFRSILPSNLLTVCQEGTLKRKTSSVSSISQVSPERGMPPPSSPGGSAFHYFEASCLPDGTALEPEYYFSTISSSFSVSPLFNGVTYKEFNIPLEMLRELLNLVKKIVEEAVLKSLDAIVASVMEANPSADLYYTSFSDPLYLTMFKMLRDTLYYMKDLPTSFVKEIHDFVLEQFNTSQGELQKILHDADRIHNELSPLKLRCQANAACVDLMVWAVKDEQGAENLCIKLSEKLQSKTSSKVIIAHLPLLICCLQGLGRLCERFPVVVHSVTPSLRDFLVIPSPVLVKLYKYHSQYHTVAGNDIKISVTNEHSESTLNVMSGKKSQPSMYEQLRDIAIDNICRCLKAGLTVDPVIVEAFLASLSNRLYISQESDKDAHLIPDHTIRALGHIAVALRDTPKVMEPILQILQQKFCQPPSPLDVLIIDQLGCLVITGNQYIYQEVWNLFQQISVKASSVVYSATKDYKDHGYRHCSLAVINALANIAANIQDEHLVDELLMNLLELFVQLGLEGKRASERASEKGPALKASSSAGNLGVLIPVIAVLTRRLPPIKEAKPRLQKLFRDFWLYSVLMGFAVEGSGLWPEEWYEGVCEIATKSPLLTFPSKEPLRSVLQYNSAMKNDTVTPAELSELRSTIINLLDPPPEVSALINKLDFAMSTYLLSVYRLEYMRVLRSTDPDRFQVMFCYFEDKAIQKDKSGMMQCVIAVADKVFDAFLNMMADKAKTKENEEELERHAQFLLVNFNHIHKRIRRVADKYLSGLVDKFPHLLWSGTVLKTMLDILQTLSLSLSADIHKDQPYYDIPDAPYRITVPDTYEARESIVKDFAARCGMILQEAMKWAPTVTKSHLQEYLNKHQNWVSGLSQHTGLAMATESILHFAGYNKQNTTLGATQLSERPACVKKDYSNFMASLNLRNRYAGEVYGMIRFSGTTGQMSDLNKMMVQDLHSALDRSHPQHYTQAMFKLTAMLISSKDCDPQLLHHLCWGPLRMFNEHGMETALACWEWLLAGKDGVEVPFMREMAGAWHMTVEQKFGLFSAEIKEADPLAASEASQPKPCPPEVTPHYIWIDFLVQRFEIAKYCSSDQVEIFSSLLQRSMSLNIGGAKGSMNRHVAAIGPRFKLLTLGLSLLHADVVPNATIRNVLREKIYSTAFDYFSCPPKFPTQGEKRLREDISIMIKFWTAMFSDKKYLTASQLVPPDNQDTRSNLDITVGSRQQATQGWINTYPLSSGMSTISKKSGMSKKTNRGSQLHKYYMKRRTLLLSLLATEIERLITWYNPLSAPELELDQAGENSVANWRSKYISLSEKQWKDNVNLAWSISPYLAVQLPARFKNTEAIGNEVTRLVRLDPGAVSDVPEAIKFLVTWHTIDADAPELSHVLCWAPTDPPTGLSYFSSMYPPHPLTAQYGVKVLRSFPPDAILFYIPQIVQALRYDKMGYVREYILWAASKSQLLAHQFIWNMKTNIYLDEEGHQKDPDIGDLLDQLVEEITGSLSGPAKDFYQREFDFFNKITNVSAIIKPYPKGDERKKACLSALSEVKVQPGCYLPSNPEAIVLDIDYKSGTPMQSAAKAPYLAKFKVKRCGVSELEKEGLRCRSDSEDECSTQEADGQKISWQAAIFKVGDDCRQDMLALQIIDLFKNIFQLVGLDLFVFPYRVVATAPGCGVIECIPDCTSRDQLGRQTDFGMYDYFTRQYGDESTLAFQQARYNFIRSMAAYSLLLFLLQIKDRHNGNIMLDKKGHIIHIDFGFMFESSPGGNLGWEPDIKLTDEMVMIMGGKMEATPFKWFMEMCVRGYLAVRPYMDAVVSLVTLMLDTGLPCFRGQTIKLLKHRFSPNMTEREAANFIMKVIQSCFLSNRSRTYDMIQYYQNDIPY

SEQ ID NO: 48457 - protein, 288 aa, Homo sapiens [sequence omitted]

SEQ ID NO: 48458 - protein, 348 aa, Homo sapiens
MVRGQVFDVGPRYTNLSYIGEGAYGMVCSAYDNVNKVRVAIKKISPFEHQTYCQRTLREIKILLRFRHENIIGINDIIRAPTIEQMKDVYIVQDLMETDLYKLLKTQHLSNDHICYFLYQILRGLKYIHSANVLHRDLKPSNLLLNTTCDLKICDFGLARVADPDHDHTGFLTEYVATRWYRAPEIMLNSKGYTKSIDIWSVGCILAEMLSNRPIFPGKHYLDQLNHILGILGSPSQEDLNCIINLKARNYLLSLPHKNKVPWNRLFPNADSKALDLLDKMLTFNPHKRIEVEQALAHPYLEQYYDPSDEPIAEAPFKFDMELDDLPKEKLKELIFEETARFQPGYRS

SEQ ID NO: 48459 - protein, 409 aa, Homo sapiens
MQTAERLYTQGYISYPRTETTHYPENFDLKGSLRQQANHPYWADTVKRLLAEGINRPRKGHDAGDHPPITPMKSATEAELGGDAWRLYEYITRHFIATVSHDCKYLQSTISFRIGPELFTCSGKTVLSPGFTEVMPWQSVPLEESLPTCQRGDAFPVGEVKMLEKQTNPPDYLTEAELITLMEKHGIGTDASIPVHINNICQRNYVTVESGRRLKPTNLGIVLVHGYYKIDAELVLPTIRSAVEKQLNLIAQGKADYRQVLGHTLDVFKRKFHYFVDSIAGMDELMEVSFSPLAATGKPLSRCGKCHRFMKYIQAKPSRLHCSHCDETYTLPQNGTIKLYKELRCPLDDFELVLWSSGSRGKSYPLCPYCYNHPPFRDMKKGECSHSLLSTGSCSLFSVPTPALHQAGL

SEQ ID NO: 48460 - protein, 68 aa, Homo sapiens [sequence omitted]

SEQ ID NO: 48461 - protein, 790 aa, Homo sapiens
MRCGALDGPCSCHPTCSGLGTCCLDFRDFCLEILPYSGSMMGGKDFVVRHFKMSSPTDASVICRFKDSIQTLGHVDSSGQVHCVSPLLYESGRIPFTVSLDNGHSFPRAGTWLAVHPNKVSMMEKSELVNETRWQYYGTANTSGNLSLTWHVKSLPTQTITIELWGYEETGMPYSQEWTAKWSYLYPLATHIPNSGSFTFTPKPAPPSYQRWRVGALRIIDSKNYAGQKDVQALWTNDHALAWHLSDDFREDPVAWARTQCQAWEELEDQLPNFLEELPDCPCTLTQARADSGRFFTDYGCDMEQGSVCTYHPGAVHCVRSVQASLRYGSGQQCCYTADGTQLLTADSSGGSTPDRGHDWGAPPFRTPPRVPSMSHWLYDVLSFYYCCLWAPDCPRYMQRRPSNDCRNYRPPRLASAFGDPHFVTFDGTNFTFNGRGEYVLLEAALTDLRVQARAQPGTMSNGTETRGTGLTAVAVQEGNSDVVEVRLANRTGGLEVLLNQEVLSFTEQSWMDLKGMFLSVAAGDRVSIMLASGAGLEVSVQGPFLSVSVLLPEKFLTHTHGLLGTLNNDPTDDFTLHSGRVLPPGTSPQELFLFGANWTVHNASSLLTYDSWFLVHNFLYQPKHDPTFEPLFPSETTLNPSLAQEAAKLCGDDHFCNFDVAATGSLSTGTATRVAHQLHQRRMQSLQPVVSCGWLAPPPNGQKEGNRYLAGSTIYFHCDNGYSLAGAETSTCQADGTWSSPTPKCQPGRSYAVLLGIIFGGLAVVAAVALVYVLLRRRKGNTHVWGAQP

SEQ ID NO: 48462 - protein, 488 aa, Homo sapiens
MLWSFKNRVTHQNPNGAALPPNVQIIPVFVTKEEAISLHEFPVEQMTRSLASPAGLQDGSAQHHPKGGSTSALKENATGHVESMAWTTPDPTSPDEACPDGRKENGCLSGHDLESIRPAGLHNSARGEVLGLSSSLGKELVFLQEELDLSEIHIPEAQEVEMASGHFAFLHVPVPDGRAPYCKASLSASSSLEPTPPEDTAISSLRPPSAPEMLTQHGAQEQLEDHPGHSSQAPIPRADPLPRRTRRPLLLPRLDPGQRGNKLPTGEQGLDEDVDGVCESHAAPGLECSSGSANCQGAGPSADGISSRLTPAESCMGLVRMNLYTHCVKGLVLSLLAEEPLLGDSAAIEEVYHSSLASLNGLEVHLKETLPRDEAASTSSTYNFTHYDRIQSLLMANLPQVATPQDRRFLQAVSLMHSEFAQLPALYEMTVRNASTAVYACCNPIQETYFQQLAPAARSSGFPNPQDGAFSLSGKAKQKLLKHGVNLL

SEQ ID NO: 48463 - protein, 333 aa, Homo sapiens [sequence omitted]

SEQ ID NO: 48464 - protein, 1291 aa, Homo sapiens
MNTHFKAPAFHTGGPPGPVDPAMSALGEPPILGMNMEPYGFHARGHSELHAGGLQAQPVHGFFGGQQPHHGHPGSHHPHQHHPHFGGNFGGPDPGASCLHGGRLLGYGGAAGGLGSQPPFAEGYEHMAESQGPESFGPQRPGNLPDFHSSGASSHAVPAPCLPLDQSPNRAASFHGLPSSSGSDSHSLEPRRVTNQGAVDSLEYNYPGEAPSGHFDMFSPSDSEGQLPHYAAGRQVPGGAFPGASAMPRAAGMVGLSKMHAQPPQQQPQQQQQPQQQQQQHGVFFERFSGARKMPVGLEPSVGSRHPLMQPPQQAPPPPQQQPPQQPPQQQPPPPPGLLVRQNSCPPALPRPQQGEAGTPSGGLQDGGPMLPSQHAQFEYPIHRLENRSMHPYSEPVFSMQHPPPQQAPNQRLQHFDAPPYMNVAKRPRFDFPGSAGVDRCASWNGSMHNGALDNHLSPSAYPGLPGEFTPPVPDSFPSGPPLQHPAPDHQSLQQQQQQQQQQQQQQQQQQQQQQQQQQQQRQNAALMIKQMASRNQQQRLRQPNLAQLGHPGDVGQGGLVHGGPVGGLAQPNFEREGGSTGAGRLGTFEQQAPHLAQESAWFSGPHPPPGDLLPRRMGGSGLPADCGPHDPSLAPPPPPGGSGVLFRGPLQEPMRMPGEGHVPALPSPGLQFGGSLGGLGQLQSPGAGVGLPSAASERRPPPPDFATSALGGQPGFPFGAAGRQSTPHSGPGVNSPPSAGGGGGSSGGGGGGGAYPPQPDFQPSQRTSASKLGALSLGSFNKPSSKDNLFGQSCLAALSTACQNMIASLGAPNLNVTFNKKNPPEGKRKLSQNETDGAAVAGNPGSDYFPGGTAPGAPGPGGPSGTSSSGSKASGPPNPPAQGDGTSLSPNYTLESTSGNDGKPVSGGGGRGRGRRKRDSGHVSPGTFFDKYSAAPDSGGAPGVSPGQQQASGAAVGGSSAGETRGAPTPHEKALTSPSWGKGAELLLGDQPDLIGSLDGGAKSDSSSPNVGEFASDEVSTSYANEDEVSSSSDNPQALVKASRSPLVTGSPKLPPRGVGAGEHGPKAPPPALGLGIMSNSTSTPDSYGGGGGPGHPGTPGLEQVRTPTSSSGAPPPDEIHPLEILQAQIQLQRQQFSISEDQPLGLKGGKKGECAVGASGAQNGDSELGSCCSEAVKSAMSTIDLDSLMAEHSAAWYMPADKALVDSADDDKTLAPWEKAKPQNPNSKEAHDLPANKASASQPGSHLQCLSVHCTDDVGDAKARASVPTWRSLHSDISNRFGTFVAALT

SEQ ID NO: 48465 - protein, 365 aa, Homo sapiens
MLLMSTLWLVGAGPGLVLAPELLLDPWQVHRLLTHALGHTALPGLLLSLLLLPTVGWQQECHLGTLRFLHASALLALASGLLAVLLAGLGLSSAAGSCGYMPVHLAMLAGEGHRPRRPRGALPPWLSPWLLLALTPLLSSEPPFLQLLCGLLAGLAYAAGAFRWLEPSERRLQVLQEGVLCRTLAGCWPLRLLATPGSLAELPVTHPAGVRPPIPGPPYVASPDLWSHWEDSALPPPSLRPVQPTWEGSSEAGLDWAGASFSPGTPMWAALDEQMLQEGIQASLLDGPAQEPQSAPWLSKSSVSSLRLQQLERMGFPTEQAVVALAATGRVEGAVSLLVGGQVGTETLVTHGKGGPAHSEGPGPP

SEQ ID NO: 48466 - protein, 276 aa, Homo sapiens
MVDEEGFKELPPSEFLQVAEATWLVLNVSSHSGAAVQAAGVTKIARSVIAPLAEHHVSVLMLSTYQTDFILVREQDLSVVIHTLAQEFDIYREVGGEPVPVTRDDSSNGFPRTQHGPSPTVHPIQSPQNRFCVLTLDPETLPAIATTLIDVLFYSHSTPKEAASSSPEPSSITFFAFSLIEGYISIVMDAETQKKFPSDLLLTSSSGELWRMVRIGGQPLGFDECGIVAQIAGPLAAADISAYYISTFNFDHALVPEDGIGSVIEVLQRRQEGLAS

SEQ ID NO: 48467 - protein, 287 aa, Homo sapiens
MVLGANWKEVLLKHISPDQVPVEYGGTMTDPDGNPKCKSKINYGGDIPRKYYVRDQVKQQYEHSVQISRGSSHQVEYEILFPGCVLRWQFMSDGADVGFGIFLKTKMGERQRAGEMTEVLPNQRYNSHLVPEDGTLTCSDPGICYANEVGEAFRSLVPAAVVWLSYGVASSYVLADAIDKGKKAGEVPSPEAGRSARVTVAVVDTFVWQALASVAIPGFTINRVCAASLYVLGTATRWPLAVRKWTTTALGLLTIPIIIHPIDRSVDFLLDSSLRKLYPTVGKPSSS

SEQ ID NO: 48468 - protein, 386 aa, Homo sapiens [sequence omitted]

SEQ ID NO: 48469 - protein, 249 aa, Homo sapiens [sequence omitted]

SEQ ID NO: 48470 - protein, 46 aa, Homo sapiens [sequence omitted]

SEQ ID NO: 48471 - protein, 54 aa, Homo sapiens
MSLLLPPLALLLLLAALVAPATAATAYRPDWNRLSGLTRARVEGPAFPSDLGNC

SEQ ID NO: 48472 - protein, 17 aa, Homo sapiens
MASAMKAVRRICVSLHS

SEQ ID NO: 48473 - protein, 459 aa, Homo sapiens [sequence omitted]

SEQ ID NO: 48474 - protein, 661 aa, Homo sapiens [sequence omitted]

SEQ ID NO: 48475 - protein, 223 aa, Homo sapiens [sequence omitted]

SEQ ID NO: 48476 - protein, 101 aa, Homo sapiens
MATGQFAAPLRGIYFFSLNVHSWNYKETYVHIMHNQKEAVILYAQPSERSIMQSQSVMLDLAYGDRVWVRLFKRQRENAIYSNDFDTYITFSGHLIKAEDD

SEQ ID NO: 48477 - protein, 274 aa, Homo sapiens
MSEIRGKPIESSCMYGTCCLWGKTYSIGFLRFCKQATLQFCVVKPLMAVSTVVLQAFGKYRDGDFDVTSGYLYVTIIYNISVSLALYALFLFYFATRELLSPYSPVLKFFMVKSVIFLSFWQGMLLAILEKCGAIPKIHSARVSVGEGTVAAGYQDFIICVEMFFAALALRHAFTYKVYADKRLDAQVPTYGPYGRCAPMKSISSSLKETMNPHDIVQDAIHNFSPAYQQYTQQSTLEPGPTWRGGAHGLSRSHSLSGARDNEKTLLLSSDDEF

SEQ ID NO: 48478 - protein, 251 aa, Homo sapiens
MELLGPSLEDLFNFCSRKFSLKTVLLLADQMISRIEYIHSKNFIHRDVKPDNFLMGLGKKGNLVYIIDFGLAKKYRDARTHQHIPYRENKNLTGTARYASINTHLGIEQSRRDDLESLGYVLMYFNLGSLPWQGLKAATKRQKYERISEKKMSTPIEVLCKGYPSEFSTYLNFCRSLRFDDKPDYSYLRQLFRNLFHRQGFSYDYVFDWNMLKFGASSSQAQPRDSPMTAKGPFCPRPCPCAGPTYSPTYW

SEQ ID NO: 48479 - protein, 545 aa, Homo sapiens [sequence omitted]

SEQ ID NO: 48480 - protein, 300 aa, Homo sapiens
MDQHFTEPTPIQCQGFPLALSGRDMVGIAQTGSGKTLAYLLPAIVHINHQPYLERGDGPICLVLAPTRELAQQVQQVADDYGKCSRLKSTCIYGGAPKGPQIRDLERGVEICIATPGRLIDFLESGKTNLRRCTYLVLDEADRMLDMGFEPQIRKIVDQIRPDRQTLMWSATWPKEVRQLAEDFLRDYTQINVGNLELSANHNILQIVDVCMESEKDHKLIQLMEEIMAEKENKTIIFVETKRRCDDLTRRMRRDGWPAMCIHGDKSQPERDWVLNEFRSGKAPILIATDVASRGLGLYR

SEQ ID NO: 48481 - protein, 426 aa, Homo sapiens [sequence omitted]

SEQ ID NO: 48482 - protein, 111 aa, Homo sapiens
MLGIATLAVKRMYDRAISAPTSPTRLSHSGKRSWEEPNWMGSPRLLNRDMKTGLSRSLQTLPTDSSTFDTGETSYLLPEPGSHPCWRAGSGQASCCGHMCRAPELPAGQVA

SEQ ID NO: 48483 - protein, 420 aa, Homo sapiens
MKSNLENIDFKMAAEEEKRLRHDVMAHVHTFGHCCPKAAGIIHLGATSCYVGDNTDLIILRNALDLLLPKLARVISRLADFAKERASLPTLGFTHFQPAQLTTVGKRCCLWIQDLCMDLQNLKRVRDDLRFRGVKGTTGTQASFLQLFEGDDHKVEQLDKMVTEKAGFKRAFIITGQTYTRKVDIEVLSVLASLGASVHKICTDIRLLANLKEMEEPFEKQQIGSSAMPYKRNPMRSERCCSLARHLMTLVMDPLQTASVQWFERTLDDSANRRICLAEAFLTADTILNTLQNISEGLVVYPKVIERRIRQELPFMATENIIMAMVKAGGSRQDCHEKIRVLSQQAASVVKQEGGDNDLIERIQVDAYFSPIHSQLDHLLDPSSFTGRASQQVQRFLEEEVYPLLKPYESVMKVKAELCL

SEQ ID NO: 48484 - protein, 284 aa, Homo sapiens [sequence omitted]

SEQ ID NO: 48485 - protein, 883 aa, Homo sapiens
MGLYEKALEDSEKALGLDSESIRALFRKARALNELGRHKEAYECSSRCSLALPHDESVTQLGQELAQKLGLRVRKAYKRPQELETFSLLSNGTAAGVADQGTSNGLGSIDDIETDCYVDPRGSPALLPSTPTMPLFPHVLDLLAPLDSSRTLPSTDSLDDFSDGDVFGPELDTLLDSLSLVQGGLSGSGVPSELPQLIPVFPGGTPLLPPVVGGSIPVSSPLPPASFGLVMDPSKKLAASVLDALDPPGPTLDPLDLLPYSETRLDALDSFGSTRGSLDKPDSFMEETNSQDHRPPSGAQKPAPSPEPCMPNTALLIKNPLAATHEFKQACQLCYPKTGPRAGDYTYREGLEHKCKRDILLGRLRSSEDQTWKRIRPRPTKTSFVGSYYLCKDMINKQDCKYGDNCTFAYHQEEIDVWTEERKGTLNRDLLFDPLGGVKRGSLTIAKLLKEHQGIFTFLCEICFDSKPRIISKGTKDSPSVCSNLAAKHSFYNNKCLVHIVRSTSLKYSKIRQFQEHFQFDVCRHEVRYGCLREDSCHFAHSFIELKVWLLQQYSGMTHEDIVQESKKYWQQMEAHAGKASSSMGAPRTHGPSTFDLQMKFVCGQCWRNGQVVEPDKDLKYCSAKARHCWTKERRVLLVMSKAKRKWVSVRPLPSIRNFPQQYDLCIHAQNGRKCQYVGNCSFAHSPEERDMWTFMKENKILDMQQTYDMWLKKHNPGKPGEGTPISSREGEKQIQMPTDYADIMMGYHCWLCGKNSNSKKQWQQHIQSEKHKEKVFTSDSDASGWAFRFPMGEFRLCDRLQKGKACPDGDKCRCAHGQEELNEWLDRREVLKQKLAKARKDMLLCPRDDDFGKYNFLLQEDGDLAGATPEAPAAAATATTGE

SEQ ID NO: 48486 - protein, 282 aa, Homo sapiens
MVDPVVELAAKRSGLAVEDVRANVPEELSVWIDPFEVSYQIGEKGAVKVLYLDDSEGCGAPELDKEIKSSFNPDAQVFVPIGSQDSSLSNSPSPSFGQSPSPTFIPRSAQPITFTTASFAATKFGSTKMKKGGGAASGGGVASSGAGGQQPPQQPRMARSPTNSLLKHKSLSLSMHSLNFITANPAPQSQLSPNAKEFVYNGGGSPSLFFDAADGQGSGTPGPFGGSGAGTCNSSSFDMAQVFGGGANSLFLEKTPFVEGLSYNLNTMQYPSQQFQPVVLAN

SEQ ID NO: 48487 - protein, 143 aa, Homo sapiens
MATICNMGAEIGATTSVFPYNHRMKKYLSKTGREDIANLADEFKDHLVPDPGCHYDQLIEINLSELKPHINGPFTPDLAHPVAEVGKVAEKEGWPLDIRVDALACQSLASAAAGYSVAVKSMEPGARWPGLESWLCHLTATNS

SEQ ID NO: 48488 - protein, 141 aa, Homo sapiens [sequence omitted]

SEQ ID NO: 48489 - protein, 179 aa, Homo sapiens
MAELTLLRTRARIPGALQITPPISSITSNGTRPMTTPPTSLPEPFSGDPGRLAGFLMQMDRFMIFQASRFPGEAERVAFLVSRLTGEAEKWAIPHMQPDSPLRNNYQGFLAELRRTYKSPLRHARRAQIRKTSASNRAVRERQMLCRQLASAGTGPCPVHPASNGTSPAPALPARARNL

SEQ ID NO: 48490 - protein, 384 aa, Homo sapiens [sequence omitted]

SEQ ID NO: 48491 - protein, 413 aa, Homo sapiens
MWGYGRSLAKAMLQGPGWPSFLTPVWPPSAGCFKDDRIVFWTWMFSTYFMEKWAPRQDDMLFYVRRKLAYSGSESGADGRKAAEPEVEVEVYRRDSKKLPGLGDPDIDWEESVCLNLILQKLDYMVTCAVCTRADGGDIHIHKKKSQQVFASPSKHPMDSKGEESKISYPNIFFMIDSFEEVFSDMTVGEGEMVCVELVASDKTNTFQGVIFQGSIRYEALKKVYDNRVSVAARMAQKMSFGFYKYSNMEFVRMKGPQGKGHAEMAVSRVSTGDTSPCGTEEDSSPASPMHERVTSFSTPPTPERNNRPAFFSPSLKRKVPRNRIAEMKKSHSANDSEEFFREDDGGADLHNATNLRSRSLSGTGRSLVGSWLKLNRADGNFLLYAHLTYVTLPLHRILTDILEVRQKPILMT

SEQ ID NO: 48492 - protein, 260 aa, Homo sapiens
MSPRTGDAKPSFFQDCLMEVFDDLEQHIRSPVVLQSILSLMDRGAMVLTTNYDNLLEAFGRRQNKPMESLDLKDKTKVLEWARGHMKYGVLHIHGLYTDPCGVVLDPSGYKDVTQDAEVMEVLQNLYRTKSFLFVGCGETLRDQIFQALFLYSVPNKVDLEHYMLVLKENEDHFFKHQADMLLHGIKVVSYGDCFDHFPGYVQDLATQICKQQSPDADRVDSTTLLGNACQDCAKRKLEENGIEVSKKRTQSDTDDAGGS

SEQ ID NO: 48493 - protein, 461 aa, Homo sapiens
MVPAPIQDLEALRALTALFKEQRNRETAPRTIFQRVLDILKKSSHAVELACRDPSQVENLASSLQLITECFRCLRNACIECSVNQNSIRNLDTIGVAVDLILLFRELRVEQESLLTAFRCGLQFLGNIASRNEDSQSIVWVHAFPELFLSCLNHPDKKIVAYSSMILFTSLNHERMKELEENLNIAIDVIDAYQKHPESEWPFLIITDLFLKSPELVQAMFPKLNNQERVTLLDLMIAKITSDEPLTKDDIPVFLRHAELIASTFVDQCKTVLKLASEEPPDDEEALATIRLLDVLCEMTVNTELLGYLQVFPGLLERVIDLLRVIHVAGKETTNIFSNCGCVRAEGDISNVANGFKSHLIRLIGNLCYKNKDNQDKVNELDGIPLILDNCNISDSNPFLTQWVIYAIRNLTEDNSQNQDLIAKMEEQGLADASLLKKVGFEVEKKGEKLILKSTRDTPKP

SEQ ID NO: 48494 - protein, 83 aa, Homo sapiens [sequence omitted]

SEQ ID NO: 48495 - protein, 416 aa, Homo sapiens
MLEKLTSRPKHLLVFINPFGGKGQGKRIYERKVAPLFTLASITTDIIVTEHANQAKETLYEINIDKYDGIVCVGGDGMFSEVLHGLIGRTQRSAGVDQNHPRAVLVPSSLRIGIIPAGSTDCVCYSTVGTSDAETSALHIVVGDSLAMDVSSVHHNSTLLRYSVSLLGYGFYGDIIKDSEKKRWLGLARYDFSGLKTFLSHHCYEGTVSFLPAQHTVGSPRDRKPCRAGCFVCRQSKQQLEEEQKKALYGLEAAEDVEEWQVVCGKFLAINATNMSCACRRSPRGLSPAAHLGDGSSDLILIRKCSRFNFLRFLIRHTNQQDQFDFTFVEVYRVKKFQFTSKHMEDEDSDLKEGGKKRFGHICSSHPSCCCTVSNSSWNCDGEVLHSPAIEVRVHCQLVRLFARGIEENPKPDSHS

SEQ ID NO: 48496 - protein, 1014 aa, Homo sapiens
MRHVRRAHPTVLIQENGSVSAVSSFPSPSLLLPPQPADAGDLSTILSPIKLVQKVASKIPSPDRITEESVSVVSSEEISSDMSVSEKCGREEALVGSSPHLPALHYDEPAENLAEKSLPLPKSTSGSRRRSAVWKHFYLSPLDNSKAVCIHCMNEFSRGKNGKDLGTSCLIRHMWRAHRAIVLQENGGTGIPPLYSTPPTLLPSLLPPEGELSSVSSSPVKPVRESPSASSSPDRLTEDLQSHLNPGDGLMEDVAAFSSSDDIGEASASSPEKQQADGLSPRLFESGAIFQQNKKVMKRLKSEVWHHFSLAPMDSLKAECRYCGCAISRGKKGDVGTSCLMRHLYRRHPEVVGSQKGFLGASLANSPYATLASAESSSSKLTDLPTVVTKNNQVMFPVNSKKTSKLWNHFSICSADSTKVVCLHCGRTISRGKKPTNLGTSCLLRHLQRFHSNVLKTEVSETARPSSPDTRVPRGTELSGASSFDDTNEKFYDSHPVAKKITSLIAEMIALDLQPYSFVDNVGFNRLLEYLKPQYSLPAPSYFSRTAIPGMYDNVKQIIMSHLKEAESGVIHFTSGIWMSNQTREYLTLTAHWVSFESPARPRCDDHHCSALLDVSQVDCDYSGNSIQKQLECWWEAWVTSTGLQVGITVTDNASIGKTLNEGEHSSVQCFSHTVNLIVSEAIKSQRMVQNLLSLARKICERVHRSPKAKEKLAELQREYALPQHHLIQDVPSKWSTSFHMLERLIEQKRAINEMSVECNFRELISCDQWEVMQSVCRALKPFEAASREMSTQMSTLSQVIPMVHILNRKVEMLFEETMGIDTMLRSLKEAMVSRLSATLHDPRYVFATLLDPRYKASLFTEEEAEQYKQDLIRELELMNSTSEDVAASHRCDAGSPSKDSAAEENLWSLVAKVKKKDPREKLPEAMVLAYLEEEVLEHSCDPLTYWNLKKASWPGLSALAVRFLGCPPSIVPSEKLFNTPTENGSLGQSRLMMEHFEKLIFLKVNLPLIYFQY

SEQ ID NO: 48497 - protein, 248 aa, Homo sapiens
MKHEKLGEDRIQFLVYQMLKGLRYIHAAGIIHRDLKPGNLAVNEDCELKILDFGLARQADSEMTGYVVTRWYRAPEVILNWMRYTQTVDIWSVGCIMAEMITGKTLFKGSDHLDQLKEIMKVTGTPPAEFVQRLQSDEAKNYMKGLPELEKKDFASILTNASPLAVNLLEKMLVLDAEQRVTAGEALAHPYFESLHDTEDEPQVQKYDDSFDDVDRTLDEWKRVTYKEVLSFKPPRQLGARVSKETPL

SEQ ID NO: 48498 - protein, 141 aa, Homo sapiens
MYFGFTHCPDICPDELEKLVQVVRQLEAEPGLPPVQPVFITVDPERDDVEAMARYVQDFHPRLLGLTGSTKQVAQASHSYRVYYNAGPKDEDQDYIVDHSIAIYLLNPDGLFTDYYGRSRSAEQISDSVRRHMAAFRSVLS

SEQ ID NO: 48499 - protein, 289 aa, Homo sapiens [sequence omitted]

SEQ ID NO: 48500 - protein, 388 aa, Homo sapiens
MAGKWHLGVGPEGAFLPPHQGFHRFLGIPYSHDQGPCQNLTCFPPATPCDGGCDQGLVPIPLLANLSVEAQPPWLPGLEARYMAFAHDLMADAQRQDRPFFLYYASHHTHYPQFSGQSFAERSGRGPFGDSLMELDAAVGTLMTAIGDLGLLEETLVIFTADNGPETMRMSRGGCSGLLRCGKGTTYEGGVREPALAFWPGHIAPGVTHELASSLDLLPTLAALAGAPLPNVTLDGFDLSPLLLGTGKSPRQSLFFYPSYPDEVRGVFAVRTGKYKAHFFTQGSAHSDTTADPACHASSSLTAHEPPLLYDLSKDPGENYNLLGGVAGATPEVLQALKQLQLLKAQLDAAVTFGPSQVARGEDPALQICCHPGCTPRPACCHCPDPHA

SEQ ID NO: 48501 - protein, 412 aa, Homo sapiens [sequence omitted]

SEQ ID NO: 48502 - protein, 284 aa, Homo sapiens
MVPIPAGVFTMGTDDPQIKQDGEAPARRVTIDAFYMDAYEVSNTEFEKFVNSTGYLTEAEKFGDSFVFEGMLSEQVKTNIQQAVAAAPWWLPVKGANWRHPEGPDSTILHRPDHPVLHVSWNDAVAYCTWAGKRLPTEAEWEYSCRGGLHNRLFPWGNKLQPKGQHYANIWQGEFPVTNTGEDGFQGTAPVDAFPPNGYGLYNIVGNAWEWTSDWWTVHHSVEETLNPKGPPSGKDRVKKGGSYMCHRSYCYRYRCAARSQNTPDSSASNLGFRCAADRLPTMD

SEQ ID NO: 48503 - protein, 259 aa, Homo sapiens
MVPIPAGVFTMGTDDPQIKQDGEAPARRVTIDAFYMDAYEVSNTEFEKFVNSTGYLTEVAAAPWWLPVKGANWRHPEGPDSTILHRPDHPVLHVSWNDAVAYCTWAGKRLPTEAEWEYSCRGGLHNRLFPWGNKLQPKGQHYANIWQGEFPVTNTGEDGFQGTAPVDAFPPNGYGLYNIVGNAWEWTSDWWTVHHSVEETLNPKGPPSGKDRVKKGGSYMCHRSYCYRYRCAARSQNTPDSSASNLGFRCAADRLPTMD

SEQ ID NO: 48504 - protein, 385 aa, Homo sapiens [sequence omitted]

SEQ ID NO: 48505 - protein, 265 aa, Homo sapiens
MTNPIATGKDPTFDTITYEWAPPGVTQKLGLQYMELIPKEKQPVTGTEGAFYRRRQLMHQLPIYDQDPSRCRGLLENELKLMEEFVKQYKSEALGVGEVALPGQGGLPKEEGKQQEKPEGAETTAATTNGSLSDPSKEVEYVCELCKGAAPPDSPVVYSDRAGYNKQWHPTCFVCAKCSEPLVDLIYFWKDGAPWCGRHYCESLRPRCSGCDEIIFAEDYQRVEDLAWHRKHFVCEGCEQLLSGRAYIVTKGQLLCPTCSKSKRS

SEQ ID NO: 48506 - protein, 663 aa, Homo sapiens
MQLQLGRVTRVQKHRKILRAARDLALDTLIIEYRGKVMLRQQFEVNGHFFKKPYPFVLFYSKFNGVEMCVDARTFGNDARFIRRSCTPNAEVRHMIADGMIHLCIYAVSAITKDAEVTIAFDYEYSNCNYKVDCACHKGNRNCPIQKRNPNATELPLLPPPPSLPTIGAETRRRKARRKELEMEQQNEASEENNDQQSQEVPEKVTVSSDHEEVDNPEEKPEEEKEEVIDDQENLAHSRRTREDRKVEAIMHAFENLEKRKKRRDQPLEQSNSDVEITTTTSETPVGEETKTEAPESEVSNSVSNVTIPSTPQSVGVNTRRSSQAGDIAAEKLVPKPPPAKPSRPRPKSRISRYRTSSAQRLKRQKQANAQQAELSQAALEEGGSNSLVTPTEAGSLDSSGENRPLTGSDPTVVSITGSHVNRAASKYPKTKKYLVTEWLNDKAEKQECPVECPLRITTDPTVLATTLNMLPGLIHSPLICTTPKHYIRFGSPFIPERRRRPLLPDGTFSSCKKRWIKQALEEGMTQTSSVPQETRTQHLYQSNENSSSSSICKDNADLLSPLKKWKSRYLMEQNVTKLLRPLSPVTPPPPNSGSKSPQLATPGSSHPGEEECRNGYSLMFSPVTSLTTASRCNTPLQFEVIWVWLLGVLDMKIIICTFSFQI

SEQ ID NO: 48507 - protein, 343 aa, Homo sapiens
MDGRRVLGRFWSGWRRGLGVRPVPEDAGFGTEARHQRQPRGSCQRSGPLGDQPFAGLLPKNLSREELVDALRAAVVDRKGPLVTLNKPQGLPVTGKPGELTLFSVLPELSQSLGLREQELQVVRASGKESSGLVLLSSCPQTASRLQKYFTHARRAQRPTATYCAVTDGIPAASEGKIQAALKLEHIDGVNLTVPVKAPSRKDILEGVKKTLSHFRVVATGSGCALVQLQPLTVFSSQLQVHMVLQLCPVLGDHMYSARVGTVLGQRFLLPAENNKPQRQVLDEALLRRLHLTPSQAAQLPLHLHLHRLLLPGTRARDTPVELLAPLPPYFSRTLQCLGLRLQ

SEQ ID NO: 48508 - protein, 322 aa, Homo sapiens; identical to SEQ ID NO: 4809

SEQ ID NO: 48509 - protein, 290 aa, Homo sapiens [sequence omitted]

SEQ ID NO: 48510 - protein, 351 aa, Homo sapiens
MRRQGQDESTVRRILKDYTKPLEHPPVKRNEEAQVHDKLNSGMVSNMEGTAGGERPSVVNGDSGKSGGVGDPREPLGCLQEGSGCHPTTESFEKSVREDASPLPHVCCCKQDALILQRGLHHEDGSQHIGLLHPGDRGPDHEYVLVEEAECAMSEREAAPNEELVQRNRLICRRNPYRIFEYLQLSLEEAFFLVYALGCLSIYYEKEPLTIVKLWKAFTVVQPTFRTTYMAYHYFRSKGWVPKVGLKYGTDLLLYRKGPPFYHASYSVIIELVDDHFEGSLRRPLSWKSLAALSRVSVNVSKELMLCYLIKPSTMTDKEMESPECMKRIKVQEVILSRWVSSRERSDQDDL

SEQ ID NO: 48511 - protein, 225 aa, Homo sapiens
MAGKLAVERGWAINVGGGFHHCSSDRGGGFCAYADITLAIKFLFERVEGISRATIIDLDAHQGNGHERDFMDDKRVYIMDVYNRHIYPGDRFAKQAIRRKVELEWGTEDDEYLDKVERNIKKSLQEHLPDVVVYNAGTDILEGDRLGGLSISPAGIVKRDELVFRMVRGRRVPILMVTSGGYQKRTARIIADSILNLFGLGLIGPESPSVSAQNSDTPLLPPAVP

SEQ ID NO: 48512 - protein, 823 aa, Homo sapiens
MNEDSNEEEEESENDWEEVEELSEPVLGDVRESTAFSRSLLPVKPVEIEIETPEQAKTRERSEKIKLEFETYLRRAMKRFNKGVHEDTHKVHLLCLLANGFYRNNICSQPDLHAIGLSIIPARFTRVLPRDVDTYYLSNLVKWFIGTFTVNAELSASEQDNLQTTLERRFAIYSARDDEELVHIFLLILRALQLLTRLVLSLQPIPLKSATAKGKKPSKERLTADPGGSSETSSQVLENHTKPKTSKGTKQEETFAKGTCRPSAKGKRNKGGRKKRSKPSSSEEDEGPGDKQEKATQRRPHGRERRVASRVSYKEESGSDEAGSGSDFELSSGEASDPSDEDSEPGPPKQRKAPAPQRTKAGSKSASRTHRGSHRKDPSLPAASSSSSSSKRGKKMCSDGEKAEKRSIAGIDQWLEVFCEQEEKWVCVDCVHGVVGQPLTCYKYATKPMTYVVGIDSDGWVRDVTQRYDPVWMTVTRKCRVDAEWWAETLRPYQSPFMDREKKEDLEFQAKHMDQPLPTAIGLYKNHPLYALKRHLLKYEAIYPETAAILGYCRGEAVYSRDCVHTLHSRDTWLKKARVVRLGEVPYKMVKGFSNRARKARLAEPQLREENDLGLFGYWQTEEYQPPVAVDGKVPRNEFGNVYLFLPSMMPIGCVQLNLPNLHRVARKLDIDCVQAITGFDFHGGYSHPVTDGYIVCEEFKDVLLTAWENEQAVIERKEKEKKEKRALGNWKLLAKGLLIRERLKRRYGPKSEAAAPHTDAGGGLSSDEEEGTSSQAEAARILAASWPQNREDEEKQKLKGGPKKTKREKKAAASHLFPFEQL

SEQ ID NO: 48513 - protein, 372 aa, Homo sapiens
MTKGDFIDEEVEDMYLVDFTQKIIDKRKEMEASGAHRDSQKAGERDDDEENLPEGEIPPPQDPSEEWVDYVDSLGRSRRCMRKDLPDLLEMDKNLQGRLFISPANEKTLLSEDMRKELQRQQWEEEEREALKRPMGPVHYEDIRENEARQLGVGYFAFARDKELRNKQMKTLEMLREQTTDQRTKRENIKEKRKAILEARLAKLRQKKMKKSKEGGTEEENRDGDVIGPLPPEPEAVPTPRPAAQSSKVEVIVQERKDTKPGVPHIREWDRGKEFSFGYWSKRQSDLRAERDPEFAPPSDYFVGQKRTGFSSSQAWSRPGPAQSDPGQCPDQSHGPSPEHTSPTPAPDNPPQAPTVTFKTLDDMISYYKQVT

SEQ ID NO: 48514 - protein, 587 aa, Homo sapiens
MNVDLRERFAYPMPFCDRWGKLPLSPKQKTTFSKWVRPEDLTNNPTMIYTVSSFSIKQTIVSDCSFVASLAISAAYERRFNKKLITGIIYPQNKDGEPEYNPCGKYMVKLHLNGVPRKVIIDDQLPVDHKGELLCSYSNNKSELWVSLIEKAYMKVMGGYDFPGSNSNIDLHALTGWIPERIAMHSDSQTFSKDNSFRMLYQRFHKGDVLITASTGMMTEAEGEKWGLVPTHAYAVLDIREFKGLRFIQLKNPWSHLRWKGRYSENDVKNWTPELQKYLNFDPRTAQKIDNGIFWISWDDLCQYYDVIYLSWNPGLFKESTCIHSTWDAKQGPVKDAYSLANNPQYKLEVQCPQGGAAVWVLLSRHITDKDDFANNREFITMVVYKTDGKKVYYPADPPPYIDGIRINSPHYLTKIKLTTPGTHTFTLVVSQYEKQNTIHYTVRVYSACSFTFSKIPSPYTLSKRINGKWSGQSAGGCGNFQETHKNNPIYQFHIEKTGPLLIELRGPRQYSVGFEVVTVSTLGDPGPHGFLRKSSGDYRCGFCYLELENIPSGIFNIIPSTFLPKQEGPFFLDFNSIIPIKITQLQ

SEQ ID NO: 48515 - protein, 146 aa, Homo sapiens [sequence omitted]

SEQ ID NO: 48516 - protein, 822 aa, Homo sapiens [sequence omitted]

SEQ ID NO: 48517 - protein, 247 aa, Homo sapiens
MDRHYFQNTGAYDSLMSLRGGENLELSFKAWLCGGSVEILPCSRVGHIYQNQDSHSPLDQEATLRNRVRIAETWLGSFKETFYKHSPEAFSLSKAEKPDCMERLQLQRRLGCRTFHWFLANVYPELYPSEPRPSFSGKLHNTGLGLCADCQAEGDILGCPMVLAPCSDSRQQQYLQHTSRKEIHFGSPQHLCFAVRQEQVILQNCTEEGLAIHQQHWDFQEDENRANSAAAEAYQRPLTFQQIVNNG

SEQ ID NO: 48518 - protein, 135 aa, Homo sapiens
MDDTETGLLSAICLICGDRQDLEEPTKVDKLQEPLLEALKIYIRKRRPSKPHMFPKILMKITDLRSISAKGAERVITLKMEIPGSMPPLIQEMLENSEGHEPLTPSSSGNTAEHSPSISPSSVENSGVSQSPLVQ

SEQ ID NO: 48519 - protein, 84 aa, Homo sapiens
MREKAKERCSEQVQDFTKCCKNSGVLMVVKCRKENSALKECLTAYYNDPAFYEECKMEYLKEREEFRKTGIPTKKRLQKLPTSM

SEQ ID NO: 48520 - protein, 120 aa, Homo sapiens
MNKDNSESLKVLNEQLQSKEVELLQLRTEVETQQVMRNLNPPSSNWEVEKLSCDLKIHGLEQELELMRKECSDLKIELQKAKQTDPYQEDNLKSRDLQKLSISRVSVAQPGVQWRNHGIA

SEQ ID NO: 48521 - protein, 558 aa, Homo sapiens
MEAQKDEIICPSCNRTAHPLRHINNDMIVTDNNGAVKFPQLCKFCDVRFSTCDNQKSCMSNCSITSICEKPQEVCVAVWRKNDENITLETVCHDPKLPYHDFILEDAASPKCIMKEKKKPGETFFMCSCSSDECNDNIIFSEEYNTSNPDLLLVIFQVTGISLLPPLGVAISVIIIFYCYRVNRQQKLSSTWETGKTRKLMEFSEHCAIILEDDRSDISSTCANNINHNTELLPIELDTLVGKGRFAEVYKAKLKQNTSEQFETVAVKIFPYEEYASWKTEKDIFSDINLKHENILQFLTAEERKTELGKQYWLITAFHAKGNLQEYLTRHVISWEDLRKLGSSLARGIAHLHSDHTPCGRPKMPIVHRDLKSSNILVKNDLTCCLCDFGLSLRLDPTLSVDDLANSGQVGTARYMAPEVLESRMNLENVESFKQTDVYSMALVLWEMTSRCNAVGEVKDYEPPFGSKVREHPCVESMKDNVLRDRGRPEIPSFWLNHQGIQMVCETLTECWDHDPEARLTAQCVAERFSELEHLDRLSGRSCSEEKIPEDGSLNTTK

SEQ ID NO: 48522 - protein, 803 aa, Homo sapiens [sequence omitted]

SEQ ID NO: 48523 - protein, 421 aa, Homo sapiens
MALGNSRHGHHGPGAQCAHKAAGGAAPPKPAPAGLSGGLSQPAGWQSLLSFTILFLAWLAGFSSRLFAVIRFESIIHEFDPWFNYRSTHHLASHGFYEFLNWFDERAWYPLGRIVGGTVYPGLMITAGLIHWILNTLNITVHIRDVCVFLAPTFSGLTSISTFLLTRELWNQGAGLLAACFIAIVPGYISRSVAGSFDNEGIAIFALQFTYYLWVKSVKTGSVFWTMCCCLSYFYMVSAWGGYVFIINLIPLHVFVLLLMQRYSKRVYIAYSTFYIVGLILSMQIPFVGFQPIRTSEHMAAAGVFALLQAYAFLQYLRDRLTKQEFQTLFFLGVSLAAGAVFLSVIYLTYTGYIAPWSGRFYSLWDTGYAKIHIPIIASVSEHQPTTWVSFFFDLHILVCTFPAGLWFCIKNINDERVFGA

SEQ ID NO: 48524 - protein, 1508 aa, Homo sapiens
MEYFCAQVQQKDVGGRLQVGQELLLYLGAPGAISDLEEDLGRLGKTVDALTGWVGSSNYRVSLMGLEILSAFVDRLSTRFKSYVAMVIVALIDRMGDAKDKVRDEAQTLILKLMDQVAPPMYIWEQLASGFKHKNFRSREGVCLCLIETLNIFGAQPLVISKLIPHLCILFGDSNSQVRDAAILAIVEIYRHVGEKVRMDLYKRGIPPARLEMIFAKFDEVQSSGGMILSVCKDKSFDDEESVDGNRPSSAASAFKVPAPKTSGNPANSARKPGSAGGPKVGGASKEGGAGAVDEDDFIKAFTDVPSIQIYSSRELEETLNKIREILSDDKHDWDQRANALKKIRSLLVAGAAQYDCFFQHLRLLDGALKLSAKDLRSQVVREACITVAHLSTVLGNKFDHGAEAIVPTLFNLVPNSAKVMATSGCAAIRFIIRHTHVPRLIPLITSNCTSKSVPVRRRSFEFLDLLLQEWQTHSLERHAAVLVETIKKGIHDADAEARVEARKTYMGLRNHFPGEAETLYNSLEPSYQKSLQTYLKSSGSVASLPQSDRSSSSSQESLNRPFSSKWSTANPSTVAGRVSAGSSKASSLPGSLQRSRSDIDVNAAAGAKAHHAAGQSVRSGRLGAGALNAGSYASLEDTSDKLDGTASEDGRVRAKLSAPLAGMGNAKADSRGRSRTKMVSQSQPGSRSGSPGRVLTTTALSTVSSGVQRVLVNSASAQKRSKIPRSQGCSREASPSRLSVARSSRIPRPSVSQGCSREASRESSRDTSPVRSFQPLGPGYGISQSSRLSSSVSAMRVLNTGSDVEEAVADALLLGDIRTKKKPARRRYESYGMHSDDDANSDASSACSERSYSSRNGSIPTYMRQTEDVAEVLNRCASSNWSERKEGLLGLQNLLKNQRTLSRVELKRLCEIFTRMFADPHGKVFSMFLETLVDFIQVHKDDLQDWLFVLLTQLLKKMGADLLGSVQAKVQKALDVTRESFPNDLQFNILMRFTVDQTQTPSLKVKVAILKYIETLAKQMDPGDFINSSETRLAVSRVITWTTEPKSSDVRKAAQSVLISLFELNTPEFTMLLGALPKTFQDGATKLLHNHLRNTGNGTQSSMGSPLTRPTPRSPANWSSPLTSPTNTSQNTLSPSAFDYDTENMNSEDIYSSLRGVTEAIQNFSFRSQEDMNEPLKRDSKKDDGDSMCGGPGMSDPRAGGDATDSSQTALDNKASLLHSMPTHSSPRSRDYNPYNYSDSISPFNKSALKEAMFDDDADQFPDDLSLDHSDLVAELLKELSNHNERVEERKIALYELMKLTQEESFSVWDEHFKTILLLLLETLGDKEPTIRALALKVLREILRHQPARFKNYAELTVMKTLEAHKDPHKEVVRSAEEAASVLATSISPEQCIKVLCPIIQTADYPINLAAIKMQTKVIERVSKETLNLLLPEIMPGLIQGYDNSESSVRKACVFCLVAVHAVIGDELKPHLSQLTGSKMKLLNLYIKRAQTGSGGADPTTDVSGQS

SEQ ID NO: 48525 - protein, 1271 aa, Homo sapiens
MGDDKSFDDEESVDGNRPSSAASAFKVPAPKTSGNPANSARKPGSAGGPKVGGASKEGGAGAVDEDDFIKAFTDVPSIQIYSSRELEETLNKIREILSDDKHDWDQRANALKKIRSLLVAGAAQYDCFFQHLRLLDGALKLSAKDLRSQVVREACITVAHLSTVLGNKFDHGAEAIVPTLFNLVPNSAKVMATSGCAAIRFIIRHTHVPRLIPLITSNCTSKSVPVRRRSFEFLDLLLQEWQTHSLERHAAVLVETIKKGIHDADAEARVEARKTYMGLRNHFPGEAETLYNSLEPSYQKSLQTYLKSSGSVASLPQSDRSSSSSQESLNRPFSSKWSTANPSTVAGRVSAGSSKASSLPGSLQRSRSDIDVNAAAGAKAHHAAGQSVRSGRLGAGALNAGSYASLEDTSDKLDGTASEDGRVRAKLSAPLAGMGNAKADSRGRSRTKMVSQSQPGSRSGSPGRVLTTTALSTVSSGVQRVLVNSASAQKRSKIPRSQGCSREASPSRLSVARSSRIPRPSVSQGCSREASRESSRDTSPVRSFQPLGPGYGISQSSRLSSSVSAMRVLNTGSDVEEAVADALKKPARRRYESYGMHSDDDANSDASSACSERSYSSRNGSIPTYMRQTEDVAEVLNRCASSNWSERKEGLLGLQNLLKNQRTLSRVELKRLCEIFTRMFADPHGKRVFSMFLETLVDFIQVHKDDLQDWLFVLLTQLLKKMGADLLGSVQAKVQKALDVTRESFPNDLQFNILMRFTVDQTQTPSLKVKVAILKYIETLAKQMDPGDFINSSETRLAVSRVITWTTEPKSSDVRKAAQSVLISLFELNTPEFTMLLGALPKTFQDGATKLLHNHLRNTGNGTQSSMGSPLTRPTPRSPANWSSPLTSPTNTSQNTLSPSAFDYDTENMNSEDIYSSLRGVTEAIQNFSFRSQEDMNEPLKRDSKKDDGDSMCGGPGMSDPRAGGDATDSSQTALDNKASLLHSMPTHSSPRSRDYNPYNYSDSISPFNKSALKEAMFDDDADQFPDDLSLDHSDLVAELLKELSNHNERVEERKIALYELMKLTQEESFSVWDEHFKTILLLLLETLGDKEPTIRALALKVLREILRHQPARFKNYAELTVMKTLEAHKDPHKEVVRSAEEAASVLATSISPEQCIKVLCPIIQTADYPINLAAIKMQTKVIERVSKETLNLLLPEIMPGLIQGYDNSESSVRKACVFCLVAVHAVIGDELKPHLSQLTGSKMKLLNLYIKRAQTGSGGADPTTDVSGQS

SEQ ID NO: 48526 - protein, 334 aa, Homo sapiens
MKLQAHMVAEISPSSSPLPAPGSLTSTPARAGLHPGGKAHAFQEYIFKKPTFCDVCNHMIVGTNAKHGLRCKACKMSIHHKCTDGLAPQRCMGKLPKGFRRYYSSPLLIHEQFGCIKEVMPIACGNKVDPVYETLRFGTSLAQRTKKGSSGSGSDSPHRTSTSDLVEVPEEANGPGGGYDLRKRSNSVFTYPENGTDDFRDPAKNINHQGSLSKDPLQMNTYVALYKFVPQENEDLEMRPGDIITLLEDSNEDWWKGKIQDRIGFFPANFVQRLQQNEKIFRCVRTFIGCKEQGQITLKENQICVSSEEEQDGFIRVLSGKKKGLIPLDVLENI

SEQ ID NO: 48527 - protein, 177 aa, Homo sapiens
MGLGVSAEQPAGGAEGFHLHGVQENSPAQQAGLEPYFDFIITIGHSRLNKENDTLKALLKANVEKPVKLEVFNMKTMRVREVEVVPSNMWGGQGLLGASVRFCSFRRASEQVWHVLDVEPSSPAALAGLRPYTDYVVGSDQILQEVRNPQFAPPQTLWMWCEEKGAVHEKCLVLLRL

SEQ ID NO: 48528 - protein, 481 aa, Homo sapiens
MCTGGKTKTENEEKTAQLNISKESESHRLIVEGLLMDVPQHPDFKDRLEKSQLHDTGNKTKIGDCTDLTVQDHESSTTEREEIARKLEESSVSTHLITKQGFAKEQVFYKCGECGSYYNPHSDFHLHQRVHTNEKPYTCKECGKTFRYNSKLSRHQKIHTGEKPYSCEECGQAFSQNSHLLQHQKLHGGQRPYECTDCGKTFSYNSKLIRHQRIHTGEKPFKCKECGKAFSCSYDCIIHERIHNGEKPYECKECGKSLSSNSVLIQHQRIHTGEKPYECKECGKAFHRSSVFLQHQRFHTGEQLYKCNECWKTFSCSSRFIVHQRIHNGEKPYECQECGKTFSQKITLVQHQRVHTGEKPYECKECGKAFRWNASFIQHQKWHTRKKLINGTGLSAVKPYCPCAILSPLPPQHTCSALAPPGPPLSSSHAVVLPPSVPFFLLLPSSEKANPSPVQIAHFFQDLAFPGKSSLQSPNPLSHSL

SEQ ID NO: 48529 - protein, 575 aa, Homo sapiens
MKDELLQFYTSAAEESEPESVCSTPLKRNESSSSVQNYFHLDSLQKKLKDLEEENVVLRSEASQLKTETITYEEKEQQLVNDCVKELRDANVQIASISEELAKKTEDAARQQEEITHLLSQIVDLQKKAKACAVENEELVQHLGAAKDAQRQLTAELRELEDKYAECMEMLHEAQEELKNLRNKTMPNTTSRRYHSLGLFPMDSLAAEIEGTMRKELQLEEAESPDITHQKRVFETVRNINQVVKQRSLTPSPMNIPGSNQSSAMNSLLSSCVSTPRSSFYGSDIGNVVLDNKTNSIILETEAADLGNDERSKKPGTPGTPGSHDLETALRRLSLRRENYLSERRFFEEEQERKLQELAEKGELRSGSLTPTESIMSLGTHSRFSEFTGFSGMSFSSRSYLPEKLQIVKPLEGSATLHHWQQLAQPHLGGILDPRPGVVTKGFRTLDVDLDEVYCLNDFEEDDTGDHISLPRLATSTPVQHPETSGERSQARVTVSGSRSYPSRPQASPEEMQEPPAATEEEEEEEEEEGSGEGTTISPVNLAPFPEAEFWAILTSVPGTIRSGSLSVASARLCG

SEQ ID NO: 48530 - protein, 514 aa, Homo sapiens
MVCTGRTHTDRICRFKWLCYSNEAEEFIFFHGNTSVMLPNLGSRRFQPALLDLSTVEDHNTQYFNFVELPAAALRFMPKPVFVPDVALIANRFNPDNLMHVFHDDLLPLFYTLRQFPGLAHEARLFFMEGWGEGAHFDLYKLLSPKQPLLRAQLKTLGRLLCFSHAFVGLSKITTWYQYGFVQPQGPKANILVSGNEIRQFARFMTEKLNVSHTGVPLGEEYILVFSRTQNRLILNEAELLLALAQEFQMKTVTVSLEDHTFADVVRLVSNASMLVSMHGAQLVTTLFLPRGATVVELFPYAVNPDHYTPYKTLAMLPGMDLQYVAWRNMMPENTVTHPERPWDQGGITHLDRAEQARILQSREVPRHLCCRNPEWLFRIYQDTKVDIPSLIQTIRRVVKGRPGPRKQKWTVGLYPGKVREARCQASVHGASEARLTVSWQIPWNLKYLKVREVKYEVWLQEQGENTYVPYILALQNHTFTENIKPFTTYLVWVRCIFNKILLGPFADVLVCNT

SEQ ID NO: 48531 - protein, 203 aa, Homo sapiens
MILLGHNLGGFLAAAYSLKYPSRVNHLILVEPWGFPERPDLADQDRPIPVWIRALGAALTPFNPLAGLRIAGPFGLSLVQRLRPDFKRKYSSMFEDDTVTEYIYHCNVQTPSGETAFKNMTIPYGWAKRPMLQRIGKMHPDIPVSVIFGARSCIDGNSGTSIQSLRPHSYVKTIAILGAGHYVYADQPEEFNQKVKEICDTVD

SEQ ID NO: 48532 - protein, 541 aa, Homo sapiens
MQGAEERDIRRETCPGWVNKNKPALEQDVCKIDSSGIVVKRFQEDEYQDSTFEEKYACEGMKENSPREIAESCLFQEGGFGRITFIHKEAPPEIISQGYNFEKSLLLTSSLVTRLRVSTEESLHQWETSNIQTNDISDQSKCPTLCTQKKSWKCNECGKTFTQSSSLTQHQRTHTGERPYTCEECGKAFSRSSFLVQHQRIHTGVKPYGCEQCGKTFRCRSFLTQHQRIHTGEKPYKCNECGNSFRNHSHLTEHQRIHTGEKPYKCNRCGKAFNQNTHLIHHQRIHTGEKPYICSECGSSFRKHSNLTQHQRIHTGEKPHKCDECGKTFQTKANLSQHQRIHSGEKPYKCKECGKAFCQSPSLIKHQRIHTGEKPYKCKECGKAFTQSTPLTKHQRIHTGERPYKCSECGKAFIQSICLIRHQRSHTGEKPYKCNECGKGFNQNTCLTQHMRIHTGEKPYKCKECGKAFAHSSSLTEHHRTHTGEKLYKCSECEKTFRKYAHLSEHYRIHTGEKPYECIECGKFFRHSSVLFRHQKLHSGD

SEQ ID NO: 48533 - protein, 326 aa, Homo sapiens
MLIPTHHFRNIERKPEYLQPEKCVPPPYPGPVGTMWFIRDGCGIACAIVTWFLVLYAEFVVLFVMLIPSRDYVYSIINGIVFNLLAFLALASHCRAMLTDPGAVPKGNATKEFIESLQLKPGQVVYKCPKCCSIKPDRAHHCSVCKRCIRKMDHHCPWVNNCVGENNQKYFVLFTMYIALISLHALIMVGFHFLHCFEEDWTTYGLNREEMAETGISLHEKMQPLNFSSTECSSFSPPTTVILLILLCFEGLLFLIFTSVMFGTQVHSICTDETGIEQLKKEERRWAKKTKWMNMKAVFGHPFSLGWASPFATPDQGKADPYQYVV

SEQ ID NO: 48534 - protein, 298 aa, Homo sapiens
MLIPTHHFRNIERKPEYLQPEKCVPPPYPGPVGTMWFIRDGCGIACAIVTWFLVLYAEFVVLFVMLIPSRDYVYSIINGIVFNLLAFLALASHCRAMLTDPGAVPKGNATKEFIESLQLKPGQVVYKCPKCCSIKPDRAHHCSVCKRCIRKMDHHCPWVNNCVGENNQKYFVLFTMYIALISLHALIMVGFHFLHCFEEDWTKCSSFSPPTTVILLILLCFEGLLFLIFTSVMFGTQVHSICTDETGIEQLKKEERRWAKKTKWMNMKAVFGHPFSLGWASPFATPDQGKADPYQYVV

SEQ ID NO: 48535 - protein, 547 aa, Homo sapiens
MEEIRRQGKLCDVTLKIGDHKFSAHRIVLAASIPYFHAMFTNDMMECKQDEIVMQGMDPSALEALINFAYNGNLAIDQQNVQSLLMGASFLQLQSIKDACCTFLRERLHPKNCLGVRQFAETMMCAVLYDAANSFIHQHFVEVSMSEEFLALPLEDVLELVSRDELNVKSEEQVFEAALAWVRYDREQRGPYLPELLSNIRLPLCRPQFLSDRVQQDDLVRCCHKCRDLVDEAKDYHLMPERRPHLPAFRTRPRCCTSIAGLIYAVGGLNSAGDSLNVVEVFDPIANCWERCRPMTTARSRVGVAVVNGLLYAIGGYDGQLRLSTVEAYNPETDTWTRVGSMNSKRSAMGTVVLDGQIYVCGGYDGNSSLSSVETYSPETDKWTVVTSMSSNRSAAGVTVFEGRIYVSGGHDGLQIFSSVEHYNHHTATWHPAAGMLNKRCRHGAASLGSKMFVCGGYDGSGFLSIAEMYSSVADQWCLIVPMHTRRSRVSLVASCGRLYAVGGYDGQSNLSSVEMYDPETDCWTFMAPMACHEGGVGVGCIPLLTI

SEQ ID NO: 48536 - protein, 1553 aa, Homo sapiens [sequence omitted]

SEQ ID NO: 48537 - protein, 42 aa, Homo sapiens
MGVSLYTTFSPSISKLIVKSALWHSSSPSATTVSWDRSWVSA

SEQ ID NO: 48538 - protein, 118 aa, Homo sapiens
MGFGATLAVGLTIFVLSVVTIIICFTCSCCCLYKTCRRPRPVVTTTTSTTVVHAPYPQPPSVPPSYPGPSYQGYHTMPPQPGMPAAPYPMQYPPPYPAQPMGPPAYHETLAGECPCQL

SEQ ID NO: 48539 - protein, 729 aa, Homo sapiens [sequence omitted]

SEQ ID NO: 48540 - protein, 368 aa, Homo sapiens
MRKFTPQYKGVVSVRFEEDEDRNLCLIAYPLKGDHGIVDIVDNSDCEPKSKLLRWTTNKKHHVLETEKTPKDWVRQHRKEEKMKSHKLEEEFEWLKKSEVLYYTVEKKGNISSQLKHYNPWSMKCHQQQLQRMKENAKHRNQYKFILLENLTSRYEVPCVLDLKMGTRQHGDDASEEKAANQIRKCQQSTSAVIGVRVCGMQVYQAGSGQLMFMNKYHGRKLSVQGFKEALFQFFHNGRYLRRELLGPVLKKLTELKAVLERQESYRFYSSSLLVIYDGKERPEVVLDSDAEDLEDLSEESADESAGAYAYKPIGASSVDVRMIDFAHTTCRLYGEDTVVHEGQDAGYIFGLQSLIDIVTEISEESGE

SEQ ID NO: 48541 - protein, 499 aa, Homo sapiens
MVFVHLYLGNVLALLLFVHYSNGDESSDPGPQHRAQGPGPEPTLGPLTRLEGIKVGHERKVQLVTDRDHFIRTLSLKPLLFEIPGFLTDEECRLIIHLAQMKGLQRSQILPTEEYEEAMSTMQVSQLDLFRLLDQNRDGHLQLREVLAQTRLGNGWWMTPESIQEMYAAIKADPDGDGVLSLQEFSNMDLRDFHKYMRSHKAESSELVRNSHHTWLYQGEGAHHIMRAIRQRVLRLTRLSPEIVELSEPLQVVRYGEGGHYHAHVDSGPVYPETICSHTKLVANESVPFETSCRQVSPNWGLPSILRPGTPMTQAQPCTVGVPLGMGPGDHWVIPVSPWEHPQLGTCSVPPLPYSYMTVLFYLNNVTGGGETVFPVADNRTYDEMSLIQDDVDLRDTRRHCDKGNLRVKPQQGTAVFWYNYLPDGQGWVGDVDDYSLHGGCLVTRGTKWIANNWINVDPSRARQALFQQEMARLAREGGTDSQPEWALDRAYRDARVEL

SEQ ID NO: 48542 - protein, 93 aa, Homo sapiens
MSILPFPDLLSRTAVLDCTAPGLHIAVRTEMICKFLVQLSMDFSSYYNRVHILGEPRPHLFGQMFVRLQLLRAVREVLHTGLAMLGLPPLSHI

SEQ ID NO: 48543 - protein, 162 aa, Homo sapiens
MEPHLLEACVRDVLNDTAPRAMAVLESLRVIITNFPAAKSLDIQVPNFPADETKGFHQVPFAPIVFIERTDFKEEPEPGFKRLAWGQPVGLRHTGYVIELQHVVKGPSGCVESLEVTCRRADAGEKPKAFIHWVSQPLMCEVRLYERLTRTLKILLRCLVDF

SEQ ID NO: 48544 - protein, 908 aa, Homo sapiens
MYNVGEHNLFPGPIDNSGLFSDPESQTLKEHLIDELDYVLVPTEAWNKLLNWYGCVEGQQPIVRKVVEHGLFVKHCKVEVYLLELKLCENSDPTNVLSCHFSKADTIATIEKEMRKLFNIPAERETRLWNKYMSNTYEQLSKLDNTVQDAGLYQGQVLVIEPQNEDGTWPRQTLQSKSSTAPSRNFTTSPKSSASPYSSVSASLIANGDSTSTCGMHSSGVSRGGSGFSASYNCQEPPSSHIQPGLCGLGNLGNTCFMNSALQCLSNTAPLTDYFLKDEYEAEINRDNPLGMKGEIAEAYAELIKQMWSGRDAHVAPRMFKTQVGRFAPQFSGYQQQDSQELLAFLLDGLHEDLNRVKKKPYLELKDANGRPDAVVAKEAWENHRLRNDSVIVDTFHGLFKSTLVCPECAKVSVTFDPFCYLTLPLPLKKDRVMEVFLVPADPHCRPTQYRVTVPLMGAVSDLCEALSRLSGIAAENMVVADVYNHRFHKIFQMDEGLNHIMPRDDIFVYEVCSTSVDGSECVTLPVYFRERKSRPSSTSSASALYGQPLLLSVPKHKLTLESLYQAVCDRISRYVKQPLPDEFGSSPLEPGACNGSRNSCEGEDEEEMEHQEEGKEQLSETEGSGEDEPGNDPSETTQKKIKGQPCPKRLFTFSLVNSYGTADINSLAADGKLLKLNSRSTLAMDWDSETRRLYYDEQESEAYEKHVSMLQPQKKKKTTVALRDCIELFTTMETLGEHDPWYCPNCKKHQQATKKFDLWSLPKILVVHLKRFSYNRYWRDKLDTVVEFPIRGLNMSEFVCNLSARPYVYDLIAVSNHYGAMGVGHYTAYAKNKLNGKWYYFDDSNVSLASEDQIVTKAAYVLFYQRRDDEFYKTPSLSSSGSSDGGTRPSSSQQGFGDDEACSMDTN

SEQ ID NO: 48545 - protein, 112 aa, Homo sapiens
MCFSIDSPDSLENIPEKWTPEVKHFCPNVPIILVGNKKDLRNDEHTRRELAKMKQEPVKPEEGRDMANRIGAFGYMECSAKTKDGVREVFEMATRAALQARRGKKKSGCLVL

SEQ ID NO: 48546 - protein, 893 aa, Homo sapiens
MSVGLSLLLPLSGRTFLLLLSVVMAQSHWPSEPSEAVRDWENQLEASMHSVLSDLHEAVPTVVGIPDGTAVVGRSFRVTIPTDLIASSGDIIKVSAAGKEALPSWLHWDSQSHTLEGLPLDTDKGVHYISVSATRLGANGSHIPQTSSVFSIEVYPEDHSELQSVRTASPDPGEVVSSACAADEPVTVLTVILDADLTKMTPKQRIDLLHRMRSFSEVELHNMKLVPVVNNRLFDMSAFMAGPGNAKKVVENGALLSWKLGCSLNQNSVPDIHGVEAPAREGAMSAQLGYPVVGWHIANKKPPLPKRVRRQIHATPTPVTAIGPPTTAIQEPPSRIVPTPTSPAIAPPTETMAPPVRDPVPGKPTVTIRTRGAIIQTPTLGPIQPTRVSEAGTTVPGQIRPTMTIPGYVEPTAVATPPTTTTKKPRVSTPKPATPSTDSTTTTTRRPTKKPRTPRPVPRVTTKVSITRLETASPPTRIRTTTSGVPRGGEPNQRPELKNHIDRVDAWVGTYFEVKIPSDTFYDHEDTTTDKLKLTLKLREQQLVGEKSWVQFNSNSQLMYGLPDSSHVGKHEYFMHATDKGGLSAVDAFEIHVHRRPQGDRAPARFKAKFVGDPALVLNDIHKKIALVKKLAFAFGDRNCSTITLQNITRGSIVVEWTNNTLPLEPCPKEQIAGLSRRIAEDDGKPRPAFSNALEPDFKATSITVTGSGSCRHLQFIPVVPPRRVPSEAPPTEVPDRDPEKSSEDDVYLHTVIPAVVVAAILLIAGIIAMICYRKKRKGKLTLEDQATFIKKGVPIIFADELDDSKPPPSSSMPLILQEEKAPLPPPEYPNQSVPETTPLNQDTMGEYTPLRDEDPNAPPYQPPPPFTAPMEGKGSRPKNMTPYRSPPPYVPP

SEQ ID NO: 48547 - protein, 1307 aa, Homo sapiens [sequence omitted]

SEQ ID NO: 48548 - protein, 247 aa, Homo sapiens [sequence omitted]

SEQ ID NO: 48549 - protein, 846 aa, Homo sapiens
MEFKDREMPPVDPNILDYIQPSTQDREHSGMNVNRREESTHDHTIERPAFGIQKGEFEHSETREGETQGVAFEHESPADFQNSQSPVQDQDKSQLSGREEQSSDAGLFKEEGGLDFLGRQDTDYRSMEYRDVDHRLPGSQMFGYGQSKSFPEGKTARDAQRDLQDQDYRTGPSEEKPSRLIRLSGVPEDATKEEILNAFRTPDGMPVKNLQLKEYNTGYDYGYVCVEFSLLEDAIGCMEANQGTLMIQDKEVTLEYVSSLDFWYCKRCKANIGGHRSSCSFCKNPREVTEAKQELITYPQPQKTSIPAPLEKQPNQPLRPADKEPEPRKREEGQESRLGHQKREAERYLPPSRREGPTFRRDRERESWSGETRQDGESKTIMLKRIYRSTPPEVIVEVLEPYVRLTTANVRIIKNRTGPMGHTYGFIDLDSHAEALRVVKILQNLDPPFSIDGKMVAVNLATGKRRNDSGDHSDHMHYYQGKKYFRDRRGGGRNSDWSSDTNRQGQQSSSDCYIYDSATGYYYDPLAGTYYDPNTQQEVYVPQDPGLPEEEEIKEKKPTSQGKSSSKKEMSKRDGKEKKDRGVTRFQENASEGKAPAEDVFKKPLPPTVKKEESPPPPKVVNPLIGLLGEYGGDSDYEEEEEEEQTPPPQPRTAQPQKREEQTKKENEEDKLTDWNKLACLLCRRQFPNKEVLIKHQQLSDLHKQNLEIHRKIKQSEQELAYLERREREGKFKGRGNDRREKLQSFDSPERKRIKYSRETDSDRKLVDKEDIDTSSKGGCVQQATGWRKGTGLGYGHPGLASSEEAEGRMRGPSVGASGRTSKRQSNETYRDAVRRVMFARYKELD

SEQ ID NO: 48550 - protein, 552 aa, Homo sapiens
MEFKDREMPPVDPNILDYIQPSTQDREHSGMNVNRREESTHDHTIERPAFGIQKGEFEHSETREGETQGVAFEHESPADFQNSQSPVQDQDKSQLSGREEQSSDAGLFKEEGGLDFLGRQDTDYRSMEYRDVDHRLPGSQMFGYGQSKSFPEGKTARDAQRDLQDQDYRTGPSEEKPSRLIRLSGVPEDATKEEILNAFRTPDGMPVKNLQLKEYNTGYDYGYVCVEFSLLEDAIGCMEANQGTLMIQDKEVTLEYVSSLDFWYCKRCKANIGGHRSSCSFCKNPREVTEAKQELITYPQPQKTSIPAPLEKQPNQPLRPADKEPEPRKREEGQESRLGHQKREAERYLPPSRREGPTFRRDRERESWSGETRQDGESKTIMLKRIYRSTPPEVIVEVLEPYVRLTTANVRIIKNRTGPMGHTYGFIDLDSHAEALRVVKILQNLDPPFSIDGKMVAVNLATGKRRNDSGDHSDHMHYYQGKKYFRDRRGGGRNSDWSSDTNRQGQQSSSDCYIYDSATGYYYDPLAGTYYDPNTQVSLGLFFFFFFFYLCQ

SEQ ID NO: 48551 - protein, 338 aa, Homo sapiens
MIDKNLREDGEKAAREVKLLLLGAGESGKSTIVKQMKIIHEDGYSEEECRQYRAVVYSNTIQSIMAIVKAMGNLQIDFADPSRADDARQLFALSCTAEEQGVLPDDLSGVIRRLWADHGVQACFGRSREYQLNDSAAYYLNDLERIAQSDYIPTQQDVLRTRVKTTGIVETHFTFKDLHFKMFDVGGQRSERKKWIHCFEGVTAIIFCVALSAYDLVLAEDEEMNRMHESMKLFDSICNNKWFTDTSIILFLNKKDLFEEKITHSPLTICFPEYTGANKYDEAASYIQSKFEDLNKRKDTKEIYTHFTCATDTKNVQFVFDAVTDVIIKNNLKDCGLF

SEQ ID NO: 48552 - protein, 555 aa, Homo sapiens
MGRDFTIFRSLGQRPSLRTEPHDSRWLNEPKFVKVFWIPESENPDDDKIYFFFRETAVEAAPALGRLSVSRVGQICRNDVGGQRSLVNKWTTFLKARLVCSVPGVEGDTHFDQLQDVFLLSSRDHRTPLLYAVFSTSSIFQGSAVCVYSMNDVRRAFLGPFAHKEGPMHQWVSYQGRVPYPRPGMCPSKTFGTFSSTKDFPDDVIQFARNHPLMYNSVLPTGGRPLFLQVGANYTFTQIAADRVAAADGHYDVLFIGTDVGTVLKVISVPKGSRPSAEGLLLEELHVFEDSAAVTSMQISSKRHQLYVASRSAVAQIALHRCAAHGRVCTECCLARDPYCAWDGVACTRFQPSAKRRFRRQDVRNGDPSTLCSGDSSRPALLEHKVFGVEGSSAFLECEPRSLQARVEWTFQRAGVTAHTQVLAEERTERTARGLLLRRLRRRDSGVYLCAAVEQGFTQPLRRLSLHVLSATQAERLARAEEAAPAAPPGPKLWYRDFLQLVEPGGGGSANSLRMCRPQPALQSLPLESRRKGRNRRTHAPEPRAERGPRSATHW

SEQ ID NO: 48553 - protein, 233 aa, Homo sapiens
MGSGCRIECIFFSEFHPTLGPKITYQVPEDFISRELFDTVQVYIITKPELQNKLITVTAMEKKLIGCPVCIEHKKYSRNALLFNLGFVCDAQAKTCALEPIVKKLAGYLTTLELESSFVSMEESKQKLVPIMTILLEELNASGRCTLPIDESNTIHLKVIEQRPDPPVAQEYDVPVFTKDKEDFFNSQWDLTTQQILPYIDGFRHIQKISAEADVELNLVLRRCDTGVHPPGR

SEQ ID NO: 48554 - protein, 82 aa, Homo sapiens [sequence omitted]

SEQ ID NO: 48555 - protein, 1423 aa, Homo sapiens
MNALVNAYVMTSREPPLNTAACRLLLDIMPGLETAVVFQEKEGIVENLFKWAREADQPLRTYSTGLLGGAMENQDIAANYRDENSQLVAIVLRRLRELQLQEVALRQENKRPSPRKLSSEPLLPLDEEAVDMDYGDMAVDVVDGDQEEASGDMEISFHLDSGHKTSSRVNSTTKPEDGGLKKNKSAKQGDRENFRKAKQKLGFSSSDPDRMFVELSNSSWSEMSPWVIGTNYTLYPMTPAIEQRLILQYLTPLGEYQELLPIFMQLGSRELMMFYIDLKQTNDVLLTFEALKHLASLLLHNKFATEFVAHGGVQKLLEIPRPSMAATGVSMCLYYLSYNQDAMERVCMHPHNVLSDVVNYTLWLMECSHASGCCHATMFFSICFSFRAVLELFDRYDGLRRLVNLISTLEILNLEDQGALLSDDEIFASRQTGKHTCMALRKYFEAHLAIKLEQVKQSLQRTEGGILVHPQPPYKACSYTHEQIVEMMEFLIEYGPAQLYWEPAEVFLKLSCVQLLLQLISIACNWKTYYARNDTVRFALDVLAILTVVPKIQLQLAESVDVLDEAGSTVSTVGISIILGVAEGEFFIHDAEIQKSALQIIINCVCGPDNRISSIGKFISGTPRRKLPQNPKSSEHTLAKMWNVVQSNNGIKVLLSLLSIKMPITDADQIRALACKALVGLSRSSTVRQIISKLPLFSSCQIQQLMKEPVLQDKRSDHVKFCKYAAELIERVSGKPLLIGTDVSLARLQKADVVAQSRISFPEKELLLLIRNHLISKGLGETATVLTKEADLPMTAASHSSAFTPVTAAASPVSLPRTPRIANGIATRLGSHAAVGASAPSAPTAHPQPRPPQGPLALPGPSYAGNSPLIGRISFIRERPSPCNGRKIRVLRQKSDHGAYSQSPAIKKQLDRHLPSPPTLDSIITEYLREQHARCKNPVATCPPFSLFTPHQCPEPKQRRQAPINFTSRLNRRASFPKYGGVDGGCFDRHLIFSRFRPISVFREANEDESGFTCCAFSARERFLMLGTCTGQLKLYNVFSGQEEASYNCHNSAITHLEPSRDGSLLLTSATWSQPLSALWGMKSVFDMKHSFTEDHYVEFSKHSQDRVIGTKGDIAHIYDIQTGNKLLTLFNPDLANNYKRNCATFNPTDDLVLNDGVLWDVRSAQAIHKFDKFNMNISGVFHPNGLEVIINTEIWDLRTFHLLHTVPALDQCRVVFNHTGTVMYGAMLQADDEDDLMEERMKSPFGSSFRTFNATDYKPIATIDVKRNIFDLCTDTKDCYLAVIENQGSMDALNMDTVCRLYEVGRQRLAEDEDEEEDQEEEEQEEEDDDEDDDDTDDLDELDTDQLLEAELEEDDNNENAGEDGDNDFSPSDEELANLLEEGEDGEDEDSDADEEVELILGDTDSSDNSDLEDDIILSLNE

SEQ ID NO: 48556 - protein, 431 aa, Homo sapiens
MNEEISSDSESESLAPRKPEEEEEEELEETAQEKKLRLAKLYLEQLRQQEEEKAEARAFEEDQVAGRLKEDVLEQRGRLQKLVAKEIQAPASADIRVLRGHQLSITCLVVTPDDSAIFSAAKDCSIIKWSVESGRKLHVIPRAKKGAEGKPPGHSSHVLCMAISSDGKYLASGDRSKLILIWEAQSCQHLYTFTGHRDAVSGLAFRRGTHQLYSTSHDRSVKVWNVAENSYVETLFGHQDAVAALDALSRECCVTAGGRDGTVRVWKIPEESQLVFYGHQGSIDCIHLINEEHMVSGADDGSVALWGLSKKRPLALQREAHGLRGEPGLEQPFWISSVAALLNTDLVATGSHSSCVRLWQCGEGFRQLDLLCDIPLVGFINSLKFSSSGDFLVAGVGQEHRLGRWWRIKEARNSVCIIPLRRVPVPPAAGS

SEQ ID NO: 48557 - protein, 96 aa, Homo sapiens [sequence omitted]

SEQ ID NO: 48558 - protein, 242 aa, Homo sapiens
MSRSQVALLGLSLLLMLLLYVGLPGPPEQTSCLWGDPNVTVLAGLTPGNSPIFYREVLPLNQAHRVEVVLLHGKAFNSHTWEQLGTLQLLSQRGYRAVALDLPGFGNSAPSKEASTEAGRAALLERALRDLEVQNAVLVSPSLSGHYALPFLMRGHHQLHGFVPIAPTSTQNYTQEQFWAVKTPTLILYGELDHILARESLRQLRHLPNHSVVKLRNAGHACYLHKPQDFHLVLLAFLDHLP

SEQ ID NO: 48559 - protein, 368 aa, Homo sapiens
MPCKSAEWLQEELEARGGASLLLLDCRPHELFESSHIETAINLAIPGLMLRRLRKGNLPIRSIIPNHADKERFATRCKAATVLLYDEATAEWQPEPGAPASVLGLLLQKLRDDGCQAYYLQGGFNKFQTEYSEHCETNVDSSSSPSSSPPTSVLGLGGLRISSDCSDGESDRELPSSATESDGSPVPSSQPAFPVQILPYLYLGCAKDSTNLDVLGKYGIKYILNVTPNLPNAFEHGGEFTYKQIPISDHWSQNLSQFFPEAISFIDEARSKKCGVLVHCLAGISRSVTVTVAYLMQKMNLSLNDAYDFVKRKKSNISPNFNFMGQLLDFERTLGLSSPCDNHASSEQLYFSTPTNHNLFPLNTLEST

SEQ ID NO: 48560 - protein, 201 aa, Homo sapiens
MDNTVKVWDVRTHRLLQHYQLHSAAVNGLSFHPSGNYLITASSDSTLKILDLMEGRLLYTLHGHQGPATTVAFSRTGEYFASGGSDEQVMVWKSNFDIVDHGEVTKVPRPPATLASSMGNLPEVDFPVPPGRGRSVESVQSQPQEPVSVPQTLTSTLEHIVGQLDVLTQTVSILEQRLTLTEDKLKQCLENQQLIMQRATP

SEQ ID NO: 48561 - protein, 605 aa, Homo sapiens
MMEVGAKPAPRALSTAAVHYQQIKETPPASEKDKTAKAKVQQTPDGSQQSPDGTQLPSGHPLPATSQGTASKCPFLAAQMNQRGSSVFCKASLELQEDVQEMNAVRKEVAETSAGPSVVSVKTDGGDPSGLLKNFQDIMQKQRPERVSHLLQDNLPKSVSTFQYDRFFEKKIDEKKNDHTYRVFKTVNRRAHIFPMADDYSDSLITKKQVSVWCSNDYLGMSRHPRVCGAVMDTLKQHGAGAGGTRNISGTSKFHVDLERELADLHGKDAALLFSSCFVANDSTLFTLAKMMPGCEIYSDSGNHASMIQGIRNSRVPKYIFRHNDVSHLRELLQRSDPSVPKIVAFETVHSMDGAVCPLEELCDVAHEFGAITFVDEVHAVGLYGARGGGIGDRDGVMPKMDIISGTLGKAFGCVGGYIASTSSLIDTVRSYAAGFIFTTSLPPMLLAGALESVRILKSAEGRVLRRQHQRNVKLMRQMLMDAGLPVVHCPSHIIPVRVADAAKNTEVCDELMSRHNIYVQAINYPTVPRGEELLRIAPTPHHTPQMMNYFLENLLVTWKQVGLELKPHSSAECNFCRRPLHFEVMSEREKSYFSGLSKLVSAQA

SEQ ID NO: 48562 - protein, 431 aa, Homo sapiens
MAAAAEELLGQHLVQGVISVPKGIRAAMERAGKQEMLLKPHSRVQVFEGAEDNLPDRDALRAALAIQQLAEGLTADDLLLVLISGGGSALLPAPIPPVTLEEKQTLTRLLAARGATIQELNTIRKALSQLKGGGLAQAAYPAQVVSLILSDVVGDPVEVIASGPTVASSHNVQDCLHILNRYGLRAALPRSVKTVLSRADSDPHGPHTCGHVLNVIIGSNVLALAEAQRQAEALGYQAVVLSAAMQGDVKSMAQFYGLLAHVARTRLTPSMAGASVEEDAQLHELAAELQIPDLQLEEALETMAWGRGPVCLLAGGEPTVQLQGSGRGGRNQELALRVGAELRRWPLGPIDVLFLSGGTDGQDGPTEAAGAWVTPELASQAAAEGLDIATFLAHNDSHTFFCCLQGGAHLLHTGMTGTNVMDTHLLFLRPR

SEQ ID NO: 48563 - protein, 1251 aa, Homo sapiens
MKEVLVPEASEFDEWEPEGTTLEGPVTAVIPTWQALTTLDLSHNSVSEIDESVKLIPKIEFLDLSHNGLLVVDNLQHLYNLVHLDLSYNKLSSLEGLHTKLGNIKTLNLAGNLLESLSGLHKLYSLVNLDLRDNRIEQMEEVRSIGSLPCLEHVSLLNNPLSIIPDYRTKVLAQFGERASEVCLDDTVTTEKELDTVEVLKAIQKAKEVKSKLSNPEKKGGEDSRLSAAPCIRPSSSPPTVAPASASLPQPILSNQGIMFVQEEALASSLSSTDSLTPEHQPIAQGCSDSLESIPAGQAASDDLRDVPGAVGGASPEHAEPEVQVVPGSGQIIFLPFTCIGYTATNQDFIQRLSTLIRQAIERQLPAWIEAANQREEGQGEQGEEEDEEEEEEEDVAENRYFEMGPPDVEEEEGGGQGEEEEEEEEDEEAEEERLALEWALGADEDFLLEHIRILKVLWCFLIHVQGSIRQFAACLVLTDFGIAVFEIPHQESRGSSQHILSSLRFVFCFPHGDLTEFGFLMPELCLVLKVRHSENTLFIISDAANLHEFHADLRSCFAPQHMAMLCSPILYGSHTSLQEFLRQLLTFYKVAGGCQERSQGCFPVYLVYSDKRMVQTAAGDYSGNIEWASCTLCSAVRRSCCAPSEAVKSAAIPYWLLLTPQHLNVIKADFNPMPNRGTHNCRNRNSFKLSRVPLSTVLLDPTRSCTQPRGAFADGHVLELLVGYRFVTAIFVLPHEKFHFLRVYNQLRASLQDLKTVVIAKTPGTGGSPQGSFADGQPAERRASNDQRPQEVPAEALAPAPAEVPAPAPAAASASGPAKTPAPAEASTSALVPEETPVEAPAPPPAEAPAQYPSEHLIQATSEENQIPSHLPACPSLRHVASLRGSAIIELFHSSIAEVENEELRHLMWSSVVFYQTPGLEVTACVLLSTKAVYFVLHDGLRRYFSEPLQDFWHQKNTDYNNSPFHISQCFVLKLSDLQSVNVGLFDQHFRLTGSTPMQVVTCLTRDSYLTHCFLQHLMVVLSSLERTPSPEPVDKDFYSEFGNKTTGKMENYELIHSSRVKFTYPSEEEIGDLTFTVAQKMAEPEKAPALSILLYVQAFQVGMPPPGCCRGPLRPKTLLLTSSEIFLLDEDCVHYPLPEFAKEPPQRDRYRLDDGRRVRDLDRVLMGYQTYPQALTLVFDDVQGHDLMGSVTLDHFGEVPGGPARASQGREVQWQVFVPSAESREKLISLLARQWEALCGRELPVELTG

SEQ ID NO: 48564 - protein, 486 aa, Homo sapiens [sequence omitted]

SEQ ID NO: 48565 - protein, 1558 aa, Homo sapiens
MKIQQKLKMEEYDDVNLLTADFQLLFNNAKSYYKPDSPEYKAACKLWDLYLRTRNEFVQKGEADDEDDDEDGQDNQGTVTEGSSPAYLKEILEQLLEAIVVATNPSGRLISELFQKLPSKVQYPDYYAIIKEPIDLKTIAQRIQNGSYKSIHAMAKDIDLLAKNAKTYNEPGSQVFKDANSIKKIFYMKKAEIEHHEMAKSSLRMRTPSNLAAARLTGPSHSKGSLGEERNPTSKYYRNKRAVQGGRLSAITMALQYGSESEEDAALAAARYEEGESEAESITSFMDVSNPFYQLYDTVRSCRNNQGQLIAEPFYHLPSKKKYPDYYQQIKMPISLQQIRTKLKNQEYETLDHLECDLNLMFENAKRYNVPNSAIYKRVLKLQQVMQAKKKELARRDDIEDGDSMISSATSDTGSAKRKRNTHDSEMLGLRRLSSKKNIRKQRMKILFNVVLEAREPGSGRRLCDLFMVKPSKKDYPDYYKIILEPMDLKIIEHNIRNDKYAGEEGMIEDMKLMFRNARHYNEEGSQVYNDAHILEKLLKEKRKELGPLPDDDDMASPKLKLSRKSGISPKKSKYMTPMQQKLNEVYEAVKNYTDKRGRRLSAIFLRLPSRSELPDYYLTIKKPMDMEKIRSHMMANKYQDIDSMVEDFVMMFNNACTYNEPESLIYKDALVLHKVLLETRRDLEGDEDSHVPNVTLLIQELIHNLFVSVMSHQDDEGRCYSDSLAEIPAVDPNFPNKPPLTFDIIRKNVENNRYRRLDLFQEHMFEVLERARRMNRTDSEIYEDAVELQQFFIKIRDELCKNGEILLSPALSYTTKHLHNDVEKERKEKLPKEIEEDKLKREEEKREAEKSEDSSGAAGLSGLHRTYSQDCSFKNSMYHVGDYVYVEPAEANLQPHIVCIERLWEDSAGEKWLYGCWFYRPNETFHLATRKFLEKEVFKSDYYNKVPVSKILGKCVVMFVKEYFKLCPENFRDEDVFVCESRYSAKTKSFKKIKLWTMPISSVRFVPRDVPLPVVRVASVFANADKGDDEKNTDNSEDSRAEDNFNLEKEKEDVPVEMSNGEPGCHYFEQLHYNDMWLKVGDCVFIKSHGLVRPRVGRIEKVWVRDGAAYFYGPIFIHPEETEHEPTKMFYKKEVFLSNLEETCPMTCILGKCAVLSFKDFLSCRPTEIPENDILLCESRYNESDKQMKKFKGLKRFSLSAKVVDDEIYYFRKPIVPQKEPSPLLEKKIQLLEAKFAELEGGDDDIEEMGEEDSEVIEPPSLPQLQTPLASELDLMPYTPPQSTPKSAKGSAKKEGSKRKINMSGYILFSSEMRAVIKAQHPDYSFGELSRLVGTEWRNLETAKKAEYEERAAKVAEQQERERAAQQQQPSASPRAGTPVGALMGVVPPPTPMGMLNQQLTPVAGVMNQGVAPMVGTPAPGGSPYGQQVGVLGPPGQQAPPPYPGPHPAGPPVIQQPTTPMFVAPPPKTQRLLHSEAYLKYIEGLSAESNSISKWDQTLAARRRDVHLSKEQESRLPSHWLKSKGAHTTMADALWRLRDLMLRDTLNIRQAYNLENV

SEQ ID NO: 48566 - protein, 1515 aa, Homo sapiens
MKIQQKLKMEEYDDVNLLTADFQLLFNNAKSYYKPDSPEYKAACKLWDLYLRTRNEFVQKGEADDEDDDEDGQDNQGTVTEGSSPAYLKEILEQLLEAIVVATNPSGRLISELFQKLPSKVQYPDYYAIIKEPIDLKTIAQRIQNGSYKSIHAMAKDIDLLAKNAKTYNEPGSQVFKDANSIKKIFYMKKAEIEHHEMAKSSLRMRTPSNLAAARLTGPSHSKGSLGEERNPTSKYYRNKRAVQGGRLSAITMALQYGSESEEDAALAAARYEEGESEAESITSFMDVSNPFYQLYDTVRSCRNNQGQLIAEPFYHLPSKKKYPDYYQQIKMPISLQQIRTKLKNQEYETLDHLECDLNLMFENAKRYNVPNSAIYKRVLKLQQVMQAKKKELARRDDIEDGDSMISSATSDTGSAKRKSKKNIRKQRMKILFNVVLEAREPGSGRRLCDLFMVKPSKKDYPDYYKIILEPMDLKIIEHNIRNDKYAGEEGMIEDMKLMFRNARHYNEEGSQVYNDAHILEKLLKEKRKELGPLPDDDDMASPKLKLSRKSGISPKKSKYMTPMQQKLNEVYEAVKNYTDKRGRRLSAIFLRLPSRSELPDYYLTIKKPMDMEKIRSHMMANKYQDIDSMVEDFVMMFNNACTYNEPESLIYKDALVLHKVLLETRRDLEGDEDSHVPNVTLLIQELIHNLFVSVMSHQDDEGRCYSDSLAEIPAVDPNFPNKPPLTFDIIRKNVENNRYRRLDLFQEHMFEVLERARRMNRTDSEIYEDAVELQQFFIKIRDELCKNGEILLSPALSYTTKHLHNDVEKERKEKLPKEIEEDKLKREEEKREAEKSEDSSGAAGLSGLHRTYSQDCSFKNSMYHVGDYVYVEPAEANLQPHIVCIERLWEDSAEKEVFKSDYYNKVPVSKILGKCVVMFVKEYFKLCPENFRDEDVFVCESRYSAKTKSFKKIKLWTMPISSVRFVPRDVPLPVVRVASVFANADKGDDEKNTDNSEDSRAEDNFNLEKEKEDVPVEMSNGEPGCHYFEQLHYNDMWLKVGDCVFIKSHGLVRPRVGRIEKVWVRDGAAYFYGPIFIHPEETEHEPTKMFYKKEVFLSNLEETCPMTCILGKCAVLSFKDFLSCRPTEIPENDILLCESRYNESDKQMKKFKGLKRFSLSAKVVDDEIYYFRKPIVPQKEPSPLLEKKIQLLEAKFAELEGGDDDIEEMGEEDSEVIEPPSLPQLQTPLASELDLMPYTPPQSTPKSAKGSAKKEGSKRKINMSGYILFSSEMRAVIKAQHPDYSFGELSRLVGTEWRNLETAKKAEYEGMMGGYPPGLPPLQGPVDGLVSMGSMQPLHPGGPPPHHLPPGVPGLPGIPPPGVMNQGVAPMVGTPAPGGSPYGQQVGVLGPPGQQAPPPYPGPHPAGPPVIQQPTTPMFVAPPPKTQRLLHSEAYLKYIEGLSAESNSISKWDQTLAARRRDVHLSKEQESRLPSHWLKSKGAHTTMADALWRLRDLMLRDTLNIRQAYNLENV

SEQ ID NO: 48567 - protein, 725 aa, Homo sapiens
MALQYLHEKHILHRDLKTQNVFLTRTNIIKVGDLGIARVLENHCDMASTLIGTPYYMSPELFSNKPYNYKSDVWALGCCVYEMATLKHAFNAKDMNSLVYRIIEGKLPPMPRDYSPELAELIRTMLSKRPEERPSVRSILRQPYIKRQISFFLEATKIKTSKNNIKNGDSQSKPFATVVSGEAESNHEVIHPQPLSSEGSQTYIMGEGKCLSQEKPRASGLLKSPASLKAHTCKQDLSNTTELATISSVNIDILPAKGRDSVSDGFVQENQPRYLDASNELGGICSISQVEEEMLQDNTKSSAQPENLIPMWSSDIVTGEKNEPVKPLQPLIKEQKPKDQSLALSPKLECSGTILAHSNLRLLGSSDSPASASRVAGITGVCHHAQDQVAGECIIEKQGRIHPDLQPHNSGSEPSLSRQRRQKRREQTEHRGEKRQVRRDLFAFQESPPRFLPSHPIVGKVDVTSTQKEAENQRRVVTGSVSSSRSSEMSSSKDRPLSARERRRLKQSQEEMSSSGPSVRKASLSVAGPGKPQEEDQPLPARRLSSDCSVTQERKQIHCLSEDELSSSTSSTDKSDGDYGEGKGQTNEINALVQLMTQTLKLDSKESCEDVPVANPVSEFKLHRKYRDTLILHGKVAEEAEEIHFKELPSAIMPGSEKIRRLVEVLRTDVIRGLGVQLLEQVYDLLEEEDEFDREVRLREHMGEKYTTYSVKARQLKFFEENMNF

SEQ ID NO: 48568 - protein, 395 aa, Homo sapiens
MFVKLKVIAESLSVILKSVLTAFLVLWLPHWGLYIFSLAQLFYTTVLVLCYVIYFTKLLGSPESTKLQTLPVSRITDLLPNITRNGAFINWKEAKLTWSFFKQSFLKQILTEGERYVMTFLNVLNFGDQGVYDIVNNLGSLVARLIFQPIEESFYIFFAKVLERGKDATLQKQEDVAVAAAVLESLLKLALLAGLTITVFGFAYSQLALDIYGGTMLSSGSGPVLLRSYCLYVLLLAINGVTECFTFAAMSKEEVDRYNFVMLALSSSFLVLSYLLTRWCGSVGFILANCFNMGIRITQSLCFIHRYYRRSPHRPLAGLHLSPVLLGTFALSGGVTAVSEVFLCCEQGWPARLAHIAVGAFCLGATLGTAFLTETKLIHFLRTQLGVPRRTDKMT

SEQ ID NO: 48569 - protein, 1583 aa, Homo sapiens
MKQALPELESSQQNGGGGGLNIAEPSGGAGREENAGAEAAQSLSHEQPQDSSEAGAAALPRGPEEPERPVRRSFQIPRKSREKKALFQPLTPGSREFEDVVNILHSSYLEPTSVTNFNYRRACLVHNELLEKEFTEKRRELKFDGRLDKELSESYAFLMVDRYQVQTICEKGLHVGQSKITILGSPSMGVYLSRYADLLQANPLDTGAMGDVVIFKIMKGKIKSIYDPMGVKSLESMLNKSALDPTPKHECHVSKNANRITSLLAYRAYELTQYYFYEYGFDELRRRPRHVCPYAVVSFTYKDDIQTPKFVPSSRSNSFNTDRNIDKYNYTLWKGQLLNKGKLLCYISLRSATRAFLPIKLPEKLDVETVMSIDHLKQKIPPALFYKETYLGPNEVLKNGMYCSLYEVVEKTRIGSNMESLLQKLDREKLVLVKPLGDRGYLFLLSPYQMVPPYEYQTAKSRVLHALFLFQEPRSIVTSQKGSTNAAPQERHESMPDVLKIAQFLQFSLIQCRKEFKNISAINFHSVVEKYVSEFFKRGFGSGKREFIMFPYDSRLDDKKFLYSAPRNKSHIDTCLHAYIFRPEVYQLPICKLKELFEENRKLQQFSPLSDYEGQEEEMNGTKMKFGKRNNSRGEAIISGKQRSSHSLDYDKDRVKELINLIQCRKKSVGGDSDTEDMRSKTVLKRKLEDLPENMRKLAKTSNLSENCHLYEESPQPIGSLGHDADLRRQQQDTCNSGIADIHRLFNWLSETLANARHSDASLTDTVNKALGLSTDDAYEELRQKHEYELNSTPDKKDYEQPTCAKVENAQFKGTQSLLLEVDATSKYSVAISTSEVGTDHKLHLKEDPNLISVNNFEDCSLCPSVPIEHGFRRQQSKSNNVEETEIHWKLIPITDTLKGTTEDDVLTGQVEEQCVPAAEAEPPAVSETTERTVLGEYNLFSRKIEEILKQKNVSYVSTVSTPIFSTQEKMKRLSEFIYSKTSKAGVQEFVDGLHEKLNTIIIKASAKGGNLPPVSPNDSGAKIASNPLERHVIPVSSSDFNNKHLLEPLCSDPLKDTNSDEQHSTSALTEVEMNQPQHATELMVTSDHIVPGDMAREPVEETTKSPSDVNISAQPALSNFISQLEPEVFNSLVKIMKDVQKNTVKFYIHEEEESVLCKEIKEYLIKLGNTECHPEQFLERRSKLDKLLIIIQNEDIAGFIHKIPGLVTLKKLPCVSFAGVDSLDDVKNHTYNELFVSGGFIVSDESILNPEVVTVENLKNFLTFLEELSTPEGKWQWKVHCKFQKKLKELGRLNAKALSLLTLLNVYQKKHLVEILSYHNCDSQTRNAPELDCLIRLQAQNIQQRHIVFLTEKNIKMLSSYTDNGIVVATAEDFMQNFKNLVGYHNSITEENLPQLGANENLESQSALLENDEKDEEDMSLDSGDEISHIEVCSNFHSEIWEKETKGSRGTDQKKNTQIELQSSPDVQNSLLEDKTYLDSEERTSIDIVCSEGENSNSTEQDSYSNFQVYHSQLNMSHQFSHFNVLTHQTFLGTPYALSSSQSQENENYFLSAYTESLDRDKSPPPLSWGKSDSSRPYSQEK

SEQ ID NO: 48570 - protein, 1486 aa, Homo sapiens
MKQALPELESSQQNGGGGGLNIAEPSGGAGREENAGAEAAQSLSHEQPQDSSEAGAAALPRGPEEPERPVRRSFQIPRKSREKKALFQPLTPGSREFEDVVNILHSSYLEPTSVTNFNYRRACLVHNELLEKEFTEKRRELKFDGRLDKELSESYAFLMVDRYQVQTICEKGLHVGQSKITILGSPSMGVYLSRYADLLQANPLDTGAMGDVVIFKIMKGKIKSIYDPMGVKSLESMLNKSALDPTPKHECHVSKNANRITSLLAYRAYELTQYYFYEYGFDELRRRPRHVCPYAVVSFTYKDDIQTPKFVPSSRSNSFNTDRNIDKYNYTLWKGQLLNKGKLLCYISLRSATRAFLPIKLPEKLDVETVMSIDHLKQKIPPALFYKETYLGPNEVLKNGMYCSLYEVVEKTRIGSNMESLLQKLDREKLVLVKPLGDRGYLFLLSPYQMVPPYEYQTAKSRVLHALFLFQEPRSIVTSQKGSTNAAPQERHESMPDVLKIAQFLQFSLIQCRKEFKNISAINFHSVVEKYVSEFFKRGFGSGKREFIMFPYDSRLDDKKFLYSAPRNKSHIDTCLHAYIFRPEVYQLPICKLKELFEENRKLQQFSPLSDYEGQEEEMNGTKMKFGKRNNSRGEAIISGKQRSSHSLDYDKDRVKELINLIQCRKKSVGGDSDTEDMRSKTVLKRKLEDLPENMRKLAKTSNLSENCHLYEESPQPIGSLGHDADLRRQQQDTCNSGIADIHRLFNWLSETLANARHSDASLTDTVNKALGLSTDDAYEELRQKHEYELNSTPDKKDYEQPTCAKVENAQFKGTQSLLLEVDATSKYSVAISTSEVGTDHKLHLKEDPNLISVNNFEDCSLCPSVPIEHGFRRQQSKSNNVEETEIHWKLIPITGGNARSPEDQLGKHGEKQTPGMKSPEEQLVCVPPQEAFPNDPRVINRQRSSDYQFPSSPFTDTLKGTTEDDVLTGQVEEQCVPAAEAEPPAVSETTERTVLGEYNLFSRKIEEILKQKNVSYVSTVSTPIFSTQEKMKRLSEFIYSKTSKAGVQEFVDGLHEKLNTIIIKASAKGGNLPPVSPNDSGAKIASNPLERHVIPVSSSDFNNKHLLEPLCSDPLKDTNSDEQHSTSALTEVEMNQPQHATELMVTSDHIVPGDMAREPVEETTKSPSDVNISAQPALSNFISQLEPEVFNSLVKIMKDVQKNTVKFYIHEEEESVLCKEIKEYLIKLGNTECHPEQFLERRSKLDKLLIIIQNEDIAGFIHKIPGLVTLKKLPCVSFAGVDSLDDVKNHTYNELFVSGGFIVSDESILNPEVVTVENLKNFLTFLEELSTPEGKWQWKVHCKFQKKLKELGRLNAKALSLLTLLNVYQKKHLVEILSYHNCDSQTRNAPELDCLIRLQAQNIQQRHIVFLTEKNIKMLSSYTDNGIVVATAEDFMQNFKNLVGYHNSITEENLPQLGANENLESQSDAVLTLTPLELGVGISQH

SEQ ID NO: 48571 - protein, 575 aa, Homo sapiens [sequence omitted]

SEQ ID NO: 48572 - protein, 513 aa, Homo sapiens
MNERTQEELRELANKYNGAVNEIKDLSDKLKVAEGKQEEIQQKGQAEKKELQHKIDEMEEKEQELQAKIEALQADNDFTNERLTALQVRLEHLQEKTLKECSSLEKLIVEGHLTKAVEETKLSKENQTRAKESDFSDTLSPSKEKSSDDTTDAQMDEQDLNEPLAKVSLLKDDLQGAQSEIEAKQEIQHLRKELIEAQELARTSKQKCFELQALLEEERKAYRNQVEESTKQIQVLQAQLQRLHIDTENLREEKDSEITSTRDELLSARDEILLLHQAAAKVASERDTDIASLQEELKKVRAELERWRKAASEYEKEITSLQNSFQLRCQQCEDQQREEATRLQGELEKLRKEWNALETECHSLKRENVLLSSELQRQEKELHNSQKQSLELTSDLSILQMSRKELENQVGSLKEQHLRDSADLKTLLSKAENQAKDVQKEYEKTQTVLSELKLKFEMTEQEKQSITDELKQCKNNLKLLREKGNNPSILQPVPAVFIGLFLAFLFWCFGPLW

SEQ ID NO: 48573 - protein, 189 aa, Homo sapiens [sequence omitted]

SEQ ID NO: 48574 - protein, 1300 aa, Homo sapiens
MKNTGKTVAILLKDDYFVSGAGLPGRFKAEKVEFHWGHSNGSAGSEHSINGRRFPVEMQIFFYNPDDFDSFQTAISENRIIGAMAIFFQVSPRDNSALDPIIHGLKGVVHHEKETFLDPFVLRDLLPASLGSYYRYTGSLTTPPCSEIVEWIVFRRPVPISYHQLEAFYSIFTTEQQDHVKSVEYLRNNFRPQQRLHDRVVSKSAVRDSWNHDMTDFLENPLGTEASKVCSSPPIHMKVQPLNQTALQVSWSQPETIYHPPIMNYMISYSWTKNEDEKEKTFTKDSDKDLKATISHVSPDSLYLFRVQAVCRNDMRSDFSQTMLFQANTTRIFQGTRIVKTGVPTASPASSADMAPISSGSSTWTSSGIPFSFVSMATGMGPSSSGSQATVASVVTSTLLAGLGFGGGGISSFPSTVWPTRLPTAASASKQAARPVLATTEALASPGPDGDSSPTKDGEGTEEGEKDEKSESEDGEREHEEDGEKDSEKKEKSGVTHAAEERNQTEPSPTPSSPNRTAEGGHQTIPGHEQDHTAVPTDQTGGRRDAGPGLDPDMVTSTQVPPTATEEQYAGSDPKRPEMPSKKPMSRGDRFSEDSRFITVNPAEKNTSGMISRPAPGRMEWIIPLIVVSALTFVCLILLIAVLVYWRKCFQTAHFYVEDSSSPRVVPNESIPIIPIPDDMEAIPVKQFVKHIGELYSNNQHGFSEDFEEVQRCTADMNITAEHSNHPENKHKNRYINILAYDHSRVKLRPLPGKDSKHSDYINANYVDGYNKAKAYIATQGPLKSTFEDFWRMIWEQNTGIIVMITNLVEKGRRKCDQYWPTENSEEYGNIIVTLKSTKIHACYTVRRFSIRNTKVKKGQKGNPKGRQNERVVIQYHYTQWPDMGVPEYALPVLTFVRRSSAARMPETGPVLVHCSAGVGRTGTYIVIDSMLQQIKDKSTVNVLGFLKHIRTQRNYLVQTEEQYIFIHDALLEAILGKETEVSSNQLHSYVNSILIPGVGGKTRLEKQFKLVTQCNAKYVECFSAQKECNKEKNRNSSVVPSERARVGLAPLPGMKGTDYINASYIMGYYRSNEFIITQHPLPHTTKDFWRMIWDHNAQIIVMLPDNQSLAEDEFVYWPSREESMNCEAFTVTLISKDRLCLSNEEQIIIHDFILEATQDDYVLEVRHFQCPKWPNPDAPISSTFELINVIKEEALTRDGPTIVHDEYGAVSAGMLCALTTLSQQLENENAVDVFQVAKMINLMRPGVFTDIEQYQFIYKAMLSLVSTKENGNGPMTVDKNGAVLIADESDPAESMESLV

SEQ ID NO: 48575 - protein, 1329 aa, Homo sapiens
MKNTGKTVAILLKDDYFVSGAGLPGRFKAEKVEFHWGHSNGSAGSEHSINGRRFPVEMQIFFYNPDDFDSFQTAISENRIIGAMAIFFQVSPRDNSALDPIIHGLKGVVHHEKETFLDPFVLRDLLPASLGSYYRYTGSLTTPPCSEIVEWIVFRRPVPISYHQLEAFYSIFTTEQQDHVKSVEYLRNNFRPQQRLHDRVVSKSAVRDSWNHDMTDFLENPLGTEASKVCSSPPIHMKVQPLNQTALQVSWSQPETIYHPPIMNYMISYSWTKNEDEKEKTFTKDSDKDLKATISHVSPDSLYLFRVQAVCRNDMRSDFSQTMLFQANTTRIFQGTRIVKTGVPTASPASSADMAPISSGSSTWTSSGIPFSFVSMATGMGPSSSGSQATVASVVTSTLLAGLGFGGGGISSFPSTVWPTRLPTAASASKQAARPVLATTEALASPGPDGDSSPTKDGEGTEEGEKDEKSESEDGEREHEEDGEKDSEKKEKSGVTHAAEERNQTEPSPTPSSPNRTAEGGHQTIPGHEQDHTAVPTDQTGGRRDAGPGLDPDMVTSTQVPPTATEEQYAGSDPKRPEMPSKKPMSRGDRFSEDSRFITVNPAEKNTSGMISRPAPGRMEWIIPLIVVSALTFVCLILLIAVLVYWRGCNKIKSKGFPRRFREVPSSGERGEKGSRKCFQTAHFYVEDSSSPRVVPNESIPIIPIPDDMEAIPVKQFVKHIGELYSNNQHGFSEDFEEVQRCTADMNITAEHSNHPENKHKNRYINILAYDHSRVKLRPLPGKDSKHSDYINANYVDGYNKAKAYIATQGPLKSTFEDFWRMIWEQNTGIIVMITNLVEKGRRKCDQYWPTENSEEYGNIIVTLKSTKIHACYTVRRFSIRNTKVKKGQKGNPKGRQNERVVIQYHYTQWPDMGVPEYALPVLTFVRRSSAARMPETGPVLVHCSAGVGRTGTYIVIDSMLQQIKDKSTVNVLGFLKHIRTQRNYLVQTEEQYIFIHDALLEAILGKETEVSSNQLHSYVNSILIPGVGGKTRLEKQFKLVTQCNAKYVECFSAQKECNKEKNRNSSVVPSERARVGLAPLPGMKGTDYINASYIMGYYRSNEFIITQHPLPHTTKDFWRMIWDHNAQIIVMLPDNQSLAEDEFVYWPSREESMNCEAFTVTLISKDRLCLSNEEQIIIHDFILEATQDDYVLEVRHFQCPKWPNPDAPISSTFELINVIKEEALTRDGPTIVHDEYGAVSAGMLCALTTLSQQLENENAVDVFQVAKMINLMRPGVFTDIEQYQFIYKAMLSLVSTKENGNGPMTVDKNGAVLIADESDPAESMESLV

SEQ ID NO: 48576 - protein, 818 aa, Homo sapiens
MATVGERRPLPSPEVMLGQSWNLWVEASKLPGKDGTELDESFKEFGKNREVMGLCREDMPIFGFCPAHDDFYLVVCNDCNQVVKPQAFQSHYERRHSSSSKPPLAVPPTSVFSFFPSLSKSKGGSASGSNRSSSGGVLSASSSSSKLLKSPKEKLQLRGNTRPMHPIQQSRVPHGRIMTPSVKVEKIHPKMDGTLLKSAVGPTCPATVSSLVKPGLNCPSIPKPTLPSPGQILNGKGLPAPPTLEKKPEDNSNNRKFLNKRLSEREFDPDIHCGVIDLDTKKPCTRSLTCKTHSLTQRRAVQGRRKRFDVLLAEHKNKTREKELIRHPDSQQPPQPLRDPHPAPPRTSQEPHQNPHGVIPSESKPFVASKPKPHTPSLPRPPGCPAQQGGSAPIDPPPVHESPHPPLPATEPASRLSSEEGEGDDKEESVEKLDCHYSGHHPQPASFCTFGSRQIGRGYYVFDSRWNRLRCALNLMVEKHLNAQLWKKIPPVPSTTSPISTRIPHRTNSVPTSQCGVSYLAAATVSTSPVLLSSTCISPNSKSVPAHGTTLNAQPAASGAMDPVCSMQSRQVSSSSSSPSTPSGLSSVPSSPMSRKPQKLKSSKSLRPKESSGNSTNCQNASSSTSGGSGKKRKNSSPLLVHSSSSSSSSSSSSHSMESFRKNCVAHSGPPYPSTVTSSHSIGLNCVTNKANAVNVRHDQSGRGPPTGSPAESIKRMSVMVNSSDSTLSLGPFIHQSNELPVNSHGSFSHSHTPLDKLIGKKRKCSPSSSSINNSSSKPTKVAKVPAVNNVHMKHTGTIPGAQGLMNSSLLHQPKARP

SEQ ID NO: 48577 - protein, 77 aa, Homo sapiens
MDYKTFVTYTVYVSMIALERPDLREKVIKGAEILEVLHSLPAVRQYLFSLYECRYSVFFQSLGNCPGLLLPGDYTAK

SEQ ID NO: 48578 - protein, 840 aa, Homo sapiens
MPLEMEKTISKLMFDFQRNSTSDDDSGCALEEYAWVPPGLKPEQVHQYYSCLPEEKVPYVNSPGEKLRIKQLLHQLPPHDNEVRYCNSLDEEEKRELKLFSSQRKRENLGRGNVRPFPVTMTGAICEQCGGQINGGDIAVFASRAGHGVCWHPPCFVCTVCNELLVDLIYFYQDGKIYCGRHHAECLKPRCAACDEIIFADECTEAEGRHWHMKHFCCFECETVLGGQRYIMKEGRPYCCHCFESLYAEYCDTCAQHIGIDQGQMTYDGQHWHATETCFCCAHCKKSLLGRPFLPKQGQIFCSRACSAGEDPNGSDSSDSAFQNARAKESRRSAKIGKNKGKTEEPMLNQHSQLQVSSNRLSADVDPLSLQMDMLSLSSQTPSLNRDPIWRSREEPYHYGNKMEQNQTQSPLQLLSQCNIRTSYSPGGQGAGAQPEMWGKHFSNPKRSSSLAMTGHAGSFIKECREDYYPGRLRSQESYSDMSSQSFSETRGSIQVPKYEEEEEEEGGLSTQQCRTRHPISSLKYTEDMTPTEQTPRGSMESLALSNATGLSADGGAKRQEHLSRFSMPDLSKDSGMNVSEKLSNMGTLNSSMQFRSAESVRSLLSAQQYQEMEGNLHQLSNPIGYRDLQSHGRMHQSFDFDGGMAGSKLPGQEGVRIQPMSERTRRRATSRDDNRRFRPHRSRRSRRSRSDNALHLASEREAISRLKDRPPLRAREDYDQFMRQRSFQESMGHGSRRDLYGQCPRTVSDLALQNAFGDRWGPYFAEYDWCSTCSSSSESDNEGYFLGEPIPQPARLRYVTSDELLHKYSSYGLPKSSTLGGRGQLHSRKRQKSKNCIIS

SEQ ID NO: 48579 - protein, 442 aa, Homo sapiens
MAVDGGCGDTGDWEGRWNHVKKFLERSGPFTHPDFEPSTESLQFLLDTCKVLVIGAGGLGCELLKNLALSGFRQIHVIDMDTIDVSNLNRQFLFRPKDIGRPKAEVAAEFLNDRVPNCNVVPHFNKIQDFNDTFYRQFHIIVCGLDSIIARRWINGMLISLLNYEDGVLDPSSIVPLIDGGTEGFKGNARVILPGMTACIECTLELYPPQVNFPMCTIASMPRLPEHCIEYVRMLQWPKEQPFGEGVPLDGDDPEHIQWIFQKSLERASQYNIRGVTYRLTQGVVKRIIPAVASTNAVIAAVCATEVFKIATSAYIPLNNYLVFNDVDGLYTYTFEAERKENCPACSQLPQNIQFSPSAKLQEVLDYLTNSASLQMKSPAITATLEGKNRTLYLQSVTSIEERTRPNLSKTLKELGLVDGQELAVADVTTPQTVLFKLHFTS

SEQ ID NO: 48580 - protein, 575 aa, Homo sapiens
MTPQVITPQQMQQILQQQVLSPQQLQVLLQQQQALMLQQQQLQEFYKKQQEQLQLQLLQQQHAGKQPKEQQQVATQQLAFQQQLLQMQQLQQQHLLSLQRQGLLTIQPGQPALPLQPLAQGMIPTELQQLWKEVTSAHTAEETTGNNHSSLDLTTTCVSSSAPSKTSLIMNPHASTNGQLSVHTPKRESLSHEEHPHSHPLYGHGVCKWPGCEAVCEDFQSFLKHLNSEHALDDRSTAQCRVQMQVVQQLELQLAKDKERLQAMMTHLHVKSTEPKAAPQPLNLVSSVTLSKSASEASPQSLPHTPTTPTAPLTPVTQGPSVITTTSMHTVGPIRRRYSDKYNVPISSDIAQNQEFYKNAEVRPPFTYASLIRQAILESPEKQLTLNEIYNWFTRMFAYFRRNAATWKNAVRHNLSLHKCFVRVENVKGAVWTVDEVEFQKRRPQKISGNPSLIKNMQSSHAYCTPLNAALQASMAENSIPLYTTASMGNPTLGNLASAIREELNGAMEHTNSNESDSSPGRSPMQAVHPVHVKEEPLDPEEAEGPLSLVTTANHSPDFDHDRDYEDEPVNEDME

SEQ ID NO: 48581 - protein, 575 aa, Homo sapiens
MTPQVITPQQMQQILQQQVLSPQQLQVLLQQQQALMLQQQLQEFYKKQQEQLQLQLLQQQHAGKQPKEQQQVATQQLAFQQQLLQMQQLQQQHLLSLQRQGLLTIQPGQPALPLQPLAQGMIPTELQQLWKEVTSAHTAEETTGNNHSSLDLTTTCVSSSAPSKTSLIMNPHASTNGQLSVHTPKRESLSHEEHPHSHPLYGHGVCKWPGCEAVCEDFQSFLKHLNSEHALDDRSTAQCRVQMQVVQQLELQLAKDKERLQAMMTHLHVKSTEPKAAPQPLNLVSSVTLSKSASEASPQSLPHTPTTPTAPLTPVTQGPSVITTTSMHTVGPIRRRYSDKYNVPISSADIAQNQEFYKNAEVRPPFTYASLIRQAILESPEKQLTLNEIYNWFTRMFAYFRRNAATWKNAVRHNLSLHKCFVRVENVKGAVWTVDEVEFQKRRPQKISGNPSLIKNMQSSHAYCTPLNAALQASMAENSIPLYTTASMGNPTLGNLASAIREELNGAMEHTNSNESDSSPGRSPMQAVHPVHVKEEPLDPEEAEGPLSLVTTANHSPDFDHDRDYEDEPVNEDME

SEQ ID NO: 48582 - protein, 576 aa, Homo sapiens
MTPQVITPQQMQQILQQQVLSPQQLQVLLQQQQALMLQQQQLQEFYKKQQEQLQLQLLQQQHAGKQPKEQQQVATQQLAFQQQLLQMQQLQQQHLLSLQRQGLLTIQPGQPALPLQPLAQGMIPTELQQLWKEVTSAHTAEETTGNNHSSLDLTTTCVSSSAPSKTSLIMNPHASTNGQLSVHTPKRESLSHEEHPHSHPLYGHGVCKWPGCEAVCEDFQSFLKHLNSEHALDDRSTAQCRVQMQVVQQLELQLAKDKERLQAMMTHLHVKSTEPKAAPQPLNLVSSVTLSKSASEASPQSLPHTPTTPTAPLTPVTQGPSVITTTSMHTVGPIRRRYSDKYNVPISSADIAQNQEFYKNAEVRPPFTYASLIRQAILESPEKQLTLNEIYNWFTRMFAYFRRNAATWKNAVRHNLSLHKCFVRVENVKGAVWTVDEVEFQKRRPQKISGNPSLIKNMQSSHAYCTPLNAALQASMAENSIPLYTTASMGNPTLGNLASAIREELNGAMEHTNSNESDSSPGRSPMQAVHPVHVKEEPLDPEEAEGPLSLVTTANHSPDFDHDRDYEDEPVNEDME

SEQ ID NO: 48583 - protein, 574 aa, Homo sapiens
MTPQVITPQQMQQILQQQVLSPQQLQVLLQQQQALMLQQQLQEFYKKQQEQLQLQLLQQQHAGKQPKEQQQVATQQLAFQQQLLQMQQLQQQHLLSLQRQGLLTIQPGQPALPLQPLAQGMIPTELQQLWKEVTSAHTAEETTGNNHSSLDLTTTCVSSSAPSKTSLIMNPHASTNGQLSVHTPKRESLSHEEHPHSHPLYGHGVCKWPGCEAVCEDFQSFLKHLNSEHALDDRSTAQCRVQMQVVQQLELQLAKDKERLQAMMTHLHVKSTEPKAAPQPLNLVSSVTLSKSASEASPQSLPHTPTTPTAPLTPVTQGPSVITTTSMHTVGPIRRRYSDKYNVPISSDIAQNQEFYKNAEVRPPFTYASLIRQAILESPEKQLTLNEIYNWFTRMFAYFRRNAATWKNAVRHNLSLHKCFVRVENVKGAVWTVDEVEFQKRRPQKISGNPSLIKNMQSSHAYCTPLNAALQASMAENSIPLYTTASMGNPTLGNLASAIREELNGAMEHTNSNESDSSPGRSPMQAVHPVHVKEEPLDPEEAEGPLSLVTTANHSPDFDHDRDYEDEPVNEDME

SEQ ID NO: 48584 - protein, 234 aa, Homo sapiens
MTPQVITPQQMQQILQQQVLSPQQLQVLLQQQQALMLQQQQLQEFYKKQQEQLQLQLLQQQHAGKQPKEQQQVATQQLAFQQQLLQMQQLQQQHLLSLQRQGLLTIQPGQPALPLQPLAQGMIPTELQQLWKEVTSAHTAEETTGNNHSSLDLTTTCVSSSAPSKTSLIMNPHASTNGQLSVHTPKRESLSHEEHPHSHPLYGHGVCKWPGCEAVCEDFQSFLNLQKTKNACKP

SEQ ID NO: 48585 - protein, 233 aa, Homo sapiens
MTPQVITPQQMQQILQQQVLSPQQLQVLLQQQQALMLQQQLQEFYKKQQEQLQLQLLQQQHAGKQPKEQQQVATQQLAFQQQLLQMQQLQQQHLLSLQRQGLLTIQPGQPALPLQPLAQGMIPTELQQLWKEVTSAHTAEETTGNNHSSLDLTTTCVSSSAPSKTSLIMNPHASTNGQLSVHTPKRESLSHEEHPHSHPLYGHGVCKWPGCEAVCEDFQSFLNLQKTKNACKP

SEQ ID NO: 48586 - protein, 317 aa, Homo sapiens
MLKSAVLFSHRKIQFHIFTEDSLKPEFDKQLRQWPDSYTKKFEHRIYPITFSVGNPQEWKKLFKPCAAQRLFLPVILKDVDSLLYVDTDVLFLRPVDDIWKLLRLFNSTQLAAMAPEHEIPKIGWYSRFARHPFYGSAGVNSGVMLMNLTRIRSTQFKNSMIPTGLAWEDMLYPLYQKYKNAITWGDQDLLNIIFYFNPECLYVFPCQWNYRPDHCMYGSNCREAEHEGVSVLHGNRGVYHDDKQPTFRALYEAIRDFPFQDNLFQSMYYPLQLKFLETVHTLCGRIPQVFLKQIEKTMKRAYEKHVIIHVGPNQMH

SEQ ID NO: 48587 - protein, 1027 aa, Homo sapiens [sequence omitted]

SEQ ID NO: 48588 - protein, 698 aa, Homo sapiens [sequence omitted]

SEQ ID NO: 48589 - protein, 276 aa, Homo sapiens
MQDSLEVTLPSKQEEEDEEEEEEEKDQPAEMEYLNSRCVLFTYFQGDIGSVVDEHFSRALGQAITLHPESAISKSKMGLTPLWRDSSALSSQRNSFPTSFWTSSYQPPPAPCLGGVHPDFQVTGPPGTFSAADPSPWPGHNLHQTGPAPPPAVSESWPYPLTSQVSPSYSHMHDVYMRHHHPHAHMHHRHRHHHHHHHPPAGSALDPSYGPLLMPSVHAARIPAPQCDITKTEPTTVTSATSAWAGAFHGTVDIVPSVGFDTGLQHQDKSKESPWY

SEQ ID NO: 48590 - protein, 331 aa, Homo sapiens [sequence omitted]

SEQ ID NO: 48591 - protein, 916 aa, Homo sapiens
MALIKSCINHPEISKDLYFHQALFTCLFMSPVEDQLFREHLLKTDCKSGIDIICNAEKEGKTMLALQLCESFLIPQLQNGDMYCIWELIFIWSKLQLKSNPSKQVFVDQCYQLLRTATNVRVIFPFMKIIKDEVEEEGLQICVEICGCALQLDLHDDPKTKCLIYKTIAHFLPNDLEILRICALSIFFLERSLEAYRTVEELYKRPDEEYNEGTSSVQNRVRFELLPILKKGLFFDPEFWNFVMIKKNCVALLSDKSAVRFLNESTLENNAGNLKRTEEQQGLDEGFDSLTDQSTGETDPDDVSGVQPKGHINTKKNLTALSTSKVDHNVPRHRCMLCNKEFLGGHIVRHAQAHQKKGSFACVICGRKFRNRGLMQKHLKNHVKKIQRQQIAAAQQDDQEVTALEEINCSSSSISFENGNSDSKDLEVETLTASSEGNKEVIPEHVAEFIEIPISVPEDVIENVIENGSPNNSLNNVFKPLTECGDDYEEEEDEEGDYEEDDYDLNQETSVIHKINGTVCHPKDIYATDQEGNFKCPALGCVRIFKRIGFLNKHAMTVHPTDLNVRQTVMKWSKGKCKFCQRQFEDSQHFIDHLNRHSYPNVYFCLHFNCNESFKLPFQLAQHTKSHRIFQAQCSFPECHELFEDLPLLYEHEAQHYLSKTPESSAQPSETILWDVQTDSNPNQEKDSSSNEKQTISLPVSTSKSRKESTEPKTCIESMEKKTDSLVQNGNERSDDTVSNISLIDQKMPDIEPNSENNCSSSDIVNGHSEIEQTPLVSSDPALKIDTNRIRTENGSILPSVVPQEHNTLPVSQAPSKPNLTSEHTSYGLILTKPYVRPLPPSYLDERYLSMPKRRKFLTDRVDACSDQDNVYKKSVKRLRCGKCLTTYCNAEALEAHLAQKKCQTLFGFDSDDESA

SEQ ID NO: 48592 - protein, 2679 aa, Homo sapiens
MKGNLLEGPLEDSDCSKTSFNKENSLTNNPELQNIASSNNLLNKNAWGSIERNRSSPSSVTNSSYDGESDSQHHLSCEPVSQTNRNLVCSALLTGSNHRKVPCSPDFQRVTTTENTIKENSTVMSNRTLVQREELVEPQGPAISDFSCSKSDGSDTTEQESTNLPSPNKSIRHEHLQLPESECSDKQTIDSSSKQAATHTNIIALQRHAVTDTEFVNEGKRLSAQDSQKNVAVREIRRETESASAGESIASSHVKAPEDKIESLPKDTDQYFETKAKKLDFRSHDKIPHIRMNKKDLASLNYISESAVVASLGNENAPELKFELNRSHISETPLDSESPQQAEVSPDAKTSLSLDCKKLNFSISPPTFVSGVGMLSKLDIPDLMNEGSPVPIETGNVNIVGISYQPRKCKEENVKNHVEAAGRKSPPPSFCLEYTSAIFEFKEVLSNSEKCQVLPGSEASGPHLTGLELLSFDSGNLSKDCSSILSQDPNRVELVSSNTKANMSIIEKSDSLSLEAKTANIVSKAEIDGQNNVLVESHSGRGKTISLSKVSLSKVEPRNISQDKMSSFPLKITHVPEKPILSELTFLEVEQGKRFQSINHNEIGEKCSDAGLKENCQAELSPAASKYEDKPEPEVDALGSPPALLKSNISWILPPIHDEKISRQMAQNCEAHTCVFHQSLDICGTKKISGHSEMAELSLTNISPKFQETGSMKVNSPFLDSDSSLEKNSSASEDSSFLKVPSVLKLEKKSSSYRKKENIHFLNGGIDSVSSSSSYPEEVSMIVNSHKPQNNLDSIQVTKDLTHEGTSVTNLLYPTTSYLEFETSVSIGTEVTPFQEHFGIYTGKISIDFPTAAQFDNLVEAETGAVAGPAASVNSSGQQCSEASAEHIEARRRAHDQLLDLKSSLLKKADTLIGEIFNSVREELKFKHTVSTCQEHIAIEGIMNLGTLKEDISEKNPSEVTLTEIQQTEGLEEQGMENMSEVKEKPCVSPTVGEKNLLVDPNSMNVSCLLEDKARELVNEIIYVAQEKLRNDTFEDTEDTWDSELQANTSKILNSDSVKPHDVVREFLVSEQPVNQSTQISENKVLNEFFSLSNLASGTESIKGGEIVLYQKSLFSGNGSGLSDSINLQESDTVLLAEDMSHKRLDDRVKTHLFRSEDCNETMEIENVDNNKTETEDRRTLVLNFKWPPLVNDDIHAPGTSKSSLSDSLVCISEKNLPGHSKNTPLAMSDVGKVHKKDNEINIGKIELIPSMLETGKTNKKDAELNILKYEAVPPMIEMGRIHKMDAELNVTKTEPKANVFKMGEVYQMDAESCIEKTEGSAVILGMEKAYKMKDTEGDIGKIEVIPMMPEVKNIHQKDAEGDIVKTEMTPVTVDMENIYQTHAEGDIGKTGTIALSEVENIHQKGGEGISEKAEVIPVTLAMENTYQKDAEGDIGKAEVMPVRLEMENTYPKDTERDGGKTEVMPLALEVVNTYQKNAKGFTGNTEGSVLKMEATYRKTAEEVIKNTEIVPCVLKVKEAHETAPAPLEMEKACKRDVKETIGATVSTPSVIEMEKISPEDRGENIGKHKVLPAVVDIEKIHGTGLELTTKQGEAMLPAFESKTPQEYAEGSVEETKEEPTEIKEGLIAHENRLPTYFRGYESPTLSKDYEGYPAPAMPDFQPGDTTVRLDKRMSLTAIYDKRRETDYSDKGYNLAFVSQDEQENSSFTILYEEPLQEEDKYASAEARQTQSVLFHDTSADSMPVLACERSESRTDLVHHFEKGTKLGETFDSDSSEMFLSVEAKRYKIYPLALSPIYEDDSSQEDILSSEVSPGHHGPRKSRDSENQSSSVLSLLQSVSERLKMNFDEDDREAADEEEEEEEAAVLHKGDLRAGSGERVTFQLPDPSITFYPDDQESVGISKNSYVMPNEPTTSNLQVGLWPEKTSFLQKSDLTSKLHSSLKSAYHQYLQTSQSHSSEKGARFGGIFQEPVSKYFRVQDSPGRLSPFIENVDKQTLRCNPRPGKMVIYDLHESTYKQEVYCNIPDATSWSFPNGVLIKVVRGCWILYEKPHFRGQKCVLEEGEKVLNRDWILQNRRHPQRNFILGSLKRVLKDCSIPEIELFPQSDPACCPVYIQRAVPNLEELNISKSVSFTVKSGVWLAYPDINFKGQATVLEEDHGLFEISTAEMKSLHPLQMGGLKVEMPMNLKVIIYEKPHFHGQAKEFSEHIDSVPNFLKNNGDFHRIGSIRVIGGVWVAYEKEHFKGQQFLLEEGDFEDSNACGALSSPILSFRYLQANFIESSVTLFESDLESGKFIDITNQEISDLEEIGFGSKTRSIHVKSGVWVAYQQKFFCGEQYILEKGKYKCFFDWGGSNNIIMSIRPIQLEPLGINEPPHLLKAFSKPGFQGECIDFTEETSDLTSLMPCSFKVLRGCWLLYYQEDMFVNHCVLEEGLYADLTSCGCPASKVKSLKPIDYVFEEPSISLFALEHCEGRELHLEEAVNSVLNKDLHFYTQSVWVKSGLWIAYEGSNFLGRQILLRPNEIPNWTAFSRWKTIGSLRPMKQPAVYIRIKNRAQGEYLTVTGSLADTRATSVCISPYSGKNTQIWYYCRGLFKSKASDTCLDVIGGRDTPGAKVALWTEHGQFRQKWRLNKNGTISSYLSDQLVLDVKGGNYCDKTHVIVNQPLEGEETQKWDIEIL

SEQ ID NO: 48593 - protein, 444 aa, Homo sapiens
MKLEAAGGPSALNFDSPSSLFESLISPIKTETFFKEFWEQKPLLIQRDDPALATYYGSLFKLTDLKSLCSRGMYYGRDVNVCRCVNGKKKVLNKDGKAHFLQLRKDFDQKRATIQFHQPQRFKDELWRIQEKLECYFGSLVGSNVYITPAGSQGLPPHYDDVEVFILQLEGEKHWRLYHPTVPLAREYSVEAEERIGRPVHEFMLKPGDLLYFPRGTIHQADTPAGLAHSTHVTISTYQNNSWGDFLLDTISGLVFDTAKEDVELRTGIPRQLLLQVESTTVATRRLSGFLRTLADRLEGTKELLSSDMKKDFIMHRLPPYSAGDGAELSTPGGKLPRLDSVVRLQFKDHIVLTVLPDQDQSDEAQEKMVYIYHSLKNSRETHMMGNEEETEFHGLRFPLSHLDALKQIWNSPAISVKDLKLTTDEEKESLVLSLWTECLIQVV

SEQ ID NO: 48594 - protein, 138 aa, Homo sapiens [sequence omitted]

SEQ ID NO: 48595 - protein, 501 aa, Homo sapiens
MNSLDRAQAAKNKGNKYFKAGKYEQAIQCYTEAISLCPTEKNVDLSTFYQNRAAAFEQLQKWKEVAQDCTKAVELNPKYVKALFRRAKAHEKLDNKKECLEDVTAVCILEGFQNQQSMLLADKVLKLLGKEKAKEKYKNREPLMPSPQFIKSYFSSFTDDIISQPMLKGEKSDEDKDKEGEALEVKENSGYLKAKQYMEEENYDKIISECSKEIDAEGKYMAEALLLRATFYLLIGNANAAKPDLDKVISLKEANVKLRANALIKRGSMYMQQQQPLLSTQDFNMAADIDPQNADVYHHRGQLKILLDQVEEAVADFDECIRLRPESALAQAQKCFALYRQAYTGNNSSQIQAAMKGFEEVIKKFPRCAEGYALYAQALTDQQQFGKADEMYDKCIDLEPDNATTYVHKGLLQLQWKQDLDRGLELISKAIEIDNKCDFAYETMGTIEVQRGNMEKAIDMFNKAINLAKSEMEMAHLYSLCDAAHAQTEVAKKYGLKPPTL

SEQ ID NO: 48596 - protein, 116 aa, Homo sapiens
MPSPQFIKSYFSSFTDDIISQPMLKGEKSDEDKDKEGEALEVKENSGYLKAKQYMEEENYDKIISECSKEIDAEGKYMAEALLLRATFYLLIGNANAAKPDLDKVISLKEANVKVH

SEQ ID NO: 48597 - protein, 82 aa, Homo sapiens
MDHENILFLTICFCWHYAVTIVIVGMNYAFITWLTSGPHLLRGWKAFKISASIQGNALPHVSSPPEPKEDYCLFLFQNASYP

SEQ ID NO: 48598 - protein, 16 aa, Homo sapiens
MHIATAIIIIIPIQGK

SEQ ID NO: 48599 - protein, 79 aa, Homo sapiens
MKKSKRAIRLFKEGKERMYEEQSQDRRNLTKLSLIFSHMLAEIKAIFPNGQFQGDNFRITKADAAEFWRKFFGDKPPGL

SEQ ID NO: 48600 - protein, 260 aa, Homo sapiens [sequence omitted]

SEQ ID NO: 48601 - protein, 1684 aa, Homo sapiens
MHFGARGMLSSVDIDIYLLEKSRVIFQQAGERNYHIFYQILSGQKELHDLLLVSANPSDFHFCSCGAVTVESLDDAEELLATEQAMDILGFLPDEKYGCYKLTGAIMHFGNMKFKQKPREEQLEADGTENADKAAFLMGINSSELVKCLIHPRIKVGNEYVTRGQTIEQVTCAVGALSKSMYERMFKWLVARINRALDAKLSRQFFIGILDITGFEILEYNSLEQLCINFTNEKLQQFFNWHMFVLEQEEYKKESIEWVSIGFGLDLQACIDLIEKPMGILSILEEECMFPKATDLTFKTKLFDNHFGKSVHLQKPKPDKKKFEAHFELVHYAGVVPYNISGWLEKNKDLLNETVVAVFQKSSNRLLASLFENYMSTDSAIPFGEKKRKKGASFQTVASLHKENLNKLMTNLKSTAPHFVRCINPNVNKIPGILDPYLVLQQLRCNGVLEGTRICREGFPNRLQYADFKQRYCILNPRTFPKSKFVSSRKAAEELLGSLEIDHTQYRFGITKVFFKAGFLGQLEAIRDERLSKVFTLFQARAQGKLMRIKFQKILEERDALILIQWNIRAFMAVKNWPWMRLFFKIKPLVKSSEVGEEVAGLKEECAQLQKALEKSEFQREELKAKQVSLTQEKNDLILQLQAEQETLANVEEQCEWLIKSKIQLEARVKELSERVEEEEEINSELTARGRKLEDECFELKKEIDDLETMLVKSEKEKRTTEHKVKNLTEEVEFLNEDISKLNRAAKVVQEAHQQTLDDLHMEEEKLSSLSKANLKLEQQVDELEGALEQERKARMNCERELHKLEGNLKLNRESMENLESSQRHLAEELRKKELELSQMNSKVENEKGLVAQLQKTVKELQTQIKDLKEKLEAERTTRAKMERERADLTQDLADLNERLEEVGGSSLAQLEITKKQETKFQKLHRDMEEATLHFETTSASLKKRHADSLAELEGQVENLQQVKQKLEKDKSDLQLEVDDLLTRVEQMTRAKANAEKLCTLYEERLHEATAKLDKVTQLANDLAAQKTKLWSESGEFLRRLEEKEALINQLSREKSNFTRQIEDLRGQLEKETKSQSALAHALQKAQRDCDLLREQYEEEQEVKAELHRTLSKVNAEMVQWRMKYENNVIQRTEDLEDAKKELAIRLQEAAEAMGVANARNASLERARHQLQLELGDALSDLGKVRSAAARLDQKQLQSGKALADWKQKHEESQALLDASQKEVQALSTELLKLKNTYEESIVGQETLRRENKNLQEEISNLTNQVREGTKNLTEMEKVKKLIEEEKTEVQVTLEETEGALERNESKILHFQLELLEAKAELERKLSEKDEEIENFRRKQQCTIDSLQSSLDSEAKSRIEVTRLKKKMEEDLNEMELQLSCANRQVSEATKSLGQLQIQIKDLQMQLDDSTQLNSDLKEQVAVAERRNSLLQSELEDLRSLQEQTERGRRLSEEELLEATERINLFYTQNTSLLSQKKKLEADVARMQKEAEEVVQECQNAEEKAKKAAIEAANLSEELKKKQDTIAHLERTRENMEQTITDLQKRLAEAEQMALMGSRKQIQKLESRVRELEGELEGEIRRSAEAQRGARRLERCIKELTYQAEEDKKNLSRMQTQMDKLQLKVQNYKQQVEVAETQANQYLSKYKKQQHELNEVKERAEVAESQVNKLKIKAREFGKKVQEE

SEQ ID NO: 48602 - protein, 298 aa, Homo sapiens
MESTTTSFPNETATIISQYKLFPTRFARGRRITCVVKHPALEKDIRYSFILDIQYAPEVSVTGYDGNWFVGRKGVNLKCNADANPPPFKSVWSRLDGQWPDGLLASDNTLHFVHPLTFNYSGVYICKVTNSLGQRSDQKVIYISDVPFKQTSSIAVAGAVIGAVLALFIIAIFVTVLLTPRKKRPSYLDKVIDLPPTHKPPPLYEERSPPLPQKDLFQPEHLPLQTQFKEREVGNLQHSNGLNSRSFDYEDENPVGEDGIQQMYPLYNQMCYQDRSPGKHHQNNDPKRVYIDPREHYV

SEQ ID NO: 48603 - protein, 262 aa, Homo sapiens
MPFSHLSTYSLVWVMAAVVLCTAQVQVVTQDEREQLYTPASLKCSLQNAQEALIVTWQKKKAVSPENMVTFSENHGVVIQPAYKDKINITQLGLQNSTITFWNITLEDEGCYMCLFNTFGFGKISGTACLTVYVQPIVSLHYKFSEDHLNITCSATARPAPMVFWKVPRSGIENSTVTLSHPNGTTSVTSILHIKDPKNQVGKEVICQVLHLGTVTDFKQTVNKGYWFSVPLLLSIVSLVILLVLISILLYWKRHRNQDREP

SEQ ID NO: 48604 - protein, 2189 aa, Homo sapiens
MILDQAFKYITELKRQNDELLLNGGNNEQAEEIKKLRKQLEEIQKENGRYIELLKANDICLYDDPTIHWKGNLKNSKVSVVIPSDQVQKKIIVYSNGNQPGGNSQGTAVQGITFNVSHNLQKQTANVVPVQRTCNLVTPVSISGVYPSENKPWHQTTVPALATNQPVPLCLPAAISAQSILELPTSESESNVLGATSGSLIAVSIESEPHQHHSLHTCLNDQNSSENKNGQENPKVLKKMTPCVTNIPHSSSATATKVHHGNKSCLSIQDFRGDFQNTFVVSVTTTVCSQPPRTAGDSSPMSISKSADLTSTATVVASSAPGVGKATIPISTLSGNPLDNGWTLSCSLPSSSVSTSDLKNINSLTRISSAGNTQTTWTTLQLAGNTIQPLSQTPSSAVTPVLNESGTSPTTSNHSRYVATDINLNNSFPADGQPVEQVVVTLPSCPSLPMQPLIAQPQVKSQPPKNILPLNSAMQVIQMAQPVGSAVNSAPTNQNVIILQPPSTTPCPTVMRAEVSNQTVGQQIVIIQAANQNPLPLLPAPPPGSVRLPINGANTVIGSNNSVQNVPTPQTFGGKHLVHILPRPSSLSASNSTQTFSVTMSNQQPQTISLNGQLFALQPVMSSSGTTNQTPMQIIQPTTSEDPNTNVALNTFGALASLNQSISQMAGQSCVQLSISQPANSQTAANSQTTTANCVSLTTTAAPPVTTDSSATLASTYNLVSTSSMNTVACLPNMKSKRLNKKPGGRKHLAANKSACPLNSVRDVSKLDCPNTEGSAEPPCNDGLLESFPAVLPSVSVSQANSVSVSASHSLGVLSSESLIPESVSKSKSAEKSSPPSQESVTSEHFAMAAAKSKDSTPNLQQETSQDKPPSSLALSDAAKPCASANVLIPSPSDPHILVSQVPGLSSTTSTTSTDCVSEVEIIAEPCRVEQDSSDTMQTTGLLKGQGLTTLLSDLAKKKNPQKSSLSDQMDHPDFSSENPKIVDSSVNLHPKQELLLMNNDDRDPPQHHSCLPDQEVINGSLINGRQADSPMSTSSGSSRSFSVASMLPETTREDVTSNATTNTCDSCTFVEQTDIVALAARAIFDQENLEKGRVGLQADIREVASKPSEASLLEGDPPFKSQIPKESGTGQAEATPNEFNSQGSIEATMERPLEKPSCSLGIKTSNASLQDSTSQPPSITSLSVNNLIHQSSISHPLASCAGLSPTSEQTTVPATVNLTVSSSSYGSQPPGPSLMTEYSQEQLNTMTSTIPNSQIQEPLLKPSHESRKDSAKRAVQDDLLLSSAKRQKHCQPAPLRLESMSLMSRTPDTISDQTQMMVSQIPPNSSNSVVPVSNPAHGDGLTRLFPPSNNFVTPALRQTEVQCGSQPSVAEQQQTQASQHLQALQQHVPAQGVSHLHSNHLYIKQQQQQQQQQQQQQQQQQAGQLRERHHLYQMQHHVPHAESSVHSQPHNVHQQRTLQQEVQMQKKRNLVQGTQTSQLSLQPKHHGTDQSRSKTGQPHPHHQQMQQQMQQHFGSSQTEKSCENPSTSRNHHNHPQNHLNQDIMHQQQDVGSRQQGSGVSSEHVSGHNPMQRLLTSRGLEQQMVSQPSIVTRSSDMTCTPHRPERNRVSSYSAEALIGKTSSNSEQRMGISIQGSRVSDQLEMRSYLDVPRNKSLAIHNMQGRVDHTVASDIRLSDCQTFKPSGASQQPQSNFEVQSSRNNEIGNPVSSLRSMQSQAFRISQNTGPPPIDRQKRLSYPPVQSIPTGNGIPSRDSENTCHQSFMQSLLAPHLSDQVIGSQRSLSEHQRNTQCGPSSAIEYNCPPTHENVHIRRESESQNRESCDMSLGAINTRNSTLNIPFSSSSSSGDIQGRNTSPNVSVQKSNPMRITESHATKGHMNPPVTTNMHGVARPALPHPSVSHGNGDQGPAVRQANSSVPQRSRHPLQDSSGSKIRQPERNRSGNQRQSTVFDPSLPHLPLSTGGSMILGRQQPATEKRGSIVRFMPDSPQVPNDNSGPDQHTLSQNFGFSFIPEGGMNPPINANASFIPQVTQPSATRTPALIPVDPQNTLPSFYPPYSPAHPTLSNDISIPYFPNQMFSNPSTEKVNSGSLNNRFGSILSPPRPVGFAQPSFPLLPDMPPMHMTNSHLSNFNMTSLFPEIATALPDGSAMSPLLTIANSSASDSSKQSSNRPAHNISHILGHDCSSAV

SEQ ID NO: 48605 - protein, 41 aa, Homo sapiens
MGALCGFGPLIFIYYIIKTERDRKEKLIQEGKLDRTFHLSY

SEQ ID NO: 48606 - protein, 665 aa, Homo sapiens
MINIFGVVLFLRTGWLVGNTGVLLGMFLVSFVILVALVTVLSGIGVGERSSIGSGGVYSMISSVLGGQTGGTIGLLYVFGQCVAGAMYITGFAESISDLLGLGNIWAVRGISVAVLLALLGINLAGVKWIIRLQLLLLFLLAVSTLDFVVGSFTHLDPEHGFIGYSPELLQNNTLPDYSPGESFFTVFGVFFPAATGVMAGFNMGGDLREPAASIPLGSLAAVGISWFLYIIFVFLLGAICTREALRYDFLIAEKVSLMGFLFLLGLYISSLASCMGGLYGAPRILQCIAQEKVIPALACLGQGKGPNKTPVAAICLTSLVTMAFVFVGQVNVLAPIVTINFMLTYVAVDYSYFSLSMCSCSLTPVPEPVLREGAEGLHCSEHLLLEKAPSYGSEGPAQRVLEGTLLEFTKDMDQLLQLTRKLESSQPRQGEGNRTPESQKRKSKKATKQTLQDSFLLDLKSPPSFPVEISDRLPAASWEGQESCWNKQTSKSEGTQPEGTYGEQLVPELCNQSESSGEDFFLKSRLQEQDVWRRSTSFYTHMCNPWVSLLGAVGSLLIMFVIQWVYTLVNMGVAAIVYFYIGRASPGLHLGSASNFSFFRWMRSLLLPSCRSLRSPQEQIILAPSLAKVDMEMTQLTQENADFATRDRYHHSSLVNREQLMPHY

SEQ ID NO: 48607 - protein, 690 aa, Homo sapiens [sequence omitted]

SEQ ID NO: 48608 - protein, 895 aa, Homo sapiens
MASSPAQRRRGNDPLTSSPGRSSRRTDALTSSPGRDLPPFEDESEGLLGTEGPLEEEEDGEELIGDGMERDYRAIPELDAYEAEGLALDDEDVEELTASQREAAERAMRQRDREAGRGLGRMRRGLLYDSDEEDEERPARKRRQVERATEDGEEDEEMIESIENLEDLKGHSVREWVSMAGPRLEIHHRFKNFLRTHVDSHGHNVFKERISDMCKENRESLVVNYEDLAAREHVLAYFLPEAPAELLQIFDEAALEVVLAMYPKYDRITNHIHVRISHLPLVEELRSLRQLHLNQLIRTSGVVTSCTGVLPQLSMVKYNCNKCNFVLGPFCQSQNQEVKPGSCPECQSAGPFEVNMEETIYQNYQRIRIQESPGKVAAGRLPRSKDAILLADLVDSCKPGDEIELTGIYHNNYDGSLNTANGFPVFATVILANHVAKKDNKVAVGELTDEDVKMITSLSKDQQIGEKIFASIAPSIYGHEDIKRGLALALFGGEPKNPGGKHKVRGDINVLLCGDPGTAKSQFLKYIEKVSSRAIFTTGQGASAVGLTAYVQRHPVSREWTLEAGALVLADRGVCLIDEFDKMNDQDRTSIHEAMEQQSISISKAGIVTSLQARCTVIAAANPIGGRYDPSLTFSENVDLTEPIISRFDILCVVRDTVDPVQDEMLARFVVGSHVRHHPSNKEEEGLANGSAAEPAMPNTYGVEPLPQEVLKKYIIYAKERVHPKLNQMDQDKVAKMYSDLRKESMATGSIPITVRHIESMIRMAEAHARIHLRDYVIEDDVNMAIRVMLESFIDTQKFSVMRSMRKTFARYLSFRRDNNELLLFILKQLVAEQVTYQRNRFGAQQDTIEVPEKDLVDKARQINIHNLSAFYDSELFRMNKFSHDLKRKMILQQF

SEQ ID NO: 48609 - protein, 238 aa, Homo sapiens
MGLDLLVFAHDHVGHGQSEGERMVVSDFHVFVRDVLQHVDSMQKDYPGLPVFLLGHSMGGAIAILTAAERPGHFAGMVLISPLVLANPESATTFKVLAAKVLNLVLPNLSLGPIDSSVLSRNKTEVDIYNSDPLICRAGLKVCFGIQLLNAVSRVERALPKLTVPFLLLQGSADRLCDSKGAYLLMELAKSQDKTLKIYEGAYHVLHKELPEVTNSVFHEINMWVSQRTATAGTASPP

SEQ ID NO: 48610 - protein, 540 aa, Homo sapiens
MELERVGEDEEQMMIKRSSECNPLLQEPIASAQFGATAGTECRKSVPCGWERVVKQRLFGKTAGRFDVYFISPQGLKFRSKSSLANYLHKNGETSLKPEDFDFTVLSKRGIKSRYKDCSMAALTSHLQNQSNNSNWNLRTRSKCKKDVFMPPSSSSELQESRGLSNFTSTHLLLKEDEGVDDVNFRKVRKPKGKVTILKGIPIKKTKKGCRKSCSGFVQSDSKRESVCNKADAESEPVAQKSQLDRTVCISDAGACGETLSVTSEENSLVKKKERSLSSGSNFCSEQKTSGIINKFCSAKDSEHNEKYEDTFLESEEIGTKVEVVERKEHLHTDILKRGSEMDNNCSPTRKDFTGEKIFQEDTIPRTQIERRKTSLYFSSKYNKEALSPPRRKAFKKWTPPRSPFNLVQETLFHDPWKLLIATIFLNRTSGKMAIPVLWKFLEKYPSAEVARTADWRDVSELLKPLGLYDLRAKTIVKFSDEYLTKQWKYPIELHGIGKYGNDSYRIFCVNEWKQVHPEDHKLNKYHDWLWENHEKLSLS

SEQ ID NO: 48611 - protein, 534 aa, Homo sapiens [sequence omitted]

SEQ ID NO: 48612 - protein, 500 aa, Homo sapiens
MELERVGEDEEQMMIKRSSECNPLLQEPIASAQFGATAGTECRKSVPCGWERVVKQRLFGKTAGRFDVYFISPQGLKFRSKSSLANYLHKNGETSLKPEDFDFTVLSKRGIKSRYKDCSMAALTSHLQNQSNNSNWNLRTRSKCKKDVFMPPSSSSELQESRGLSNFTSTHLLLKEDEGVDDVNFRKVRKPKGKVTILKGIPIKKTKKGCRKSCSGFVQSDSKRESVCNKADAESEPVAQKSQLDRTVCISDAGACGETLSVTSEENSLVKKKERSLSSGSNFCSEQKTSGIINKFCSAKDSEHNEKYEDTFLESEEIGTKVEVVERKEHLHTDILKRGSEMDNNCSPTRKDFTGEKIFQEDTIPRTQIERRKTSLYFSSKYNKEALSPPRRKAFKKWTPPRSPFNLVQETLFHDPWKLLIATIFLNRTSGKMAIPVLWKFLEKYPSAEVARTADWRDVSELLKPLGLYDLRAKTIVKFSDEYLTKQWKYPIELHGIGAP

SEQ ID NO: 48613 - protein, 1047 aa, Homo sapiens [sequence omitted]

SEQ ID NO: 48614 - protein, 617 aa, Homo sapiens
MTHNALENINVIGQGLKHLFQHQRRRSSVSPHDVQQIQADPEPEMDLESQNACAEIDGVPTHPTALNRVLQQIRVPPKMKRGTSLHSRRGKPEAPKGSPQINRKSGQEMTAVMQSGRPRSSSTTDAPTSSAMMEIACAAAAAAAACLPGEEGTAERIERLEVSSLAQTSSAVASSTDGSIHTDSVDGTPDPQRTKAAIAHLQQKILKLTEQIKIAQTARDDNVAEYLKLANSADKQQAARIKQVFEKKNQKSAQTILQLQKKLEHYHRKLREVEQNGIPRQPKDVFRDMHQGLKDVGAKVTGFSEGVVDSVKGGFSSFSQATHSAAGAVVSKPREIASLIRNKFGSADNIPNLKDSLEEGQVDDAGKALGVISNFQSSPKYGSEEDCSSATSGSVGANSTTGGIAVGASSSKTNTLDMQSSGFDALLHEIQEIRETQARLEESFETLKEHYQRDYSLIMQTLQEERYRCERLEEQLNDLTELHQNEILNLKQELASMEEKIAYQSYERARDIQEALEACQTRISKMELQQQQQQVVQLEGLENATARNLLGKLINILLAVMAVLLVFVSTVANCVVPLMKTRNRTFSTLFLVVFIAFLWKHWDALFSYVERFFSSPR

SEQ ID NO: 48615 - protein, 1144 aa, Homo sapiens
MRDPSTPLVDLNSNQRTRGELKRAMDIFSAGCVIAELFTEGVPLFDLSQLLAYRNGHFFPEQVLNKIEDHSIRELVTQMIHREPDKRLEAEDYLKQQRGNAFPEIFYTFLQPYMAQFAKETFLSADERILVIRKDLGNIIHNLCGHDLPEKAEGEPKENGLVILVSVITSCLQTLKYCDSKLAALELILHLAPRLSVEILLDRITPYLLHFSNDSVPRVRAEALRTLTKVLALVKEVPRNDINIYPEYILPGIAHLAQDDATIVRLAYAENIALLAETALRFLELVQLKNLNMENDPNNEEIDEVTHPNGNYDTELQALHEMVQQKVVTLLSDPENIVKQTLMENGITRLCVFFGRQKANDVLLSHMITFLNDKNDWHLRGAFFDSIVGVAAYVGWQSSSILKPLLQQGLSDAEEFVIVKALYALTCMCQLGLLQKPHVYEFASDIAPFLCHPNLWIRYGAVGFITVVARQISTADVYCKLMPYLDPYITQPIIQIERKLVLLSVLKEPVSRSIFDYALRSKDITSLFRHLHMRQKKRNGSLPDCPPPEDPAIAQLLKKLLSQGMTEEEEDKLLALKDFMMKSNKAKANIVDQSHLHDSSQKGVIDLAALGITGRQVDLVKTKQEPDDKRARKHVKQDSNVNEEWKSMFGSLDPPNMPQALPKGSDQEVIQTGKPPRSESSAGICVPLSTSSQVPEVTTVQNKKPVIPVLSSTILPSTYQIRITTCKTELQQLIQQKREQCNAERIAKQMMENAEWESKPPPPGWRPKGLLVAHLHEHKSAVNRIRVSDEHSLFATCSNDGTVKIWNSQKMEGKTTTTRSILTYSRIGGRVKTLTFCQGSHYLAIASDNGAVQLLGIEASKLPKSPKIHPLQSRILDQKEDGCVVDMHHFNSGAQSVLAYATVNGSLVGWDLRSSSNAWTLKHDLKSGLITSFAVDIHQCWLCIGTSSGTMACWDMRFQLPISSHCHPSRARIRRLSMHPLYQSWVIAAVQGNNEVSMWDMETGDRRFTLWASSAPPLSELQPSPHSVHGIYCSPADGNPILLTAGSDMKIRFWDLAYPERSYVVAGSTSSPSVSYYRKIIEGTEVVQEIQNKQKVGPSDDTPRRGPESLPVGHHDIITDVATFQTTQGFIVTASRDGIVKVWK

SEQ ID NO: 48616 - protein, 673 aa, Homo sapiens [sequence omitted]

SEQ ID NO: 48617 - protein, 451 aa, Homo sapiens
MHERRILHRDLKSKNVFLKNNLLKIGDFGVSRLLMGSCDLATTLTGTPHYMSPEALKHQGYDTKSDIWSLACILYEMCCMNHAFAGSNFLSIVLKIVEGDTPSLPERYPKELNAIMESMLNKNPSLRPSAIEILKIPYLDEQLQNLMCRYSEMTLEDKNLDCQKEAAHIINAMQKRIHLQTLRALSEVQKMTPRERMRLRKLQAADEKARKLKKIVEEKYEENSKRMQELRSRNFQQLSVDVLHEKTHLKGMEEKEEQPEGRLSCSPQDEDEERWQGREEESDEPTLENLPESQPIPSMDLHELESIVEDATSDLGYHEIPEDPLVAEEYYADAFDSYCEESDEEEEEIALERPEKEIRNEGSQPAYRTNQQDSDIEALARCLENVLGCTSLDQPCRSWGQKYLKRSIITSREQGIRMLAKQRSASVWKKWCLKPATVLKWTSSCTLKSSC

SEQ ID NO: 48618 - protein, 242 aa, Homo sapiens
MPLWTKDGQKHVVTLLQVQDCHVLKYTSKENCNGKMATLSVGGKTVSRFRKATSILEFYRELGLPPKQTVKIFNITDNAAIKPGTPLYAAHFRPGQYVDVTAKTIGKGFQGVMKRWGFKGQPATHGQTKTHRRPGAVATGDIGRVWPGTKMPGKMGNIYRTEYGLKVWRINTKHNIIYVNGSVPGHKNCLVKVKDSKLPAYKDLGKNLPFPTYFPDGDEEELPEDLYDENVCQPGAPSITFA

SEQ ID NO: 48619 - protein, 563 aa, Homo sapiens
MKPGATGESDLAEVLPQHKFDSKSLEAYLNQHLSGFGAEREATLTIAQYRAGKSNPTFYLQKGFQTYVLRKKPPGSLLPKAHQIDREFKVQKALFSIGFPVPKPILYCSDTSVIGTEFYVMEHVQGRIFRDLTIPGLSPAERSAIYVATVETLAQLHSLNIQSLQLEGYGIGAGYCKRQVSTWTKQYQAAAHQDIPAMQQLSEWLMKNLPDNDNEENLIHGDFRLDNIVFHPKECRVIAVLDWELSTIGHPLSDLAHFSLFYFWPRTVPMINQGSYSENSGIPSMEELISIYCRCRGINSILPNWNFFLALSYFKMAGIAQGVYSRYLLGNNSSEDSFLFANIVQPLAETGLQLSKRTFSTVLPQIDTTGQLFVQTRKGQEVLIKVKHFMKQHILPAEKEVTEFYVQNENSVDKWGKPLVIDKLKEMAKVEGLWNLFLPAVSGLSHVDYALIAEETGKCFFAPDVFNCQAPDTGNMEVLHLYGSEEQKKQWLEPLLQGNITSCFCMTEPDVASSDATNIECSIQRDEDSYVINGKKWWSSGAGNPKCKIAIVLGRTQNTSLSR

SEQ ID NO: 48620 - protein, 111 aa, Homo sapiens
MQISSEKEEDDNEKRQDPGDNWEEGGGGGGGMEKSSGPWNKTAPVQAPPAPVIVTETPEPAMTSGVYRPPGARLTTTRKTPQGPPEIYSDTQFPSLQSTAKHVESRNRYLK

SEQ ID NO: 48621 - protein, 603 aa, Homo sapiens
MSSSHSFPQLARNQQGPPLRGPPAEGPESRGPPPQYPHVVLAHETTTAVTDPRYRARGSPHFQHAEVRILQAQVPPVFLQQQQQYQYLQQSQEHPPPPHPAALGHGPLSSLSPPAVEGPVSAQASSATSGSAHLAQMEAVLRENARLQRDNERLQRELESSAEKAGRIEKLESEIQRLSEAHESLTRASSKREALEKTMRNKMDSEMRRLQDFNRDLRERLESANRRLASKTQEAQAGSQDMVAKLLAQSYEQQQEQEKLEREMALLRGAIEDQRRRAELLEQALGNAQGRAARAEEELRKKQAYVEKVERLQQALGQLQAACEKREQLELRLRTRLEQELKALRAQQRQAGAPGGSSGSGGSPELSALRLSEQLREKEEQILALEADMTKWEQKYLEERAMRQFAMDAAATAAAQRDTTLIRHSPQPSPSSSFNEGLLTGGHRHQEMESRLKVLHAQILEKDAVIKVLQQRSRRDPGKAIQGSLRPAKSVPSVFAAAAAGTQGWQGLSSSERQTADAPARLTTADRAPTEEPVVTAPPAAHAKHGSRDGSTQTEGPPDSTSTCLPPEPDSLLGCSSSQRAASLDSVATSRVQDLSDMVEILI

SEQ ID NO: 48622 - protein, 602 aa, Homo sapiens
MSSSHSFPQLARNQQGPPLRGPPAEGPESRGPPPQYPHVVLAHETTTAVTDPRYRARGSPHFQHAEVRILQAQVPPVFLQQQQQYQYLQQSQEHPPPPHPAALGHGPLSSLSPPAVEGPVSAQASSATSGSAHLAQMEAVLRENARLQRDNERLQRELESSAEKAGRIEKLESEIQRLSEAHESLTRASSKREALEKTMRNKMDSEMRRLQDFNRDLRERLESANRRLASKTQEAQAGSQDMVAKLLAQSYEQQQEQEKLEREMALLRGAIEDQRRRAELLEQALGNAQGRAARAEEELRKKQAYVEKVERLQQALGQLQAACEKREQLELRLRTRLEQELKALRAQQRQAGAPGGSSGSGGSPELSALRLSEQLREKEEQILALEADMTKWEQKYLEERAMRQFAMDAAATAAAQRDTTLIRHSPQPSPSSSFNEGLLTGGHRHQEMESRLKVLHAQILEKDAVIKVLQQRSRRDPGKAIQGSLRPAKSVPSVFAAAAAGTQGWQGLSSSERQTADAPARLTTDRAPTEEPVVTAPPAAHAKHGSRDGSTQTEGPPDSTSTCLPPEPDSLLGCSSSQRAASLDSVATSRVQDLSDMVEILI

SEQ ID NO: 48623 - protein, 896 aa, Homo sapiens
MRFTVRDCSSLPNVPGSCKETFNLYYYETDSVIATKKSAFWSEAPYLKVDTIAADESFSQVDFGGRLMKVNTEVRSFGPLTRNGFYLAFQDYGACMSLLSVRVFFKKCPSIVQNFAVFPETMTGAESTSLVIARGTCIPNAEEVDVPIKLYCNGDGEWMVPIGRCTCKPGYEPENSVACKACPAGTFKASQEAEGCSHCPSNSRSPAEASPICTCRTGYYRADFDPPEVACTSVPSGPRNVISIVNETSIILEWHPPRETGGRDDVTYNIICKKCRADRRSCSRCDDNVEFVPRQLGLTECRVSISSLWAHTPYTFDIQAINGVSSKSPFPPQHVSVNITTNQAAPSTVPIMHQVSATMRSITLSWPQPEQPNGIILDYEIRYYEKEHNEFNSSMARSQTNTARIDGLRPGMVYVVQVRARTVAGYGKFSGKMCFQTLTDDDYKSELREQLPLIAGSAAAGVVFVVSLVAISIVCSRKRAYSKEAVYSDKLQHYSTGRGSPGMKIYIDPFTYEDPNEAVREFAKEIDVSFVKIEEVIGAGEFGEVYKGRLKLPGKREIYVAIKTLKAGYSEKQRRDFLSEASIMGQFDHPNIIRLEGVVTKSRPVMIITEFMENGALDSFLRQNDGQFTVIQLVGMLRGIAAGMKYLAEMNYVHRDLAARNILVNSNLVCKVSDFGLSRYLQDDTSDPTYTSSLGGKIPVRWTAPEAIAYRKFTSASDVWSYGIVMWEVMSFGERPYWDMSNQDVINAIEQDYRLPPPMDCPAALHQLMLDCWQKDRNSRPRFAEIVNTLDKMIRNPASLKTVATITAVPSQPLLDRSIPDFTAFTTVDDWLSAIKMVQYRDSFLTAGFTSLQLVTQMTSEDLLRIGITLAGHQKKILNSIHSMRVQISQSPTAMA

SEQ ID NO: 48624 - protein, 967 aa, Homo sapiens
MRFTVRDCSSLPNVPGSCKETFNLYYYETDSVIATKKSAFWSEAPYLKVDTIAADESFSQVDFGGRLMKVNTEVRSFGPLTRNGFYLAFQDYGACMSLLSVRVFFKKCPSIVQNFAVFPETMTGAESTSLVIARGTCIPNAEEVDVPIKLYCNGDGEWMVPIGRCTCKPGYEPENSVACKACPAGTFKASQEAEGCSHCPSNSRSPAEASPICTCRTGYYRADFDPPEVACTSVPSGPRNVISIVNETSIILEWHPPRETGGRDDVTYNIICKKCRADRRSCSRCDDNVEFVPRQLGLTECRVSISSLWAHTPYTFDIQAINGVSSKSPFPPQHVSVNITTNQAAPSTVPIMHQVSATMRSITLSWPQPEQPNGIILDYEIRYYEKEHNEFNSSMARSQTNTARIDGLRPGMVYVVQVRARTVAGYGKFSGKMCFQTLTDDDYKSELREQLPLIAGSAAAGVVFVVSLVAISIVCSRKRAYSKEAVYSDKLQHYSTGRGSPGMKIYIDPFTYEDPNEAVREFAKEIDVSFVKIEEVIGAGEFGEVYKGRLKLPGKREIYVAIKTLKAGYSEKQRRDFLSEASIMGQFDHPNIIRLEGVVTKSRPVMIITEFMENGALDSFLRQNDGQFTVIQLVGMLRGIAAGMKYLAEMNYVHRDLAARNILVNSNLVCKVSDFGLSRYLQDDTSDPTYTSSLGGKIPVRWTAPEAIAYRKFTSASDVWSYGIVMWEVMSFGERPYWDMSNQDVINAIEQDYRLPPPMDCPAALHQLMLDCWQKDRNSRPRFAEIVNTLDKMIRNPASLKTVATITAVPSQPLLDRSIPDFTAFTTVDDWLSAIKMVQYRDSFLTAGFTSLQLVTQMTSEHHLGRPSEEDPEQHSFYEGPDKSVTNGNGMRTLVSWGRRGGKRTRVKGDQRLTTVECTGETGFSAEECISISEESTGPVASRQSPFLSDRSMFEMPWETKYIIIKI

SEQ ID NO: 48625 - protein, 390 aa, Homo sapiens [sequence omitted]

SEQ ID NO: 48626 - protein, 106 aa, Homo sapiens
MDEEVQSILTKMTGLNLQKTFKPAIQELKPPTYKLMTQAQLEEATRQAVEAAKVRLKMPPVLEERVPINDVLAEDKILEGTETTKYVFTDISYSIPHRVSICLIAK

SEQ ID NO: 48627 - protein, 290 aa, Homo sapiens
MDEEVQSILTKMTGLNLQKTFKPAIQELKPPTYKLMTQAQLEEATRQAVEAAKVRLKMPPVLEERVPINDVLAEDKILEGTETTKYVFTDISYSIPHRERFIVVREPSGTLRKASWEERDRMIQVYFPKEGRKILTPIIFKEENLRTMYSQDRHVDVLNLCFAQFEPDSTEYIKVHHKTYEDIDKRGKYDLLRSTRYFGGMVWYFVNNKKIDGLLIDQIQRDLIDDATNLVQLYHVLHPDGQSAQGAKDQAAEGINLIKVFAKTEAQKGAYIELTLQTYQEALSRHSAAS

SEQ ID NO: 48628 - protein, 1000 aa, Homo sapiens
MRTASLCLERTDVCHEAEPVRTLAEHSYAVSSVAEAYRSQPVREHDGSSPGNTGKENCEALAAKPKTCRKPKTFSIPQDSDSATENIPPPPVSNLEVNQERSPQPAAVLTRSKSPNNEGDVHFSREDENQSSDVPGPPAAEVPPLVYNCSCCSKAFDSSTLLSAHMQLHKPTQEPLVCKYCNKQFTTLNRLDRHEQICMRSSHMPIPGGNQRFLENYPTIGQNGGSFTGPEPLLSENRIGEFSSTGSTLPDTDHMVKFVNGQMLYSCVVCKRSYVTLSSLRRHANVHSWRRTYPCHYCNKVFALAEYRTRHEIWHTGERRYQCIFCLETFMTYYILKNHQKSFHAIDHRLSISKKTANGGLKPSVYPYKLYRLLPMKCKRAPYKSYRNSSYENARENSQMNESAPGTYVVQNPHSSELPTLNFQDTVNTLTNSPAIPLETSACQDIPTSANVQNAEGTKWGEEALKMDLDNNFYSTEVSVSSTENAVSSDLRAGDVPVLSLSNSSENAASVISYSGSAPSVIVHSSQFSSVIMHSNAIAAMTSSNHRAFSDPAVSQSLKDDSKPEPDKVGRFASRPKSIKEKKKTTSHTRGEIPEESNYVADPGGSLSKTTNIAEETSKIETYIAKPALPGTSTNSNVAPLCQITVKIGNEAIVKRHILGSKLFYKRGRRPKYQMQEEPLPQGNDPEPSGDSPLGLCQSECMEMSEVFDDASDQDSTDKPWRPYYNYKPKKKSRQLKKMRKVNWRKEHGNRSPSHKCKYPAELDCAVGKAPQDKPFEEEETKEMPKLQCELCDGDKAVGAGNQGRPHRHLTSRPYACELCAKQFQSPSTLKMHMRCHTGEKPYQCKTCGRCFSVQGNLQKHERIHLGLKEFVCQYCNKAFTLNETLKIHERIHTGEKRYHCQFCFQRFLYLSTKRNHEQRHIREHNGKGYACFQCPKICKTAAALGMHQKKHLFKSPSQQEKIGDVCHENSNPLENQHFIGSEDNDQKDNIQTGVENVVL

SEQ ID NO: 48629 - protein, 762 aa, Homo sapiens
MALKDVREVKEENTLNEKLFLLACDKGDYYMVKKILEENSSGDLNINCVDVLGRNAVTITIENENLDILQLLLDYGCQSADALLVAIDSEVVGAVDILLNHRPKRSSRPTIVKLMERIQNPEYSTTMDVAPVILAAHRNNYEILTMLLKQDVSLPKPHAVGCECTLCSAKNKKDSLRHSRFRLDIYRCLASPALIMLTEEDPILRAFELSADLKELSLVEVEFRNDYEELARQCKMFAKDLLAQARNSRELEVILNHTSSDEPLDKRGLLEERMNLSRLKLAIKYNQKEFVSQSNCQQFLNTVWFGQMSGYRRKPTCKKIMTVLTVGIFWPVLSLCYLIAPKSQFGRIIHTPFMKFIIHGASYFTFLLLLNLYSLVYNEDKKNTMGPALERIDYLLILWIIGMIWSDIKRLWYEGLEDFLEESRNQLSFVMNSLYLATFALKVVAHNKFHDFADRKDWDAFHPTLVAEGLFAFANVLSYLRLFFMYTTSSILGPLQISMGQMLQDFGKFLGMFLLVLFSFTIGLTQLYDKGYTSKEQKDCVGIFCEQQSNDTFHSFIGTCFALFWYIFSLAHVAIFVTRFSYGEELQSFVGAVIVGTYNVVVVIVLTKLLVAMLHKSFQLIANHEDKEWKFARAKLWLSYFDDKCTLPPPFNIIPSPKTICYMISSLSKWICSHTSKGKVKRQNSLKEWRNLKQKRDENYQKVMCCLVHRYLTSMRQKMQSTDQATVENLNELRQDLSKFRNEIRDLLGFRTSKYAMFYPRN

SEQ ID NO: 48630 - protein, 584 aa, Homo sapiens
MGLILRYATAPTDIESGTVYDCVKLTFSPSTLLVNITDQVYEYKYKREISQHNINPHQGNAILEKMTFDPEIFFNVLLPPIIFHAGYSLKKRHFFQNLGSILTYAFLGTAISCIVIGLIMYGFVKAMIHAGQLKNGDFHFTDCLFFGSLMSATDPVTVLAIFHELHVDPDLYTLLFGESVLNDAVAIVLTYSISIYSPKENPNAFDAAAFFQSVGNFLGIFAGSFAMGSAYAIITALLTKFTKLCEFPMLETGLFFLLSWSAFLSAEAAGLTGIVAVLFCGVTQAHYTYNNLSSDSKIRTKQLFEFMNFLAENVIFCYMGLALFTFQNHIFNALFILGAFLAIFVARACNIYPLSFLLNLGRKQKIPWNFQHMMMFSGLRGAIAFALAIRNTESQPKQMMFTTTLLLVFFTVWVFGGGTTPMLTWLQIRVGVDLDENLKEDPSSQHQEANNLDKNMTKAESARLFRMWYSFDHKYLKPILTHSGPPLTTTLPEWCGPISRLLTSPQAYGEQLKEDDVECIVNQDELAINYQEQASSPCSPPARLGLDQKASPQTPGKENIYEGDLGLGGYELKLEQTLGQSQLN

SEQ ID NO: 48631 - protein, 303 aa, Homo sapiens
MKLKTVASVFLLNLALADLCFLLTLPLWAVYTAMEYRWPFGNYLCKIASASVSFNLYASVFLLTCLSIDRYLAIVHPMKSRLRRTMLVAKVTCIIIWLLAGLASLPAIIHRNVFFIENTNITVCAFHYESQNSTLPIGLGLTKNILGFLFPFLIILTSYTLIWKALKKAYEIQKNKPRNDDIFKIIMAIVLFFFFSWIPHQIFTFLDVLIQLGIIRDCRIADIVDTAMPITICIAYFNNCLNPLFYGFLGKKFKRYFLQLLKYIPPKAKSHSNLSTKMSTLSYRPSDNVSSSTKKPAPCFEVE

SEQ ID NO: 48632 - protein, 287 aa, Homo sapiens [sequence omitted]

SEQ ID NO: 48633 - protein, 1006 aa, Homo sapiens [sequence omitted]

SEQ ID NO: 48634 - protein, 113 aa, Homo sapiens
MLSSVLAALIGIAGSGYCVIVAALGLAEGPLCLDSLGQWNYTFASTEGQYLLDTSTWSECTEPKHIVEWNVSLFSILLALGGIEFILCLIQVINGVLGGICGFCCSHQQQYDC

SEQ ID NO: 48635 - protein, 73 aa, Homo sapiens
MKTVANDVRYLLDTSTWSECTEPKHIVEWNVSLFSILLALGGIEFILCLIQVINGVLGGICGFCCSHQQQYDC

SEQ ID NO: 48636 - protein, 365 aa, Homo sapiens
MNPKPSSWRKKILPESFFKEPDSGSHSRQSSTDSSGGHPGPRLAGGAQHVRSHSSPASLQLGTGAGAAGSPAQQHAHLRQQSYDVTDELPLPPGWEMTFTATGQRYFLNHIEKITTWQDPRKAMNQPLNHMNLHPAVSSTPVPQRSMAVSQPNLVMNHQHQQQMAPSTLSQQNHPTQNPPAGLMSMPNALTTQQQQQQKLRLQRIQMERERIRMRQEELMRQEAALCRQLPMEAETLAPVQAAVNPPTMTPDMRSITNNSSDPFLNGGPYHSREQSTDSGLGLGCYSVPTTPEDFLSNVDEMDTGENAGQTPMNINPQQTRFPDFLDCLPGTNVDLGTLESEDLIPLFNDVESALNKSEPFLTWL

SEQ ID NO: 48637 - protein, 124 aa, Homo sapiens
MNSLATSVFSIAIPVDGDEDSASGGGVVAIDNKIEQAMDLVKSHLMYAVREEVEVLKEQIKELVERNSLLERENALLKSLSSNDQLSQLPTQQANPGSTSQQQAVIAQPPQPTQPPQQPNVSSA

SEQ ID NO: 48638 - protein, 236 aa, Homo sapiens
MLAQQMQLANAMMPGAPLQPVPMFSVAPSLATNASAAAFNPYLGPVSPSLVPAEILPTAPMLVTGNPGVPVPAAAAAAAQKLMRTDRLEVCREYQRGNCNRGENDCRFAHPADSTMIDTNDNTVTVCMDYIKGRCSREKCKYFHPPAHLQAKIKAAQYQVNQAAAAQAAATAAAMGIPQAVLPPLPKRPALEKTNGATAVFNTGIFQYQQALANMQLQQHTAFLPPDTHNICRTSD

SEQ ID NO: 48639 - protein, 931 aa, Homo sapiens
MWYAKKQGQKNKEAERQERAVVHMDERREEQIVQLLNSVQAKNDKESEAQISWFAPEDHGYGTEVSTKNTPCSENKLDIQEKKLINQEKKMFRIRNRSYIDRDSEYLLQENEPDGTLDQKLLEDLQKKKNDLRYIEMQHFREKLPSYGMQKELVNLIDNHQVTVISGETGCGKTTQVTQFILDNYIERGKGSACRIVCTQPRRISAISVAERVAAERAESCGSGNSTGYQIRLQSRLPRKQGSILYCTTGIILQWLQSDPYLSSVSHIVLDEIHERNLQSDVLMTVVKDLLNFRSDLKVILMSATLNAEKFSEYFGNCPMIHIPGFTFPVVEYLLEDVIEKIRYVPEQKEHRSQFKRGFMQGHVNRQEKEEKEAIYKERWPDYVRELRRRYSASTVDVIEMMEDDKVDLNLIVALIRYIVLEEEDGAILVFLPGWDNISTLHDLLMSQVMFKSVNQTQVFKRTPPGVRKIVIATNIAETSITIDDVVYVIDGGKIKETHFDTQNNISTMSAEWVSKANAKQRKGRAGRVQPGHCYHLYNGLRASLLDDYQLPEILRTPLEELCLQIKILRLGGIAYFLSRLMDPPSNEAVLLSIRHLMELNALDKQEELTPLGVHLARLPVEPHIGKMILFGALFCCLDPVLTIAASLSFKDPFVIPLGKEKIADARRKELAKDTRSDHLTVVNAFEGWEEARRRGFRYEKDYCWEYFLSSNTLQMLHNMKGQFAEHLLGAGFVSSRNPKDPESNINSDNEKIIKAVICAGLYPKVAKIRLNLGKKRKMVKVYTKTDGLVAVHPKSVNVEQTDFHYNWLIYHLKMRTSSIYLYDCTEVSPYCLLFFGGDISIQKDNDQETIAVDEWIVFQSPARIAHLVKELRKELDILLQEKIESPHPVDWNDTKSRDCAVLSAIIDLIKTQEKATPRNFPPRFQDGYYS

SEQ ID NO: 48640 - protein, 945 aa, Homo sapiens [sequence omitted]

SEQ ID NO: 48641 - protein, 584 aa, Homo sapiens
MNKVFGGTVHKKSVREDGVFNISVDNTCSLFRGLQKEEVVLLTHGDSVDKVADGFKVVARSGNIVAGIANESKKLYGAQFHPEVGLTENGKVILKNFLYDIAGCSGTFTVQNRELECIREIKERVGTSKVLVLLSGGVDSTVCTALLNRALNQEQVIAVHIDNGFMRKRESQSVEEALKKLGIQVKVINAAHSFYNGTTTLPISDEDRTPRKRISKTLNMTTSPEEKRKIIGDTFVKIANEVIGEMNLKPEEVFLAQGTLRPDLIESASLVASGKAELIKTHHNDTELIRKLREEGKVIEPLKDFHKDEVRILGRELGLPEELVSRHPFPGPGLAIRVICAEEPYICKDFPETNNILKIVADFSASVKKPHTLLQRVKACTTEEDQEKLMQITSLHSLNAFLLPIKTVGVQGDCRSYSYVCGISSKDEPDWESLIFLARLIPRMCHNVNRVVYIFGPPVKEPPTDVTPTFLTTGVLSTLRQADFEAHNILRESGYAGKISQMPVILTPLHFDRDPLQKQPSCQRSVVIRTFITSDFMTGIPATPGNEIPVEVVLKMVTEIKKIPGISRIMYDLTSKPPGTTEWE

SEQ ID NO: 48642 - protein, 70 aa, Homo sapiens
MKLSSWQQTPSPLILDQNYINTKNQVIKAERRVLKELGFCVHVKHPHKIIVMYLQVLECERNQTLVQTAW

SEQ ID NO: 48643 - protein, 65 aa, Homo sapiens
MSCILQNYNRPPVMALAIPIAVKFLHRGNKELCRNMSNYLSLAAITKADLLADHTEVIVKSILQV

SEQ ID NO: 48644 - protein, 101 aa, Homo sapiens
MSCILQNYNRPPVMALAIPIAVKFLHRGNKELCRNMSNYLSLAAITKADLLADHTEVIVKSILQGMVRKLSLGTCFGRYLKVFSSSIYGLWEARPRVLEAN

SEQ ID NO: 48645 - protein, 503 aa, Homo sapiens
MDSMELERQRGITIQSAATYTMWKDVNINIIDTPGHVDFTIEVERALRVLDGAVLVLCAVGGVQCQTMTVNRQMKRYNVPFLTFINKLDRMGSNPARALQQMRSKLNHNAAFMQIPMGLEGNFKGIVDLIEERAIYFDGDFGQIVRYGEIPAELRAAATDHRQELIECVANSDEQLGEMFLEEKIPSISDLKLAIRRATLKRSFTPVFLGSALKNKGVQPLLDAVLEYLPNPSEVQNYAILNKEDDSKEKTKILMNSSRDNSHPFVGLAFKLEVGRFGQLTYVRSYQGELKKGDTIYNTRTRKKVRLQRLARMHADMMEDVEEVYAGDICALFGIDCASGDTFTDKANSGLSMESIHVPDPVISIAMKPSNKNDLEKFSKGIGRFTREDPTFKVYFDTENKETVISGMGELHLEIYAQRLEREYGCPCITGKPKVAFRETITAPVPFDFTHKKQSGGAGQYGKVIGVLEPLDPEDYTKLEFSDETFGSNIPKQFVPAVEKVNF

SEQ ID NO: 48646 - protein, 663 aa, Homo sapiens
MDSMELERQRGITIQSAATYTMWKDVNINIIDTPGHVDFTIEVERALRVLDGAVLVLCAVGGVQCQTMTVNRQMKRYNVPFLTFINKLDRMGSNPARALQQMRSKLNHNAAFMQIPMGLEGNFKGIVDLIEERAIYFDGDFGQIVRYGEIPAELRAAATDHRQELIECVANSDEQLGEMFLEEKIPSISDLKLAIRRATLKRSFTPVFLGSALKNKGVQPLLDAVLEYLPNPSEVQNYAILNKEDDSKEKTKILMNSSRDNSHPFVGLAFKLEVGRFGQLTYVRSYQGELKKGDTIYNTRTRKKVRLQRLARMHADMMEDVEEVYAGDICALFGIDCASGDTFTDKANSGLSMESIHVPDPVISIAMKPSNKNDLEKFSKGIGRFTREDPTFKVYFDTENKETVISGMGELHLEIYAQRLEREYGCPCITGKPKVAFRETITAPVPFDFTHKKQSGGAGQYGKVIGVLEPLDPEDYTKLEFSDETFGSNIPKQFVPAVEKGFLDACEKGPLSGHKLSGLRFVLQDGAHHMVDSNEISFIRAGEGALKQALANATLCILEPIMAVEVVAPNEFQGQVIAGINRRHGVITGQDGVEDYFTLYADVPLNDMFGYSTELRSCTEGKGEYTMEYSRYQPCLPSTQEDVINKYLEATGQLPVKKGKAKN

SEQ ID NO: 48647 - protein, 130 aa, Homo sapiens [sequence omitted]

SEQ ID NO: 48648 - protein, 332 aa, Homo sapiens
MPPPVPNGNLHQHDPQDLRHNGNVVVAGRPSCSRGPRRAIQKPQPAGGRRSGRGPAAGGLCLQPPDGGTCVPEEPPVPPMDWEALEKHLAGLQFREQEAQKNERESIRQKLALGSFFDDGPGIYTSCSKSGKPSLSSRLQSGMNLQICFVNDSGSDKDSDADDSKTETSLDTPLSPMSKQSSSYSDRDTTEEESESLDDMDFLTRQKKLQAEAKMALAMAKPMAKMQVEVEKQNRKKSPVADLLPHMPHISECLMKRSLKPTDLRDMTIGQLQVIVNDLHSQIESLNEELVQLLLIRDELHTEQDAMLVDIEDLTRHAESQQKHMAEKMPAK

SEQ ID NO: 48649 - protein, 336 aa, Homo sapiens
MPPPVPNGNLHQHDPQDLRHNGNVVVAGRPSCSRGPRRAIQKPQPAGGRRSGRGPAAGGLCLQPPDGGTCVPEEPPVPPMDWEALEKHLAGLQFREQEAQKNERESIRQKLALGSFFDDGPGIYTSCSKSGKPSLSSRLQSGMNLQICFVNDSGSDKDSDADDSKTETSLDTPLSPMSKQSSSYSDRDTTEEESESLDDMDFLTRQKKLQAEAKMALAMAKPMAKMQVEVEKQNRKKSPVADLLPHMPHISECLMKRSLKPTDLRDMTIGQLQVIVNDLHSQIESLNEELVQLLLIRDELHTEQDAMLVDIEDLTRSVWLHSCQRRKAQGGLKSKN

SEQ ID NO: 48650 - protein, 179 aa, Homo sapiens [sequence omitted]

SEQ ID NO: 48651 - protein, 497 aa, Homo sapiens
MRRQRNEVVVELRKNKRDEHLLKRRNVPHEDICEDSDIDGDYRVQNTSLEAIVQNASSDNQGIQLSAVQAARKLLSSDRNPPIDDLIKSGILPILVHCLERDDNPSLQFEAAWALTNIASGTSEQTQAVVQSNAVPLFLRLLHSPHQNVCEQAVWALGNIIGDGPQCRDYVISLGVVKPLLSFISPSIPITFLRNVTWVMVNLCRHKDPPPPMETIQEILPALCVLIHHTDVNILVDTVWALSYLTDAGNEQIQMVIDSGIVPHLVPLLSHQEVKVQTAALRAVGNIVTGTDEQTQVVLNCDALSHFPALLTHPKEKINKEAVWFLSNITAGNQQQVQAVIDANLVPMIIHLLDKGDFGTQKEAAWAISNLTISGRKDQVAYLIQQNVIPPFCNLLTVKDAQVVQVVLDGLSNILKMAEDEAETIGNLIEECGGLEKIEQLQNHENEDIYKLAYEIIDQFFSSDDIDEDPSLVPEAIQGGTFGFNSSANVPTEGFQF

SEQ ID NO: 48652 - protein, 319 aa, Homo sapiens
MSLRSLKWSLLLLSLLSFFVMWYLSLPHYNVIERVNWMYFYEYEPIYRQDFHFTLREHSNCSHQNPFLVILVTSHPSDVKARQAIRVTWGEKKSWWGYEVLTFFLLGQEAEKEDKMLALSLEDEHLLYGDIIRQDFLDTYNNLTLKTIMAFRWVTEFCPNAKYVMKTDTDVFINTGNLVKYLLNLNHSEKFFTGYPLIDNYSYRGFYQKTHISYQEYPFKVFPPYCSGLGYIMSRDLVPRIYEMMGHVKPIKFEDVYVGICLNLLKVNIHIPEDTNLFFLYRIHLDVCQLRRVIAAHGFSSKEIITFWQVMLRNTTCHY

SEQ ID NO: 48653 - protein, 500 aa, Homo sapiens [sequence omitted]

SEQ ID NO: 48654 - protein, 1256 aa, Homo sapiens
MEFCGAGSVTDLIKNTKGNTLKEEWIAYICREILRGLSHLHQHKVIHRDIKGQNVLLTENAEVKLVDFGVSAQLDRTVGRRNTFIGTPYWMAPEVIACDENPDATYDFKSDLWSLGITAIEMAEGAPPLCDMHPMRALFLIPRNPAPRLKSKKWSKKFQSFIESCLVKNHSQRPATEQLMKHPFIRDQPNERQVRIQLKDHIDRTKKKRGEKDETEYEYSGSEEEEEENDSGEPSSILNLPGESTLRRDFLRLQLANKERSEALRRQQLEQQQRENEEHKRQLLAERQKRIEEQKEQRRRLEEQQRREKELRKQQEREQRRHYEEQMRREEERRRAEHEQEYIRRQLEEEQRQLEILQQQLLHEQALLLEYKRKQLEEQRQAERLQRQLKQERDYLVSLQHQRQEQRPVEKKPLYHYKEGMSPSEKPAWAKEVEERSRLNRQSSPAMPHKVANRISDPNLPPRSESFSISGVQPARTPPMLRPVDPQIPHLVAVKSQGPALTASQSVHEQPTKGLSGFQEALNVTSHRVEMPRQNSDPTSENPPLPTRIEKFDRSSWLRQEEDIPPKVPQRTTSISPALARKNSPGNGSALGPRLGSQPIRASNPDLRRTEPILESPLQRTSSGSSSSSSTPSSQPSSQGGSQPGSQAGSSERTRVRANSKSEGSPVLPHEPAKVKPEESRDITRPSRPASYKKAIDEDLTALAKELRELRIEETNRPMKKVTDYSSSSEESESSEEEEEDGESETHDGTVAVSDIPRLIPTGAPGSNEQYNVGMVGTHGLETSHADSFSGSISREGTLMIRETSGEKKRSGHSDSNGFAGHINLPDLVQQSHSPAGTPTEGLGRVSTHSQEMDSGTEYGMGSSTKASFTPFVDPRVYQTSPTDEDEEDEESSAAALFTSELLRQEQAKLNEARKISVVNVNPTNIRPHSDTPEIRKYKKRFNSEILCAALWGVNLLVGTENGLMLLDRSGQGKVYNLINRRRFQQMDVLEGLNVLVTISGKKNKLRVYYLSWLRNRILHNDPEVEKKQGWITVGDLEGCIHYKVVKYERIKFLVIALKNAVEIYAWAPKPYHKFMAFKSFADLQHKPLLVDLTVEEGQRLKVIFGSHTGFHVIDVDSGNSYDIYIPSHIQGNITPHAIVILPKTDGMEMLVCYEDEGVYVNTYGRITKDVVLQWGEMPTSVAYIHSNQIMGWGEKAIEIRSVETGHLDGVFMHKRAQRLKFLCERNDKVFFASVRSGGSSQVFFMTLNRNSMMNW

SEQ ID NO: 48655 - protein, 670 aa, Homo sapiens [sequence omitted]

SEQ ID NO: 48656 - protein, 553 aa, Homo sapiens
MPPLEQFMEIPSMDRRELFFRDIERGDIVIGRISSIREFGFFMVLICLGSGIMRDIAHLEITALCPLRDVPSHSNHGDPLSYYQTGDIIRAGIKDIDRYHEKLAVSLYSSSLPPHLSGIKLGVISSEELPLYYRRSVELNSNSLESYENVMQSSLGFVNPGVVEFLLEKLGIDESNPPSLMRGLQSKNFSEDDFASALRKKQSASWALKCVKIGVDYFKVGRHVDAMNEYNKALEIDKQNVEALVARGALYATKGSLNKAIEDFELALENCPTHRNARKYLCQTLVERGGQLEEEEKFLNAESYYKKALALDETFKDAEDALQKLHKYMQKSLELREKQAEKEEKQKTKKIETSAEKLRKLLKEEKRLKKKRRKSTSSSSVSSADESVSSSSSSSSSGHKRHKKHKRNRSESSRSSRRHSSRASSNQIDQNRKDECYPVPANTSASFLNHKQEVEKLLGKQDRLQYEKTQIKEKDRCPLSSSSLEIPDDFGVYSYLFKKLTIKQPQAGPSGDIPEEGIVIIDDSSIHVTDPEDLQVGQDMEVEDSGIDDPDHG

SEQ ID NO: 48657 - protein, 564 aa, Homo sapiens
MKGEFYVIEYAACDATYNEIVTFERLRPVNQNKTVKKNTFFKCTVDVPEDLREACANENAHKDFKKAVGACRIFYHPETTQLMILSASEATVKRVNILSDMHLRSIRTKLMLMSRNEEATKHLECTKQLAAAFHEEFVVREDLMGLAIGTHGSNIQQARKVPGVTAIELDEDTGTFRIYGESADAVKKARGFLEFVEDFIQVPRNLVGKVIGKNGKVIQEIVDKSGVVRVRIEGDNENKLPREDGMVPFVFVGTKESIGNVQVLLEYHIAYLKEVEQLRMERLQIDEQLRQIGMGFRPSSTRGPEKEKGYATDESTVSSVQGSRSYSGRGRGRRGPNYTSGYGTNSELSNPSETESERKDELSDWSLAGEDDRDSRHQRDSRRRPGGRGRSVSGGRGRGGPRGGKSSISSVLKDPDSNPYSLLDNTESDQTADTDASESHHSTNRRRRSRRRRTDEDAVLMDGMTESDTASVNENGLVTVADYISRAESQSRQRNLPRETLAKNKKEMAKDVIEEHGPSEKAINGPTSASGDDISKLQRTPGEEKINTLKEENTQEAAVLNGVS

SEQ ID NO: 48658 - protein, 572 aa, Homo sapiens
MDPKSLTGHEFFDFSSGSSHAENILQIFNEFRDSRLFTDVIICVEGKEFPCHRAVLSACSSYFRAMFCNDHRESREMLVEINGILAEAMECFLQYVYTGKVKITTENVQYLFETSSLFQISVLRDACAKFLEEQLDPCNCLGIQRFADTHSLKTLFTKCKNFALQTFEDVSQHEEFLELDKDELIDYICSDELVIGKEEMVFEAVMRWVYRAVDLRRPLLHELLTHVRLPLLHPNYFVQTVEVDQLIQNSPECYQLLHEARRYHILGNEMMSPRTRPRRSTGYSEVIVVVGGCERVGGFNLPYTECYDPVTGEWKSLAKLPEFTKSEYAVCALRNDILVSGGRINSRDVWIYNSQLNIWIRVASLNKGRWRHKMAVLLGKVYVVGGYDGQNRLSSVECYDSFSNRWTEVAPLKEAVSSPAVTSCVGKLFVIGGGPDDNTCSDKVQSYDPETNSWLLRAAIPIAKRCITAVSLNNLIYVAGGLTKAIYCYDPVEDYWMHVQNTFSRQENCGMSVCNGKIYILGGRRENGEATDTILCYDPATSIITGVAAMPRPVSYHGCVTIHRYNEKCFKL

SEQ ID NO: 48659 - protein, 474 aa, Homo sapiens
MSLNIITVTLNMEKYNFLGISIVGQSNERGDGGIYIGSIMKGGAVAADGRIEPGDMLLQVNEINFENMSNDDAVRVLREIVHKPGPITLTVAKCWDPSPRGCFTLPRSEPIRPIDPAAWVSHTAAMTGTFPAYGMSPSLSTITSTSSSITSSIPDTERLDDFHLSIHSDMAAIVKAMASPESGLEVRDRMWLKITIPNAFIGSDVVDWLYHNVEGFTDRREARKYASNLLKAGFIRHTVNKITFSEQCYYIFGDLCGNMANLSLHDHDGSSGASDQDTLAPLPHPGAAPWPMAFPYQYPPPPHPYNPHPGFPELGYSYGGGSASSQHSEGSRSSGSNRSGSDRRKEKDPKAGDSKSGGSGSESDHTTRSSLRGPRERAPSERSGPAASEHSHRSHHSLASSLRSHHTHPSYGPPGVPPLYGPPMLMMPPPPAAMGPPGAPPGRDLASVPPELTASRQSFRMAMGNPSEFFVDVM

SEQ ID NO: 48660 - protein, 956 aa, Homo sapiens
MDTKWVTSELAWTSHPESGWEEVSGYDEAMNPIRTYQVCNVRESSQNNWLRTGFIWRRDVQRVYVELKFTVRDCNSIPNIPGSCKETFNLFYYEADSDVASASSPFWMENPYVKVDTIAPDESFSRLDAGRVNTKVRSFGPLSKAGFYLAFQDQGACMSLISVRAFYKKCASTTAGFALFPETLTGAEPTSLVIAPGTCIPNAVEVSVPLKLYCNGDGEWMVPVGACTCATGHEPAAKESQCRPCPPGSYKAKQGEGPCLPCPPNSRTTSPAASICTCHNNFYRADSDSADSACTTVPSPPRGVISNVNETSLILEWSEPRDLGGRDDLLYNVICKKCHGAGGASACSRCDDNVEFVPRQLGLTERRVHISHLLAHTRYTFEVQAVNGVSGKSPLPPRYAAVNITTNQAAPSEVPTLRLHSSSGSSLTLSWAPPERPNGVILDYEMKYFEKSEGIASTVTSQMNSVQLDGLRPDARYVVQVRARTVAGYGQYSRPAEFETTSERGSGAQQLQEQLPLIVGSATAGLVFVVAVVVIAIVCLRKQRHGSDSEYTEKLQQYIAPGMKVYIDPFTYEDPNEAVREFAKEIDVSCVKIEEVIGAGEFGEVCRGRLKQPGRREVFVAIKTLKVGYTERQRRDFLSEASIMGQFDHPNIIRLEGVVTKSRPVMILTEFMENCALDSFLRLNDGQFTVIQLVGMLRGIAAGMKYLSEMNYVHRDLAARNILVNSNLVCKVSDFGLSRFLEDDPSDPTYTSSLGGKIPIRWTAPEAIAYRKFTSASDVWSYGIVMWEVMSYGERPYWDMSNQDVINAVEQDYRLPPPMDCPTALHQLMLDCWVRDRNLRPKFSQIVNTLDKLIRNAASLKVIASAQSGMSQPLLDRTVPDYTTFTTVGDWLDAIKMGRYKESFVSAGFASFDLVAQMTAEDLLRIGVTLAGHQKKILSSIQDMRLQMNQTLPVQV

SEQ ID NO: 48661 - protein, 124 aa, Homo sapiens
MDKELEFKNDLIDDKEFDIPQVDTPPTLESILNETDDEDESFILEDPTLLNIDTIDSHSYDTSSVASSDSGDRTNLKRKKKLPDSFSLHGSVMRHSLLKGISAQIVSAADKVDAGLPTAIVSIL

SEQ ID NO: 48662 - protein, 474 aa, Homo sapiens
MLKLGNKSPNGISDYPKIRVTVTRDQPRRVLPSFGFTLNSEGCNRRPGGRRHSKGNPESSLMWKPQEQAVTEMISEESGKGLRRPHCTVEEGVQKEEREKYRKLLERLKESGHGNSVCPVTSNYHSSQRSQMDTLKTKGWGEEQNHGVKTTQFVPKQYRLVETRGPLCSLRSEKRCSKGKITDTETMVGIRFENESRRGYQLEPDLSEEVSARLRLGSGSNGLLRRKVSIIETKEKNCSGKERDRRTDDLLELTEDMEKEISNALGHGPQDEILSSAFKLRITRGDIQTLKNYHWLNDEVINFYMNLLVERNKKQGYPALHVFSTFFYPKLKSGGYQAVKRWTKGVNLFEQEIILVPIHRKVHWSLVVIDLRKKCLKYLDSMGQKGHRICEILLQYLQDESKTKRNSDLNLLEWTHHSMKPHEIPQQLNGSDCGMFTCKYADYISRDKPITFTQHQMPLFRKKMVWEILHQQLL

SEQ ID NO: 48663 - protein, 229 aa, Homo sapiens
MLNRRYLSPKWIKMFVLDEADEMLSRGFKDQIYEIFQKLNTSIQVVLLSATMPTDVLEVTKKFMRDPIRILVKKEELTLEGIKQFYINVEREEWKLDTLCDLYETLTITQAVIFLNTRRKVDWLTEKMHARDFTVSALHGDMDQKERDVIMREFRSGSSRVLITTDLLVSLLMLFKNLPKVSFLGGRFLSNLCQLGLFGRVKDHTPQWAIPLSIVRYYFVAYMTGVKFF

SEQ ID NO: 48664 - protein, 56 aa, Homo sapiens
MDQKERDVIMREFRSGSSRVLITTDLLARGIDVQQVSLVINYDLPTNRENYIHRSR

SEQ ID NO: 48665 - protein, 702 aa, Homo sapiens
MFGQIQSPGYPDSYPSDSEVTWNITVPDGFRIKLYFMHFNLESSYLCEYDYVKVETEDQVLATFCGRETTDTEQTPGQEVVLSPGSFMSITFRSDFSNEERFTGFDAHYMAVDVDECKEREDEELSCDHYCHNYIGGYYCSCRFGYILHTDNRTCRVECSDNLFTQRTGVITSPDFPNPYPKSSECLYTIELEEGFMVNLQFEDIFDIEDHPEVPCPYDYIKIKVGPKVLGPFCGEKAPEPISTQSHSVLILFHSDNSGENRGWRLSYRAAGNECPELQPPVHGKIEPSQAKYFFKDQVLVSCDTGYKVLKDNVEMDTFQIECLKDGTWSNKIPTCKIVDCRAPGELEHGLITFSTRNNLTTYKSEIKYSCQEPYYKMLNNNTGIYTCSAQGVWMNKVLGRSLPTCLPECGQPSRSLPSLVKRIIGGRNAEPGLFPWQALIVVEDTSRVPNDKWFGSGALLSASWILTAAHVLRSQRRDTTVIPVSKEHVTVYLGLHDVRDKSGAVNSSAARVVLHPDFNIQNYNHDIALVQLQEPVPLGPHVMPVCLPRLEPEGPAPHMLGLVAGWGISNPNVTVDEIISSGTRTLSDVLQYVKLPVVPHAECKTSYESRSGNYSVTENMFCAGYYEGGKDTCLGDSGGAFVIFDDLSQRWVVQGLVSWGGPEECGSKQVYGVYTKVSNYVDWVWEQMGLPQSVVEPQVER

SEQ ID NO: 48666 - protein, 67 aa, Homo sapiens
MRHWEGLGRGSVPLLLRATSWVIPGPGAGLGLTRGLPRGRLGACVTSPPAGCGDYVGPLWPVRSASL

SEQ ID NO: 48667 - protein, 891 aa, Homo sapiens
MIPDLSEYKWIVPDIVWEIDEYIDFEKIRKALPSSEDLVKLAPDFDKIVESLSLLKDFFTSGHKLVSEVIGASDLLLLLGSPEETAFRATDRGSESDKHFRKGLLGELILLQQQIQEHEEEARRAAGQYSTSYAQQKRKVSDKEKIDQLQEELLHTQLKYQRILERLEKENKELRKLVLQKDDKGIHHRKLKKSLIDMYSEVLDVLSDYDASYNTQDHLPRVVVVGDQSAGKTSVLEMIAQARIFPRGSGEMMTRSPVKVTLSEGPHHVALFKDSSREFDLTKEEDLAALRHEIELRMRKNVKEGCTVSPETISLNVKGPGLQRMVLVDLPGVINTVTSGMAPDTKETIFSISKAYMQNPNAIILCIQDGSVDAERSIVTDLVSQMDPHGRRTIFVLTKVDLAEKNVASPSRIQQIIEGKLFPMKALGYFAVVTGKGNSSESIEAIREYEEEFFQNSKLLKTSMLKAHQVTTRNLSLAVSDCFWKMVRESVEQQADSFKATRFNLETEWKNNYPRLRELDRNELFEKAKNEILDEVISLSQVTPKHWEEILQQSLWERVSTHVIENIYLPAAQTMNSGTFNTTVDIKLKQWTDKQLPNKAVEVAWETLQEEFSRFMTEPKGKEHDDIFDKLKEAVKEESIKRHKWNDFAEDSLRVIQHNALEDRSISDKQQWDAAIYFMEEALQARLKDTENAIENMVGPDWKKRWLYWKNRTQEQCVHNETKNELEKMLKCNEEHPAYLASDEITTVRKNLESRGVEVDPSLIKDTWHQVYRRHFLKTALNHCNLCRRGFYYYQRHFVDSELECNDVVLFWRIQRMLAITANTLRQQLTNTEVRRLEKNVKEVLEDFAEDGEKKIKLLTGKRVQLAEDLKKVREIQEKLDAFIEALHQEK

SEQ ID NO: 48668 - protein, 836 aa, Homo sapiens
MIPDLSEYKWIVPDIVWEIDEYIDFEKIRKALPSSEDLVKLAPDFDKIVESLSLLKDFFTSGSPEETAFRATDRGSESDKHFRKVSDKEKIDQLQEELLHTQLKYQRILERLEKENKELRKLVLQKDDKGIHHRKLKKSLIDMYSEVLDVLSDYDASYNTQDHLPRVVVVGDQSAGKTSVLEMIAQARIFPRGSGEMMTRSPVKVTLSEGPHHVALFKDSSREFDLTKEEDLAALRHEIELRMRKNVKEGCTVSPETISLNVKGPGLQRMVLVDLPGVINTVTSGMAPDTKETIFSISKAYMQNPNAIILCIQDGSVDAERSIVTDLVSQMDPHGRRTIFVLTKVDLAEKNVASPSRIQQIIEGKLFPMKALGYFAVVTGKGNSSESIEAIREYEEEFFQNSKLLKTSMLKAHQVTTRNLSLAVSDCFWKMVRESVEQQADSFKATRFNLETEWKNNYPRLRELDRNELFEKAKNEILDEVISLSQVTPKHWEEILQQSLWERVSTHVIENIYLPAAQTMNSGTFNTTVDIKLKQWTDKQLPNKAVEVAWETLQEEFSRFMTEPKGKEHDDIFDKLKEAVKEESIKRHKWNDFAEDSLRVIQHNALEDRSISDKQQWDAAIYFMEEALQARLKDTENAIENMVGPDWKKRWLYWKNRTQEQCVHNETKNELEKMLKCNEEHPAYLASDEITTVRKNLESRGVEVDPSLIKDTWHQVYRRHFLKTALNHCNLCRRGFYYYQRHFVDSELECNDVVLFWRIQRMLAITANTLRQQLTNTEVRRLEKNVKEVLEDFAEDGEKKIKLLTGKRVQLAEDLKKVREIQEKLDAFIEALHQEK

SEQ ID NO: 48669 - protein, 873 aa, Homo sapiens [sequence omitted]

SEQ ID NO: 48670 - protein, 841 aa, Homo sapiens
MIPDLSEYKWIVPDIVWEIDEYIDFEKIRKALPSSEDLVKLAPDFDKIVESLSLLKDFFTSGSPEETAFRATDRGSESDKHFRKVSDKEKIDQLQEELLHTQSKIWKLKYQRILERLEKENKELRKLVLQKDDKGIHHRKLKKSLIDMYSEVLDVLSDYDASYNTQDHLPRVVVVGDQSAGKTSVLEMIAQARIFPRGSGEMMTRSPVKVTLSEGPHHVALFKDSSREFDLTKEEDLAALRHEIELRMRKNVKEGCTVSPETISLNVKGPGLQRMVLVDLPGVINTVTSGMAPDTKETIFSISKAYMQNPNAIILCIQDGSVDAERSIVTDLVSQMDPHGRRTIFVLTKVDLAEKNVASPSRIQQIIEGKLFPMKALGYFAVVTGKGNSSESIEAIREYEEEFFQNSKLLKTSMLKAHQVTTRNLSLAVSDCFWKMVRESVEQQADSFKATRFNLETEWKNNYPRLRELDRNELFEKAKNEILDEVISLSQVTPKHWEEILQQSLWERVSTHVIENIYLPAAQTMNSGTFNTTVDIKLKQWTDKQLPNKAVEVAWETLQEEFSRFMTEPKGKEHDDIFDKLKEAVKEESIKRHKWNDFAEDSLRVIQHNALEDRSISDKQQWDAAIYFMEEALQARLKDTENAIENMVGPDWKKRWLYWKNRTQEQCVHNETKNELEKMLKCNEEHPAYLASDEITTVRKNLESRGVEVDPSLIKDTWHQVYRRHFLKTALNHCNLCRRGFYYYQRHFVDSELECNDVVLFWRIQRMLAITANTLRQQLTNTEVRRLEKNVKEVLEDFAEDGEKKIKLLTGKRVQLAEDLKKVREIQEKLDAFIEALHQEK

SEQ ID NO: 48671 - protein, 1210 aa, Homo sapiens
MEIYGYNLSRWKLAIVSLGVICSGGFLLLLLYWMPEWRVKATCVRAAIKDCEVVLLRTTDEFKMWFCAKIRVLSLETYPVSSPKSMSNKLSNGHAVCLIENPTEENRHRISKYSQTESQQIRYFTHHSVKYFWNDTIHNFDFLKGLDEGVSCTSIYEKHSAGLTKGMHAYRKLLYGVNEIAVKVPSVFKLLIKEVLNPFYIFQLFSVILWSTDEYYYYALAIVVMSIVSIVSSLYSIRKQYVMLHDMVATHSTVRVSVCRVNEEIEEIFSTDLVPGDVMVIPLNGTIMPCDAVLINGTCIVNESMLTGESVPVTKTNLPNPSVDVKGIGDELYNPETHKRHTLFCGTTVIQTRFYTGELVKAIVVRTGFSTSKGQLVRSILYPKPTDFKLYRDAYLFLLCLVAVAGIGFIYTIINSILNEVQVGVIIIESLDIITITVPPALPAAMTAGIVYAQRRLKKIGIFCISPQRINICGQLNLVCFDKTGTLTEDGLDLWGIQRVENARFLSPEENVCNEMLVKSQFVACMATCHSLTKIEGVLSGDPLDLKMFEAIGWILEEATEEETALHNRIMPTVVRPPKQLLPESTPAGNQEMELFELPATYEIGIVRQFPFSSALQRMSVVARVLGDRKMDAYMKGAPEAIAGLCKPETVPVDFQNVLEDFTKQGFRVIALAHRKLESKLTWHKVQNISRDAIENNMDFMGLIIMQNKLKQETPAVLEDLHKANIRTVMVTGDSMLTAVSVARDCGMILPQDKVIIAEALPPKDGKVAKINWHYADSLTQCSHPSAIDPEAIPVKLVHDSLEDLQMTRYHFAMNGKSFSVILEHFQDLVPKLMLHGTVFARMAPDQKTQLIEALQNVDYFVGMCGDGANDCGALKRAHGGISLSELEASVASPFTSKTPSISCVPNLIREGRAALITSFCVFKFMALYSIIQYFSVTLLYSILSNLGDFQFLFIDLAIILVVVFTMSLNPAWKELVAQRPPSGLISGALLFSVLSQIIICIGFQSLGFFWVKQQPWYEVWHPKSDACNTTGSGFWNSSHVDNETELDEHNIQNYENTTVFFISSFQYLIVAIAFSKGKPFRQPCYKNYFFVFSVIFLYIFILFIMLYPVASVDQVLQIVCVPYQWRVTMLIIVLVNAFVSITVEESVDRWGKCCLPWALGCRKKTPKAKYMYLAQELLVDPEWPPKPQTTTEAKALVKENGSCQIITIT

SEQ ID NO: 48672 - protein, 776 aa, Homo sapiens [sequence omitted]

SEQ ID NO: 48673 - protein, 552 aa, Homo sapiens
MEILVEPVTLPCNHTLCKPCFQSTVEKASLCCPFCRRRVSSWTRYHTRRNSLVNVELWTIIQKHYPRECKLRASGQESEEVADDYQPVRLLSKPGELRREYEEEISKVAAERRASEEEENKASEEYIQRLLAEEEEEEKRQAEKRRRAMEEQLKSDEELARKLSIDINNFCEGSISASPLNSRKSDPVTPKSEKKSKNKQRNTGDIQKYLTPKSQFGSASHSEAVQEVRKDSVSKDIDSSDRKSPTGQDTEIEDMPTLSPQISLGVGEQGADSSIESPMPWLCACGAEWYHEGNVKTRPSNHGKELCVLSHERPKTRVPYSKETAVMPCGRTESGCAPTSGVTQTNGNNTGETENEESCLLISKEISKRKNQESSFEAVKDPCFSAKRRKVSPESSPDQEETEINFTQKLIDLEHLLFERHKQEEQDRLLALQLQKEVDKEQMVPNRQKGSPDEYHLRATSSPPDKVLNGQRKNPKDGNFKRQTHTKHPTPERGSRDKNRQVSLKMQLKQSVNRRKMPNSTRDHCKVSKSAHSLQPSISQKSVFQMFQRCTK

SEQ ID NO: 48674 - protein, 537 aa, Homo sapiens
MELDVSCNEIQTIPSQIGNLEALRDLNVRRNHLVHLPEELAELPLIRLDFSCNKITTIPVCYRNLRHLQTITLDNNPLQSPPAQICIKGKVHIFKYLNIQACKIAPDLPDYDRRPLGFGSCHEELYSSRPYGALDSGFNSVDSGDKRWSGNEPTDEFSDLPLRVAEITKEQRLRRESQYQENRGSLVVTNGGVEHDLDQIDYIDSCTAEEEEAEVRQPKGPDPDSLSSQFMAYIEQRRISHEGSPVKPVAIREFQKTEDMRRYLHQNRVPAEPSSLLSLSASHNQLSHTDLELHQRREQLVERTRREAQLAALQYEEEKIRTKQIQRDAVLDFVKQKASQSPQKQHPLLDGVDGECPFPSRRSQHTDDSALCMSLSGLNQVGCAATLPHSSAFTPLKSDDRPNALLSSPATETVHHSPAYSFPAAIQRNQPQRPESFLFRAGVRAETNKGHASPLPPSAAPTTDSTDSITGQNSRQREEELELIDQLRKHIEYRLKVSLPCDLGAALTDGVVLCHLANHVRPRSVPSIHVPSPAVVS

SEQ ID NO: 48675 - protein, 550 aa, Homo sapiens
MELDVSCNEIQTIPSQIGNLEALRDLNVRRNHLVHLPEELAELPLIRLDFSCNKITTIPVCYRNLRHLQTITLDNNPLQSPPAQICIKGKVHIFKYLNIQACKIAPDLPDYDRRPLGFGSCHEELYSSRPYGALDSGFNSVDSGDKRWSGNEPTDEFSDLPLRVAEITKEQRLRRESQYQENRGSLVVTNGGVEHDLDQIDYIDSCTAEEEEAEGSPVKPVAIREFQKTEDMRRYLHQNRVPAEPSSLLSLSASHNQLSHTDLELHQRREQLVERTRREAQLAALQYEEEKIRTKQIQRDAVLDFVKQKASQSPQKQHPLLDGVDGECPFPSRRSQHTDDSALCMSDDRPNALLSSPATETVHHSPAYSFPAAIQRNQPQRPESFLFRAGVRAETNKGHASPLPPSAAPTTDSTDSITGQNSRQREEELELIDQLRKHIEYRLKVSLPCDLGAALTDGVVLCHLANHVRPRSVPSIHVPSPAVPKLTMAKCRRNVENFLEACRKIGVPQEQLCLPLHILEEKGLSQVAVTVQALLELAPPKQQQHQLSAV

SEQ ID NO: 48676 - protein, 602 aa, Homo sapiens
MELDVSCNEIQTIPSQIGNLEALRDLNVRRNHLVHLPEELAELPLIRLDFSCNKITTIPVCYRNLRHLQTITLDNNPLQSPPAQICIKGKVHIFKYLNIQACKIAPDLPDYDRRPLGFGSCHEELYSSRPYGALDSGFNSVDSGDKRWSGNEPTDEFSDLPLRVAEITKEQRLRRESQYQENRGSLVVTNGGVEHDLDQIDYIDSCTAEEEEAEVRQPKGPDPDSLSSQFMAYIEQRRISHEGSPVKPVAIREFQKTEDMRRYLHQNRVPAEPSSLLSLSASHNQLSHTDLELHQRREQLVERTRREAQLAALQYEEEKIRTKQIQRDAVLDFVKQKASQSPQKQHPLLDGVDGECPFPSRRSQHTDDSALCMSLSGLNQVGCAATLPHSSAFTPLKSDDRPNALLSSPATETVHHSPAYSFPAAIQRNQPQRPESFLFRAGVRAETNKGHASPLPPSAAPTTDSTDSITGQNSRQREEELELIDQLRKHIEYRLKVSLPCDLGAALTDGVVLCHLANHVRPRSVPSIHVPSPAVPKLTMAKCRRNVENFLEACRKIGVPQEQLCLPLHILEEKGLSQVAVTVQALLELAPPKQQQHQLSAV

SEQ ID NO: 48677 - protein, 886 aa, Homo sapiens
MPYTTYLVEKGASHSFVAEAKPPTVTMPRIKALMTGSLPGFVDVIRNLNSPALLEDSVIRQAKAAGKRIVFYGDETWVKLFPKHFVEYDGTTSFFVSDYTEVDNNVTRHLDKVLKRGDWDILILHYLGLDHIGHISGPNSPLIGQKLSEMDSVLMKIHTSLQSKERETPLPNLLVLCGDHGMSETGSHGASSTEEVNTPLILISSAFERKPGDIRHPKHVQQTDVAATLAIALGLPIPKDSVGSLLFPVVEGRPMREQLRFLHLNTVQLSKLLQENVPSYEKDPGFEQFKMSERLHGNWIRLYLEEKHSEVLFNLGSKVLRQYLDALKTLSLSLSAQVAQYDIYSMMVLTLLLLSVPQALRRKAELEVPLSSPGFSLLFYLVILVLSAVHVIVCTSAESSCYFCGLSWLAAGGVMVLASALLCVIVSVLTNVLVGGNTPRKNPMHPSSRWSELDLLILLGTAGHVLSLGASSFVEEEHQTWYFLVNTLCLALSQETYRNYFLGDDGEPPCGLCVEQGHDGATAAWQDGPGCDVLERDKGHGSPSTSEVLRGREKWMVLASPWLILACCRLLRSLNQTGVQWAHRPDLGHWLTSSDHKAELSVLAALSLLVVFVLVQRGCSPVSKAALALGLLGVYCYRAAIGSVRFPWRPDSKDISKGIIEARFVYVFVLGILFTGTKDLLKSQVIAADFKLKTVGLWEIYSGLVLLAALLFRPHNLPVLAFSLLIQTLMTKFIWKPLRHDAAEITVMHYWFGQAFFYFQGNSNNIATVDISAGFVGLDTYVEIPAVLLTAFGTYAGPVLWASHLVHFLSSETRSGSALSHACFCYALICSIPVFTYIVLVTSLRYHLFIWSVFSPKLLYEGMHLLITAAVCVFFTAMDQTRLTQS

SEQ ID NO: 48678 - protein, 375 aa, Homo sapiens [sequence omitted]

SEQ ID NO: 48679 - protein, 835 aa, Homo sapiens
MSHEKCLKHVRIPCTSVAPSLVRVPVAHCFGPRGLHKRKFCAVCRKVLEAPALHCEVCELHLHPDCVPFACSDCRQCHQDGHQDHDTHHHHWREGNLPSGARCEVCRKTCGSSDVLAGVRCEWCGVQAHSLCSAALAPECGFGRLRSLVLPPACVRLLPGGFSKTQSFRIVEAAEPGEGGDGADGSAAVGPGRETQATPESGKQTLKIFDGDDAVRRSQFRLVTVSRLAGAEEVLEAALRAHHIPEDPGHLELCRLPPSSQACDAWAGGKAGSAVISEEGRSPGSGEATPEAWVIRALPRAQEVLKIYPGWLKVGVAYVSVRVTPKSTARSVVLEVLPLLGRQAESPESFQLVEVAMGCRHVQRTMLMDEQPLLDRLQDIRQMSVRQVSQTRFYVAESRDVAPHVSLFVGGLPPGLSPEEYSSLLHEAGATKGAVVLDVACFAEAERLYMLLKDMAVRGRLLTALVLPDLLHAKLPPDSCPLLVFVNPKSGGLKGRDLLCSFRKLLNPHQVFDLTNGGPLPGLHLFSQVPCFRVLVCGGDGTVGWVLGALEETRYRLACPEPSVAILPLGTGNDLGRVLRWGAGYSGEDPFSVLLSVDEADAVLMDRWTILLDAHEAGSAENDTADAEPPKIVQMSNYCGIGIDAELSLDFHQAREEEPGKFTSRLHNKGVYVRVGLQKISHSRSLHKQIRLQVERQEVELPSIEGLIFINIPSWGSGADLWGSDSDTRFEKPRMDDGLLEVVGVTGVVHMGQVQGGLRSGIRIAQGSYFRVTLLKATPVQVDGEPWVQAPGHMIISAAGPKVHMLRKAKQKPRRAGTTRDARADAAPAPESDPR

SEQ ID NO: 48680 - protein, 864 aa, Homo sapiens
MQSPCGCGLSSRPALEAAPHLCIEHRMSLQVLNDKNVSNEKNTENCDFLFSPPEVTGRSSVLRVSQKENVPPKNLAKAMKVTFQTPLRDPQTHRILSPSMASKLEAPFTQDDTLGLENSHPVWTQKENQQLIKEVDAKTTHGILQKPVEADTDLLGDASPAFGSGSSSESGPGALADLDCSSSSQSPGSSENQMVSPGKVSGSPEQAVEENLSSYSLDRRVTPASETLEDPCRTESQHKAETPHGAEEECKAETPHGAEEECRHGGVCAPAAVATSPPGAIPKEACGGAPLQGLPGEALGCPAGVGTPVPADGTQTLTCAHTSAPESTAPTNHLVAGRAMTLSPQEEVAAGQMASSSRSGPVKLEFDVSDGATSKRAPPPRRLGERSGLKPPLRKAAVRQQKAPQEVEEDDGRSGAGEDPPMPASRGSYHLDWDKMDDPNFIPFGGDTKSGCSEAQPPESPETRLGQPAAEQLHAGPATEEPGPCLSQQLHSASAEDTPVVQLAAETPTAESKERALNSASTSLPTSCPGSEPVPTHQQGQPALELKEESFRDPAEVLGTGAEVDYLEQFGTSSFKESALRKQSLYLKFDPLLRDSPGRPVPVATETSSMHGANETPSGRPREAKLVEFDFLGALDIPVPGPPPGVPAPGGPPLSTGPIVDLLQYSQKDLDAVVKATQEENRELRSRCEELHGKNLELGKIMDRFEEVVYQAMEEVQKQKELSKAEIQKVLKEKDQLTTDLNSMEKSFSDLFKRFEKQKEVIEGYRKNEESLKKCVEDYLARITQEGQRYQALKAHAEEKLQLANEEIAQVRSKAQAEALALQASLRKEQMRIQSLEKTVEQKTKENEELTRICDDLISKMEKI

SEQ ID NO: 48681 - protein, 46 aa, Homo sapiens
MEFGPGELDSVGSSSDADDHYSLQSGTGGDSGFGPHCRRLGRPALS

SEQ ID NO: 48682 - protein, 728 aa, Homo sapiens
MAPDLRQDFNMMEQKKRVSMILQSPAFCEELESMIQEQFKKGKNPTGLLALQQIADFMTTNVPNVYPAAPQGGMAALNMSLGMVTPVNDLRGSDSIAYDKGEKLLRCKLAAFYRLADLFGWSQLIYNHITTRVNSEQEHFLIVPFGLLYSEVTASSLVKINLQGDIVDRGSTNLGVNQAGFTLHSAIYAARPDVKCVVHIHTPAGAAVSAMKCGLLPISPEALSLGEVAYHDYHGILVDEEEKVLIQKNLGPKSKVLILRNHGLVSVGESVEEAFYYIHNLVVACEIQVRTLASAGGPDNLVLLNPEKYKAKSRSPGSPVGEGTGSPPKWQIGEQEFEALMRMLDNLGYRTGYPYRYPALREKSKKYSDVEVPASVTGYSFASDGDSGTCSPLRHSFQKQQREKTRWLNSGRGDEASEEGQNGSSPKSKTKVWTNITHDHVKPLLQSLSSGVCVPSCITNCLWTKEDGHRTSTSAVPNLFVPLNTNPKEVQEMRNKIREQNLQDIKTAGPQSQVLCGVVMDRSLVQGELVTASKAIIEKEYQPHVIVSTTGPNPFTTLTDRELEEYRREVERKQKGSEENLDEAREQKEKSPPDQPAVPHPPPSTPIKLEEDLVPEPTTGDDSDAATFKPTLPDLSPDEPSEALGFPMLEKEEEAHRPPSPTEAPTEASPEPAPDPAPVAEEAAPSAVEEGAAADPGSDGSPGKSPSKKKKKFRTPSFLKKSKKKSDS

SEQ ID NO: 48683 - protein, 622 aa, Homo sapiens
MAPDLRQDFNMMEQKKRVSMILQSPAFCEELESMIQEQFKKGKNPTGLLALQQIADFMTTNVPNVYPAAPQGGMAALNMSLGMVTPVNDLRGSDSIAYDKGEKLLRCKLAAFYRLADLFGWSQLIYNHITTRVNSEQEHFLIVPFGLLYSEVTASSLVKINLQGDIVDRGSTNLGVNQAGFTLHSAIYAARPDVKCVVHIHTPAGAAVSAMKCGLLPISPEALSLGEVAYHDYHGILVDEEEKVLIQKNLGPKSKVLILRNHGLVSVGESVEEAFYYIHNLVVACEIQVRTLASAGGPDNLVLLNPEKYKAKSRSPGSPVGEGTGSPPKWQIGEQEFEALMRMLDNLGYRTGYPYRYPALREKSKKYSDVEVPASVTGYSFASDGDSGTCSPLRHSFQKQQREKTRWLNSGRGDEASEEGQNGSSPKSKTKWTKEDGHRTSTSAVPNLFVPLNTNPKEVQEMRNKIREQNLQDIKTAGPQSQVLCGVVMDRSLVQDAPLSDCTETIEGLELTEQTFSPAKSLSFRKGELVTASKAIIEKEYQPHVIVSTTGPNPFTTLTDRELEEYRREVERKQKGSEENLDEAREQKEKSPPDQPAVPHPPPSTPIKLEEGDGCAREYLLP

SEQ ID NO: 48684 - protein, 622 aa, Homo sapiens
MAPDLRQDFNMMEQKKRVSMILQSPAFCEELESMIQEQFKKGKNPTGLLALQQIADFMTTNVPNVYPAAPQGGMAALNMSLGMVTPVNDLRGSDSIAYDKGEKLLRCKLAAFYRLADLFGWSQLIYNHITTRVNSEQEHFLIVPFGLLYSEVTASSLVKINLQGDIVDRGSTNLGVNQAGFTLHSAIYAARPDVKCVVHIHTPAGAAVSAMKCGLLPISPEALSLGEVAYHDYHGILVDEEEKVLIQKNLGPKSKVLILRNHGLVSVGESVEEAFYYIHNLVVACEIQVRTLASAGGPDNLVLLNPEKYKAKSRSPGSPVGEGTGSPPKWQIGEQEFEALMRMLDNLGYRTGYPYRYPALREKSKKYSDVEVPASVTGYSFASDGDSGTCSPLRHSFQKQQREKTRWLNSGRGDEASEEGQNGSSPKSKTKVWTNITHDHVKPLLQSLSSGVCVPSCITNCLWTKEDGHRTSTSAVPNLFVPLNTNPKEVQEMRNKIREQNLQDIKTAGPQSQVLCGVVMDRSLVQGELVTASKAIIEKEYQPHVIVSTTGPNPFTTLTDRELEEYRREVERKQKGSEENLDEAREQKEKSPPDQPAVPHPPPSTPIKLEEGDGCAREYLLP

SEQ ID NO: 48685 - protein, 697 aa, Homo sapiens
MAPDLRQDFNMMEQKKRVSMILQSPAFCEELESMIQEQFKKGKNPTGLLALQQIADFMTTNVPNVYPAAPQGGMAALNMSLGMVTPVNDLRGSDSIAYDKGEKLLRCKLAAFYRLADLFGWSQLIYNHITTRVNSEQEHFLIVPFGLLYSEVTASSLVKINLQGDIVDRGSTNLGVNQAGFTLHSAIYAARPDVKCVVHIHTPAGAAVSAMKCGLLPISPEALSLGEVAYHDYHGILVDEEEKVLIQKNLGPKSKVLILRNHGLVSVGESVEEAFYYIHNLVVACEIQVRTLASAGGPDNLVLLNPEKYKAKSRSPGSPVGEGTGSPPKWQIGEQEFEALMRMLDNLGYRTGYPYRYPALREKSKKYSDVEVPASVTGYSFASDGDSGTCSPLRHSFQKQQREKTRWLNSGRGDEASEEGQNGSSPKSKTKWTKEDGHRTSTSAVPNLFVPLNTNPKEVQEMRNKIREQNLQDIKTAGPQSQVLCGVVMDRSLVQGELVTASKAIIEKEYQPHVIVSTTGPNPFTTLTDRELEEYRREVERKQKGSEENLDEAREQKEKSPPDQPAVPHPPPSTPIKLEEDLVPEPTTGDDSDAATFKPTLPDLSPDEPSEALGFPMLEKEEEAHRPPSPTEAPTEASPEPAPDPAPVAEEAAPSAVEEGAAADPGSDGSPGKSPSKKKKKFRTPSFLKKSKKKSDS

SEQ ID NO: 48686 - protein, 591 aa, Homo sapiens
MAPDLRQDFNMMEQKKRVSMILQSPAFCEELESMIQEQFKKGKNPTGLLALQQIADFMTTNVPNVYPAAPQGGMAALNMSLGMVTPVNDLRGSDSIAYDKGEKLLRCKLAAFYRLADLFGWSQLIYNHITTRVNSEQEHFLIVPFGLLYSEVTASSLVKINLQGDIVDRGSTNLGVNQAGFTLHSAIYAARPDVKCVVHIHTPAGAAVSAMKCGLLPISPEALSLGEVAYHDYHGILVDEEEKVLIQKNLGPKSKVLILRNHGLVSVGESVEEAFYYIHNLVVACEIQVRTLASAGGPDNLVLLNPEKYKAKSRSPGSPVGEGTGSPPKWQIGEQEFEALMRMLDNLGYRTGYPYRYPALREKSKKYSDVEVPASVTGYSFASDGDSGTCSPLRHSFQKQQREKTRWLNSGRGDEASEEGQNGSSPKSKTKWTKEDGHRTSTSAVPNLFVPLNTNPKEVQEMRNKIREQNLQDIKTAGPQSQVLCGVVMDRSLVQGELVTASKAIIEKEYQPHVIVSTTGPNPFTTLTDRELEEYRREVERKQKGSEENLDEAREQKEKSPPDQPAVPHPPPSTPIKLEEGDGCAREYLLP

SEQ ID NO: 48687 - protein, 3014 aa, Homo sapiens
MELFLLCSDDAESDVRMVADECLNKVIKALMDSNLPRLQLELYKEIKKNGAPRSLRAALWRFAELAHLVRPQKCRPYLVNLLPCLTRTSKRPEESVQETLAAAVPKIMASFGNFANDNEIKVLLKAFIANLKSSSPTIRRTAAGSAVSICQHSRRTQYFYSWLLNVLLGLLVPVEDEHSTLLILGVLLTLRYLVPLLQQQVKDTSLKGSFGVTRKEMEVSPSAEQLVQVYELTLHHTQHQDHNVVTGALELLQQLFRTPPPELLQTLTAVGGIGQLTAAKEESGGRSRSGSIVELIAGGGSSCSPVLSRKQKGKVLLGEEEALEDDSESRSDVSSSALTASVKDEISGELAASSGVSTPGSAGHDIITEQPRSQHTLQADSVDLASCDLTSSATDGDEEDILSHSSSQVSAVPSDPAMDLNDGTQASSPISDSSQTTTEGPDSAVTPSDSSEIVLDGTDNQYLGLQIGQPQDEDEEATGILPDEASEAFRNSSMALQQAHLLKNMSHCRQPSDSSVDKFVLRDEATEPGDQENKPCRIKGDIGQSTDDDSAPLVHCVRLLSASFLLTGGKNVLVPDRDVRVSVKALALSCVGAAVALHPESFFSKLYKVPLDTTEYPEEQYVSDILNYIDHGDPQVRGATAILCGTLICSILSRSRFHVGDWMGTIRTLTGNTFSLADCIPLLRKTLKDESSVTCKLACTAVRNCVMSLCSSSYSELGLQLIIDVLTLRNSSYWLVRTELLETLAEIDFRLVSFLEAKAENLHRGAHHYTGLLKLQERVLNNVVIHLLGDEDPRVRHVAAASLIRLVPKLFYKCDQGQADPVVAVARDQSSVYLKLLMHETQPPSHFSVSTITRIYRGYNLLPSITDVTMENNLSRVIAAVSHELITSTTRALTFGCCEALCLLSTAFPVCIWSLGWHCGVPPLSASDESRKSCTVGMATMILTLLSSAWFPLDLSAHQDALILAGNLLAASAPKSLRSSWASEEEANPAATKQEEVWPALGDRALVPMVEQLFSHLLKVINICAHVLDDVAPGPAIKAALPSLTNPPSLSPIRRKGKEKEPGEQASVPLSPKKGSEASAASRQSDTSGPVTTSKSSSLGSFYHLPSYLKLHDVLKATHANYKVTLDLQNSTEKFGGFLRSALDVLSQILELATLQDIGKCVEEILGYLKSCFSREPMMATVCVQQLLKTLFGTNLASQFDGLSSNPSKSQGRAQRLGSSSVRPGLYHYCFMAPYTHFTQALADASLRNMVQAEQENDTSGWFDVLQKVSTQLKTNLTSVTKNRADKNAIHNHIRLFEPLVIKALKQYTTTTCVQLQKQVLDLLAQLVQLRVNYCLLDSDQVFIGFVLKQFEYIEVGQFRESEAIIPNIFFFLVLLSYERYHSKQIIGIPKIIQLCDGIMASGRKAVTHAIPALQPIVHDLFVLRGTNKADAGKELETQKEVVVSMLLRLIQYHQVLEMFILVLQQCHKENEDKWKRLSRQIADIILPMLAKQQMHIDSHEALGVLNTLFEILAPSSLRPVDMLLRSMFVTPNTMASVSTVQLWISGILAILRVLISQSTEDIVLSRIQELSFSPYLISCTVINRLRDGDSTSTLEEHSEGKQIKNLPEETFSRFLLQLVGILLEDIVTKQLKVEMSEQQHTFYCQELGTLLMCLIHIFKSGMFRRITAAATRLFRSDGCGGSFYTLDSLNLRARSMITTHPALVLLWCQILLLVNHTDYRWWAEVQQTPKRHSLSSTKLLSPQMSGEEEDSDLAAKLGMCNREIVRRGALILFCDYVCQNLHDSEHLTWLIVNHIQDLISLSHEPPVQDFISAVHRNSAASGLFIQAIQSRCENLSTPTMLKKTLQCLEGIHLSQSGAVLTLYVDRLLCTPFRVLARMVDILACRRVEMLLAANLQSSMAQLPMEELNRIQEYLQSSGLAQRHQRLYSLLDRFRLSTMQDSLSPSPPVSSHPLDGDGHVSLETVSPDKDWYVHLVKSQCWTRSDSALLEGAELVNRIPAEDMNAFMMNSEFNLSLLAPCLSLGMSEISGGQKSALFEAAREVTLARVSGTVQQLPAVHHVFQPELPAEPAAYWSKLNDLFGDAALYQSLPTLARALAQYLVVVSKLPSHLHLPPEKEKDIVKFVVATLEALSWHLIHEQIPLSLDLQAGLDCCCLALQLPGLWSVVSSTEFVTHACSLIYCVHFILEAVAVQPGEQLLSPERRTNTPKAISEEEEEVDPNTQNPKYITAACEMVAEMVESLQSVLALGHKRNSGVPAFLTPLLRNIIISLARLPLVNSYTRVPPLVWKLGWSPKPGGDFGTAFPEIPVEFLQEKEVFKEFIYRINTLGWTSRTQFEETWATLLGVLVTQPLVMEQEESPPEEDTERTQINVLAVQAITSLVLSAMTVPVAGNPAVSCLEQQPRNKPLKALDTRFGRKLSIIRGIVEQEIQAMVSKRENIATHHLYQAWDPVPSLSPATTGALISHEKLLLQINPERELGSMSYKLGQVSIHSVWLGNSITPLREEEWDEEEEEEADAPAPSSPPTSPVNSRKHRAGVDIHSCSQFLLELYSRWILPSSSARRTPAILISEVVRSLLVVSDLFTERNQFELMYVTLTELRRVHPSEDEILAQYLVPATCKAAAVLGMDKAVAEPVSRLLESTLRSSHLPSRVGALHGVLYVLECDLLDDTAKQLIPVISDYLLSNLKGIAHCVNIHSQQHVLVMCATAFYLIENYPLDVGPEFSASIIQMCGVMLSGSEESTPSIIYHCALRGLERLLLSEQLSRLDAESLVKLSVDRVNVHSPHRAMAALGLMLTCMYTGKEKVSPGRTSDPNPAAPDSESVIVAMERVSVLFDRIRKGFPCEARVVARILPQFLDDFFPPQDIMNKVIGEFLSNQQPYPQFMATVVYKVFQTLHSTGQSSMVRDWVMLSLSNFTQRAPVAMATWSLSCFFVSASTSPWVAAILPHVISRMGKLEQVDVNLFCLVATDFYRHQIEEELDRRAFQSVLEVVAAPGSPYHRLLTCLRNVHKVTTC

SEQ ID NO: 48688 - protein, 262 aa, Homo sapiens
MKNSLKVHNESILDQVWNIFSEASNSEPVNKEQDQRPLHPVANPHAEISTKVPASKVKDAVEQQGEVKKNKRERKEERQKKRKREKKELKLENHQENSRNQKPKKRKKGQEADLEAGGEEVPEANGSAGKRSKKKKQRKDSASEEEARVGAGKRKRRHSEVETDSKKKKMKLPEHPEGGEPEDDEAPAKGKFNWKGTIKAILKQAPDNEITIKKLRKKVLAQYYTVTDEHHRSEEELLVIFNKKISKNPTFKLLKDKVKLVK

SEQ ID NO: 48689 - protein, 232 aa, Homo sapiens
MRTCSEAIQQLRTEAHKEIHSQQVKEHRTAVLDFIEDYLKRVCKLYSEQRAIRVKRVVDKKRLSKLEPEPNTKTRESTSSEKVSQSPSKDSEENPATEERPEKILAETQPELGTWGDGKGEDELSPEEIQMFEQENQRLIGEMNSLFDEVRQIEGRVVEISRLQEIFTEKVLQQEAEIDSIHQLVVGATENIKEGNEDIREAIKNNAGFRVWILFFLVMCSFSLLFLDWYDS

SEQ ID NO: 48690 - protein, 50 aa, Homo sapiens
MRTCSEAIQQLRTEAHKEIHSQQVKEHRTAVLDFIEDYLKSISFSFKGQM

SEQ ID NO: 48691 - protein, 43 aa, Homo sapiens
MRRPPRKLAPHQGGGREKCRCRRTRKLLMNVSRLPTAISQHSP

SEQ ID NO: 48692 - protein, 306 aa, Homo sapiens
MWCSRKVRDLWWQGIPPSVRGKVWSLAIGNELNITHELFDICLARAKERWRSLSTGGSEVENEDAGFSAADREASLELIKLDISRTFPNLCIFQQGGPYHDMLHSILGAYTCYRPDVGYVQGMSFIAAVLILNLDTADAFIAFSNLLNKPCQMAFFRVDHGLMLTYFAAFEVFFEENLPKLFAHFKKNNLTPDIYLIDWIFTLYSKSLPLDLACRIWDVFCRDGEEFLFRTALGILKLFEDILTKMDFIHMAQFLTRLPEDLPAEELFASIATIQMQSRNKKWAQVLTALQKDSREMEKGSPSLRH

SEQ ID NO: 48693 - protein, 174 aa, Homo sapiens
MGQSEQKADPPATEKTLLEEKVKLEEQLKETVEKYKRALADTENLRQRSQKLVEEAKLYGIQAFCKDLLEVADVLEKATQCVPKEEIKDDNPHLKNLYEGLVMTEVQIQKVFTKHGLLKLNPVGAKFDPYEHEALFHTPVEGKEPGTVALVSKVGYKLHGRTLRPALVGVVKEA

SEQ ID NO: 48694 - protein, 1009 aa, Homo sapiens
MVHWTGENSSVILILTKYYHADMGKVLESSLWRSSDFGTSYTKLTLQPGVTTVIDNFYICPTNKRKVILVSSSLSDRDQSLFLSADEGATFQKQPIPFFVETLIFHPKEEDKVLAYTKESKLYVSSDLGKKWTLLQERVTKDHVFWSVSGVDADPDLVHVEAQDLGGDFRYVTCAIHNCSEKMLTAPFAGPIDHGSLTVQDDYIFFKATSANQTKYYVSYRRNEFVLMKLPKYALPKDLQIISTDESQVFVAVQEWYQMDTYNLYQSDPRGVRYALVLQDVRSSRQAEESVLIDILEVRGVKGVFLANQKIDGKVMTLITYNKGRDWDYLRPPSMDMNGKPTNCKPPDCHLHLHLRWADNPYVSGTVHTKDTAPGLIMGAGNLGSQLVEYKEEMYITSDCGHTWRQVFEEEHHILYLDHGGVIVAIKDTSIPLKILKFSVDEGLTWSTHNFTSTSVFVDGLLSEPGDETLVMTVFGHISFRSDWELVKVDFRPSFSRQCGEEDYSSWELSNLQGDRCIMGQQRSFRKRKSTSWCIKGRSFTSALTSRVCECRDSDFLCDYGFERSSSSESSTNKCSANFWFNPLSPPDDCALGQTYTSSLGYRKVVSNVCEGGVDMQQSQVQLQCPLTPPRGLQVSIQGEAVAVRPGEDVLFVVRQEQGDVLTTKYQVDLGDGFKAMYVNLTLTGEPIRHRYESPGIYRVSVRAENTAGHDEAVLFVQVNSPLQALYLEVVPVIGLNQEVNLTAVLLPLNPNLTVFYWWIGHSLQPLLSLDNSVTTRFSDTGDVRVTVQAACGNSVLQDSRVLRVLDQFQVMPLQFSKELDAYNPNTPEWREDVGLVVTRLLSKETSVPQELLVTVVKPGLPTLADLYVLLPPPRPTRKRSLSSDKRLAAIQQVLNAQKISFLLRGGVRVLVALRDTGTGAEQLGGGGGYWAVVVLFVIGLFAAGAFILYKFKRKRPGRTVYAQMHNEKEQEMTSPVSHSEDVQGAVQGNHSGVVLSINSREMHSYLVS

SEQ ID NO: 48695 - protein, 1020 aa, Homo sapiens
MTIATCAKCKSVHKISLQDLQKGTGKDGMYVCFQCSLGAAPPNFHFVSNNSSATHVGNKTENFSSSVNSKFKVRNFKPGKYYCDKCRFSTKDPLQYKKHTLQHEEIKFICSHCSYISYTKGEFQRHLVKHTGIFPYQCEYCDYGAIRNDYIVKHTKRVHERAGAKRPVKAVAKLEPKRTGTSKQNPELLKASNPRTTFQNKWSDQLSGFSLHANKDKMHNIMLLPEPKEYQKDVVCIPNKMTLSEPNEVNLFENKNVEVEVLSPAKEPVQPGMPLTVVAPAELVVPANCLAQLIDVKVVNGTQQLVLKLFPLEENNCLEAGRDNGGNSERMVKEKGSNEQEKVLSAEKTKSLTVDGNVGKLVGIDSFQPSVQKQLKNVKWVRSYDFIMPNSSVHNNGKSFINSETIEDFQKKNNLYPHRTAFPSVALKGHSLASVFKNSVLRSLGAASNPFPYKAAVCFAESGRNLHSSSQQLLPFAASPATCSFSGEKGLLPVSENDLESTSKVNIPVKVVSSNRKQEDNQTEEHKAVSTVGQISSQHKSEYLHINITGEDRSQQPGDKPLELKNSERTNNTNDGPVISSVFSLSSGSENVPEGIKWNSSTSKIKSIELLRRKIAQLIESCGKPSSLASNSAHRRSVGQASKGTSKATSEGIQEINVSLTGLGHSTGTLQKPPNDGGITGNRQLTHQQIYPHFADGSNRKTKSRVARKAHVATPVLIPKGAVLRVLNSSENAHIIEATCEAPVSIPCSERQLIKPVPFCPVRQADSDLQPLRSERGPIDMSPNIETPLRPKLRKESAVCSTIHRKTGLLYGQQGSSELNKQGRLLSRSLSISRNKTKQVHLSRKKNKIQAEPSRCLKDPSIFQVARQLRLIAAKPDQLIKCPRRNQPVIVLNHPDVDSPEVTNVMKVINKYKGNVLKVVLSERTRCQLGIRRHHVRLTYQNAEEASQIKRQMMLKMKLKKVHKNNYQVVDSLPDDSSQCVFKCWFCGRLYEDQEEWMSHGQRHLIEATRDWDVLSSKGK

SEQ ID NO: 48696 - protein, 2996 aa, Homo sapiens
MIVNHLKSQGLFDQFRRDCLADVDTKPAYQNLRQRVDNFVANHLATHTWSPHLNKNQLRNNIRQQVLKSGMLESGIDRIISQVVDPKINHTFRPQVEKAVHEFLATLNHKEEGSGNTAPDDEKPDTSLITQGVPTPGPSANVANDAMSILETITSLNQEASAARASTETSNAKTSERASKKLPSQPTTDTSTDKERTSEDMADKEKSTADSGGEGLETAPKSEEFSDLPCPVEEIKNYTKEHNNLILLNKDVQQESSEQKNKSTDKGEKKPDSNEKGERKKEKKEKTEKKFDHSKKSEDTQKVKDEKQAKEKEVESLKLPSEKNSNKAKTVEGTKEDFSLIDSDVDGLTDITVSSVHTSDLSSFEEDTEEEVVTSDSMEEGEITSDDEEKNKQNKTKTQTSDSSEGKTKSVRHAYVHKPYLYSKYYSDSDDELTVEQRRQSIAKEKEERLLRRQINREKLEEKRKQKAEKTKSSKTKGQGRSSVDLEESSTKSLEPKAARIKEVLKERKVLEKKVALSKKRKKDSRNVEENSKKKQQYEEDSKETLKTSEHCEKEKISSSKELKHVHAKSEPSKPARRLSESLHVVDENKNESKLEREHKRRTSTPVIMEGVQEETDTRDVKRQVERSEICTEEPQKQKSTLKNEKHLKKDDSETPHLKSLLKKEVKSSKEKPEREKTPSEDKLSVKHKYKGDCMHKTGDETELHSSEKGLKVEENIQKQSQQTKLSSDDKTERKSKHRNERKLSVLGKDGKPVSEYIIKTDENVRKENNKKERRLSAEKTKAEHKSRRSSDSKIQKDSLGSKQHGITLQRRSESYSEDKCDMDSTNMDSNLKPEEVVHKEKRRTKSLLEEKLVLKSKSKTQGKQVKVVETELQEGATKQATTPKPDKEKNTEENDSEKQRKSKVEDKPFEETGVEPVLETASSSAHSTQKDSSHRAKLPLAKEKYKSDKDSTSTRLERKLSDGHKSRSLKHSSKDIKKKDENKSDDKDGKEVDSSHEKARGNSSLMEKKLSRRLCENRRGSLSQEMAKGEEKLAANTLSTPSGSSLQRPKKSGDMTLIPEQEPMEIDSEPGVENVFEVSKTQDNRNNNSQQDIDSENMKQKTSATVQKDELRTCTADSKATAPAYKPGRGTGVNSNSEKHADHRSTLTKKMHIQSAVSKMNPGEKEPIHRGTTEVNIDSETVHRMLLSAPSENDRVQKNLKNTAAEEHVAQGDATLEHSTNLDSSPSLSSVTVVPLRESYDPDVIPLFDKRTVLEGSTASTSPADHSALPNQSLTVRESEVLKTSDSKEGGEGFTVDTPAKASITSKRHIPEAHQATLLDGKQGKVIMPLGSKLTGVIVENENITKEGGLVDMAKKENDLNAEPNLKQTIKATVENGKKDGIAVDHVVGLNTEKYAETVKLKHKRSPGKVKDISIDVERRNENSEVDTSAGSGSAPSVLHQRNGQTEDVATGPRRAEKTSVATSTEGKDKDVTLSPVKAGPATTTSSETRQSEVALPCTSIEADEGLIIGTHSRNNPLHVGAEASECTVFAAAEEGGAVVTEGFAESETFLTSTKEGESGECAVAESEDRAADLLAVHAVKIEANVNSVVTEEKDDAVTSAGSEEKCDGSLSRDSEIVEGTITFISEVESDGAVTSAGTEIRAGSISSEEVDGSQGNMMRMGPKKETEGTVTCTGAEGRSDNFVICSVTGAGPREERMVTGAGVVLGDNDAPPGTSASQEGDGSVNDGTEGESAVTSTGITEDGEGPASCTGSEDSSEGFAISSESEENGESAMDSTVAKEGTNVPLVAAGPCDDEGIVTSTGAKEEDEEGEDVVTSTGRGNEIGHASTCTGLGEESEGVLICESAEGDSQIGTVVEHVEAEAGAAIMNANENNVDSMSGTEKGSKDTDICSSAKGIVESSVTSAVSGKDEVTPVPGGCEGPMTSAASDQSDSQLEKVEDTTISTGLVGGSYDVLVSGEVPECEVAHTSPSEKEDEDIITSVENEECDGLMATTASGDITNQNSLAGGKNQGKVLIISTSTTNDYTPQVSAITDVEGGLSDALRTEENMEGTRVTTEEFEAPMPSAVSGDDSQLTASRSEEKDECAMISTSIGEEFELPISSATTIKCAESLQPVAAAVEERATGPVLISTADFEGPMPSAPPEAESPLASTSKEEKDECALISTSIAEECEASVSGVVVESENERAGTVMEEKDGSGIISTSSVEDCEGPVSSAVPQEEGDPSVTPAEEMGDTAMISTSTSEGCEAVMIGAVLQDEDRLTITRVEDLSDAAIISTSTAECMPISASIDRHEENQLTADNPEGNGDLSATEVSKHKVPMPSLIAENNCRCPGPVRGGKEPGPVLAVSTEEGHNGPSVHKPSAGQGHPSAVCAEKEEKHGKECPEIGPFAGRGQKESTLHLINAEEKNVLLNSLQKEDKSPETGTAGGSSTASYSAGRGLEGNANSPAHLRGPEQTSGQTAKDPSVSIRYLAAVNTGAIKADDMPPVQGTVAEHSFLPAEQQGSEDNLKTSTTKCITGQESKIAPSHTMIPPATYSVALLAPKCEQDLTIKNDYSGKWTDQASAEKTGDDNSTRKSFPEEGDIMVTVSSEENVCDIGNEESPLNVLGGLKLKANLKMEAYVPSEEEKNGEILAPPESLCGGKPSGIAELQREPLLVNESLNVENSGFRTNEEIHSESYNKGEISSGRKDNAEAISGHSVEADPKEVEEEERHMPKRKRKQHYLSSEDEPDDNPDVLDSRIETAQRQCPETEPHDTKEENSRDLEELPKTSSETNSTTSRVMEEKDEYSSSETTGEKPEQNDDDTIKSQEEDQPIIIKRKRGRPRKYPVETTLKMKDDSKTDTGIVTVEQSPSSSKLKVMQTDESNKETANLQERSISNDDGEEKIVTSVRRRGRKPKRSLTVSDDAESSEPERKRQKSVSDPVEDKKEQESDEEEEEEEEDEPSGATTRSTTRSEAQRSKTQLSPSIKRKREVSPPGARTRGQQRVEEAPVKKAKR

SEQ ID NO: 48697 - protein, 713 aa, Homo sapiens
MESPNHPLLNSPSNLLPGGALGAGAFSSLQSPDLPHPGGGGGGGGGGPPGGGGGGGSASPPPLPGFGTPWSVQTASPPPQPQQPPPTQPQQQPPPPQQPPQPQPQPPGSSATTPGGGSGGSLSAMPPPSPDSENGFYPGLPSSMNPAFFPSFSPVSPHGCTGLSVPTSGGGGGGFGGPFSATAVPPPPPPAMNIPQQQPPPPAAPQQPQSRRSPVSPQLQQQHQAAAAAFLQQRNSYNHHQPLLKQSPWSNHQSSGWGTGSMSWGAMHGRDHRRTGNMGIPGTMNQISPLKKPFSGNVIAPPKFTRSTPSLTPKSWIEDNVFRTDNNSNTLLPLQVRSSLQLPAWGSDSLQDSWCTAAGTSRIDQDRSRMYDSLNMHSLENSLIDIMRAEHDPLKGRLSYPHPGTDNLLMLNGRSSLFPIDDGLLDDGHSDQVGVLNSPTCYSAHQNGERIERFSRKVFVGGLPPDIDEDEITASFRRFGPLVVDWPHKAESKSYFPPKGYAFLLFQEESSVQALIDACIEEDGKLYLCVSSPTIKDKPVQIRPWNLSDSDFVMDGSQPLDPRKTIFVGGVPRPLRAVELAMIMDRLYGGVCYAGIDTDPELKYPKGAGRVAFSNQQSYIAAISARFVQLQHGDIDKRVEVKPYVLDDQMCDECQGARCGGKFAPFFCANVTCLQYYCEFCWANIHSRAGREFHKPLVKEGADRPRQIHFRWN

SEQ ID NO: 48698 - protein, 721 aa, Homo sapiens
MESPNHPLLNSPSNLLPGGALGAGAFSSLQSPDLPHPGGGGGGGGGGPPGGGGGGGSASPPPLPGFGTPWSVQTASPPPQPQQPPPTQPQQQPPPPQQPPQPQPQPPGSSATTPGGGSGGSLSAMPPPSPDSENGFYPGLPSSMNPAFFPSFSPVSPHGCTGLSVPTSGGGGGGFGGPFSATAVPPPPPPAMNIPQQQPPPPAAPQQPQSRRSPVSPQLQQQHQAAAAAFLQQRNSYNHHQPLLKQSPWSNHQSSGWGTGSMSWGAMHGRDHRRTGNMGIPGTMNQISPLKKPFSGNVIAPPKFTRSTPSLTPKSWIEDNVFRTDNNSNTLLPLQVRSSLQLPAWGSDSLQDSWCTAAGTSRIDQDRSRMYDSLNMHSLENSLIDIMRAEHDPLKGRLSYPHPGTDNLLMLNARSYGRRRGRSSLFPIDDGLLDDGHSDQVGVLNSPTCYSAHQNGERIERFSRKVFVGGLPPDIDEDEITASFRRFGPLVVDWPHKAESKSYFPPKGYAFLLFQEESSVQALIDACIEEDGKLYLCVSSPTIKDKPVQIRPWNLSDSDFVMDGSQPLDPRKTIFVGGVPRPLRAVELAMIMDRLYGGVCYAGIDTDPELKYPKGAGRVAFSNQQSYIAAISARFVQLQHGDIDKRVEVKPYVLDDQMCDECQGARCGGKFAPFFCANVTCLQYYCEFCWANIHSRAGREFHKPLVKEGADRPRQIHFRWN

SEQ ID NO: 48699 - protein, 1571 aa, Homo sapiens
MVSEKSHLGNPQEPVQEEPKTRLLSMTVRRGPRSLPPIPSTSRTGFAEFSMRGRMREKLQAARSKAESALLQEIPTPRPRRLRSPSKKELETEFGTEPGKEVERTQQEVDSQSYSRVKFHDSARKIKPKPQVPPGFPSAEEAYNFFTFNFDPEPEGSEEKPKARHRAGTNQEEEEGEEEEPPAQGGGKEMDEEELLNGDDAEDFLLGLDHVADDFVAVRPADYESIHDRLQMEREMLFIPSRQTVPTYKKLPENVQPRFLEDEGLYTGVRPEVARTNQNIMENRLLMQDPERRWFGDDGRILALPNPIKPFPSRPPVLTQEQSIKAELETLYKKAVKYVHSSQHVIRSGDPPGNFQLDIDISGLIFTHHPCFSREHVLAAKLAQLYDQYLARHQRNKAKFLTDKLQALRNAVQTGLDPEKPHQSLDTIQKTINEYKSEIRQTRKFRDAEQEKDRTLLKTIIKVWKEMKSLREFQRFTNTPLKLVLRKEKADQKADEEAYEAEIQAEISELLEEHTEEYAQKMEEYRTSLQQWKAWRKVQRAKKKKRKQAAEEHPGDEIAEPYPEEDLVKPSPPEPTDRAVIEQEVRERAAQSRRRPWEPTLVPELSLAGSVTPNDQCPRAEVSRREDVKKRSVYLKVLFNNKEVSRTVSRPLGADFRVHFGQIFNLQIVNWPESLTLQVYETVGHSSPTLLAEVFLPIPETTVVTGRAPTEEVEFSSNQHVTLDHEGVGSGVPFSFEADGSNQLTLMTSGKVSHSVAWAIGENGIPLIPPLSQQNIGFRSALKKADAISSIGTSGLTDMKKLAKWAAESKLDPNDPNNAPLMQLISVATSGESYVPDFFRLEQLQQEFNFVSDQELNRSKRFRLLHLRSQEVPEFRNYKQVPVYDREIMEKVFQDYEKRLRDRNVIETKEHIDTHRAIVAKYLQQVRESVINRFLIAKQYFLLADMIVEEEVPNISILGLSLFKLAEQKRPLRPRRKGRKKVTAQNLSDGDIKLLVNIVRAYDIPVRKPAVSKFQQPSRSSRMFSEKHAASPSTYSPTHNADYPLGQVLVRPFVEVSFQRTVCHTTTAEGPNPSWNEELELPFRAPNGDYSTASLQSVKDVVFINIFDEVLHDVLEDDRERGSGIHTRIERHWLGCVKMPFSTIYFQARIDGTFKIDIPPVLLGYSKERNMILERGFDSVRSLSEGSYITLFITIEPQLVPGESIREKFESQEDEKLLQATEKFQAECALKFPNRQCLTTVIDISGKTVFITRYLKPLNPPQELLNVYPNNLQATAELVARYVSLIPFLPDTVSFGGICDLWSTSDQFLDLLAGDEEEHAVLLCNYFLSLGKKAWLLMGNAIPEGPTAYVLTWEQGRYLIWNPCSGHFYGQFDTFCPLKNVGCLIGPDNIWFNIQRYESPLRINFDVTRPKLWKSFFSRSLPYPGLSSVQPEELIYQRSDKAAAAELQDRIEKILKEKIMDWRPRHLTRWNRYCTSTLRHFLPLLEKSQGEDVEDDHRAELLKQLGDYRFSGFPLHMPYSEVKPLIDAVYSTGVHNIDVPNVEFALAVYIHPYPKNVLSVWIYVASLIRNR

SEQ ID NO: 48700 - protein, 164 aa, Homo sapiens
MPLSDVLYGRVADFLSWCRQKNDSGLDYQSCPTSEDCENNPVDSFWKRASIQYSKDSSGVIHVMLNGSEPTGAYPIKGFFADYEIPNLQKEKITRIEIWVMHEIGGPNVESCGEGSMKVLEKRLKDMGFQYSCINDYRPVKLLQCVDHSTHPDCALKSDGVSPC

SEQ ID NO: 48701 - protein, 248 aa, Homo sapiens
MVTQHGKPMFTKVCTEGRLILEFTFDDLMRIKTWHFTIRQYRELVPRSILAMHAQDPQVLDQLSKNITRMGLTNFTLNYLRLCVILEPMQELMSRHKTYNLSPRDCLKTCLFQKWQRMVAPPEPTRQPTTKRRKRKNSTSSTSNSSAGNNANSTGSKKKTTAANLSLSSQVPDVMVVGEPTLMGGEFGDEDERLITRLENTQYDAANGMDDEEDFNNSPALGNNSPWNSKPPATQETKSENPPPQASQ

SEQ ID NO: 48702 - protein, 289 aa, Homo sapiens [sequence omitted]

SEQ ID NO: 48703 - protein, 307 aa, Homo sapiens [sequence omitted]

SEQ ID NO: 48704 - protein, 175 aa, Homo sapiens [sequence omitted]

SEQ ID NO: 48705 - protein, 932 aa, Homo sapiens
MEDDEEEEDGGLLNYLFTFLLKSHEANSNAVRFRVCLLINKLLGSMPENAQIDDDVFDKINKAMLIRLKDKIPNVRIQAVLALSRLQDPKDDECPVVNAYATLIENDSNPEVRRAVLSCIAPSAKTLPKIVGRTKDVKEAVRKLAYQVLAEKVHMRAMSIAQRVMLLQQGLNDRSDAVKQAMQKHLLQGWLRFSEGNILELLHRLDVENSSEVAVSVLNALFSITPLSELVGLCKNNDGRKLIPVETLTPEIALYWCALCEYLKSKGDEGEEFLEQILPEPVVYADYLLSYIQSIPVVNEEHRGDFSYIGNLMTKEFIGQQLILIIKSLDTSEEGGRKKLLAVLQEILILPTIPISLVSFLVERLLHIIIDDNKRTQIVTEIISEIRAPIVTVGVNNDPADVRKKELKMAEIKVKLIEAKEALENCITLQDFNRASELKEEIKALEDARINLLKETEQLEIKEVHIEKNDAETLQKCLILCYELLKQMSISTGLSATMNGIIESLILPGIISIHPVVRNLAVLCLGCCGLQNQDFARKHFVLLLQVLQIDDVTIKISALKAIFDQLMTFGIEPFKTKKIKTLHCEGTEINSDDEQESKEVEETATAKNVLKLLSDFLDSEVSELRTGAAEGLAKLMFSGLLVSSRILSRLILLWYNPVTEEDVQLRHCLGVFFPVFAYASRTNQECFEEAFLPTLQTLANAPASSPLAEIDITNVAELLVDLTRPSGLNPQAKTSQDYQALTVHDNLAMKICNEILTSPCSPEIRVYTKALSSLELSSHLAKDLLVLLNEILEQVKDRTCLRALEKIKIQLEKGNKEFGDQAEAAQDATLTTTTFQNEDEKNKEVYMTPLRGVKATQASKSTQLKTNRGQRKVTVSARTNRRCQTAEADSESDHEVPEPESEMKMRLPRRAKTAALEKSKLNLAQFLNEDLS

SEQ ID NO: 48706 - protein, 1124 aa, Homo sapiens
MHRWVKEKNITVRDTRCVYPKSLQAQPVTGVKQELLTCDPPLELPSFYMTPSHRQVVFEGDSLPFQCMASYIDQDMQVLWYQDGRIVETDESQGIFVEKNMIHNCSLIASALTISNIQAGSTGNWGCHVQTKRGNNTRTVDIVVLESSAQYCPPERVVNNKGDFRWPRTLAGITAYLQCTRNTHGSGIYPGNPQDERKAWRRCDRGGFWADDDYSRCQYANDVTRVLYMFNQMPLNLTNAVATARQLLAYTVEAANFSDKMDVIFVAEMIEKFGRFTKEEKSKELGDVMVDIASNIMLADERVLWLAQREAKACSRIVQCLQRIATYRLAGGAHVYSTYSPNIALEAYVIKSTGFTGMTCTVFQKVAASDRTGLSDYGRRDPEGNLDKQLSFKCNVSNTFSSLALKNTIVEASIQLPPSLFSPKQKRELRPTDDSLYKLQLIAFRNGKLFPATGNSTNLADDGKRRTVVTPVILTKIDGVNVDTHHIPVNVTLRRIAHGADAVAARWDFDLLNGQGGWKSDGCHILYSDENITTIQCYSLSNYAVLMDLTGSELYTQAASLLHPVVYTTAIILLLCLLAVIVSYIYHHSLIRISLKSWHMLVNLCFHIFLTCVVFVGGITQTRNASICQAVGIILHYSTLATVLWVGVTARNIYKQVTKKAKRCQDPDEPPPPPRPMLRFYLIGGGIPIIVCGITAAANIKNYGSRPNAPYCWMAWEPSLGAFYGPASFITFVNCMYFLSIFIQLKRHPERKYELKEPTEEQQRLAANENGEINHQDSMSLSLISTSALENEHTFHSQLLGASLTLLLYVALWMFGALAVSLYYPLDLVFSFVFGATSLSFSAFFVVHHCVNREDVRLAWIMTCCPGRSSYSVQVNVQPPNSNGTNGEAPKCPNSSAESSCTNKSASSFKNSSQGCKLTNLQAAAAQCHANSLPLNSTPQLDNSLTEHSMDNDIKMHVAPLEVQFRTNVHSSRHHKNRSKGHRASRLTVLREYAYDVPTSVEGSVQNGLPKSRLGNNEGHSRSRRAYLAYRERQYNPPQQDSSDACSTLPKSSRNFEKPVSTTSKKDALRKPAVVELENQQKSYGLNLAIQNGPIKSNGQEGPLLGTDSTGNVRTGLWKHETTV

SEQ ID NO: 48707 - protein, 433 aa, Homo sapiens [sequence omitted]

SEQ ID NO: 48708 - protein, 693 aa, Homo sapiens
MSLSPPCFTEEDRFSLEALQTIHKQMDDDKDGGIEVEESDEFIREDMKYKDATNKHSHLHREDKHITIEDLWKRWKTSEVHNWTLEDTLQWLIEFVELPQYEKNFRDNNVKGTTLPRIAVHEPSFMISQLKISDRSHRQKLQLKALDVVLFGPLTRPPHNWMKDFILTVSIVIGVGGCWFAYTQNKTSKEHVAKMMKDLESLQTAEQSLMDLQERLEKAQEENRNVAVEKQNLERKMMDEINYAKEEACRLRELREGAECELSRRQYAEQELEQVRMALKKAEKEFELRSSWSVPDALQKWLQLTHEVEVQYYNIKRQNAEMQLAIAKDEAEKIKKKRSTVFGTLHVAHSSSLDEVDHKILEAKKALSELTTCLRERLFRWQQIEKICGFQIAHNSGLPSLTSSLYSDHSWVVMPRVSIPPYPIAGGVDDLDEDTPPIVSQFPGTMAKPPGSLARSSSLCRSRRSIVPSSPQPQRAQLAPHAPHPSHPRHPHHPQHTPHSLPSPDPDILSVSSCPALYRNEEEEEAIYFSAEKQWEVPDTASECDSLNSSIGRKQSPPLSLEIYQTLSPRKISRDEVSLEDSSRGDSPVTVDVSWGSPDCVGLTETKSMIFSPASKVYNGILEKSCSMNQLSSGIPVPKPRHTSCSSAGNDSKPVQEAPSVARISSIPHDLCHNGEKSKKPSKIKSLFKKKSK

SEQ ID NO: 48709 - protein, 641 aa, Homo sapiens
MKLQKLDLLPIAHLHLSYILLDLRNYYIKENETESLQILNAKTLHLVFHPTSLFAIQVNISVNTLGCLQLTNIKLNDDNCQVFIKFLSELTRGSTLLNFTLNHIETTWKCLVRVFQFLWPKPVEYLNIYNLTIIESIREEDFTYSKTTLKALTIEHITNQVFLFSQTALYTVFSEMNIMMLTISDTPFIHMLCPHAPSTFKFLNFTQNVFTDSIFEKCSTLVKLETLILQKNGLKDLFKVGLMTKDMPSLEILDVSWNSLESGRHKENCTWVESIVVLNLSSNMLTDSVFRCLPPRIKVLDLHSNKIKSVPKQVVKLEALQELNVAFNSLTDLPGCGSFSSLSVLIIDHNSVSHPSADFFQSCQKMRSIKAGDNPFQCTCELREFVKNIDQVSSEVLEGWPDSYKCDYPESYRGSPLKDFHMSELSCNITLLIVTIGATMLVLAVTVTSLCIYLDLPWYLRMVCQWTQTRRRARNIPLEELQRNLQFHAFISYSEHDSAWVKSELVPYLEKEDIQICLHERNFVPGKSIVENIINCIEKSYKSIFVLSPNFVQSEWCHYELYFAHHNLFHEGSNNLILILLEPIPQNSIPNKYHKLKALMTQRTYLQWPKEKSKRGLFWANIRAAFNMKLTLVTENNDVKS

SEQ ID NO: 48710 - protein, 544 aa, Homo sapiens [sequence omitted]

SEQ ID NO: 48711 - protein, 57 aa, Homo sapiens
MGKNYNKLKNTLRNLNLHTVCEEARCPNIGECWGGGEYATATATIMVGPASTSMALV

SEQ ID NO: 48712 - protein, 81 aa, Homo sapiens
MRRLINLLRQSQSYCTDTECLQELPGPSGDNGISVTMILVAWMVIALILFLLRPPNLRGSSLPGKPTSPHNGQDPPAPPVD

SEQ ID NO: 48713 - protein, 1297 aa, Homo sapiens
MIKRLKMVVKTFMDMDQDSEDEKQQYLPLALHLASEFFLRNPNKDVRLLVACCLADIFRIYAPEAPYTSHDKLKDIFLFITRQLKGLEDTKSPQFNRYFYLLENLAWVKSYNICFELEDCNEIFIQLFRTLFSVINNSHNKKVQMHMLDLMSSIIMEGDGVTQELLDSILINLIPAHKNLNKQSFDLAKVLLKRTVQTIEACIANFFNQVLVLGRSSVSDLSEHVFDLIQELFAIDPHLLLSVMPQLEFKLKSNDGEERLAVVRLLAKLFGSKDSDLATQNRPLWQCFLGRFNDIHVPVRLESVKFASHCLMNHPDLAKDLTEYLKVRSHDPEEAIRHDVIVTIITAAKRDLALVNDQLLGFVRERTLDKRWRVRKEAMMGLAQLYKKYCLHGEAGKEAAEKVSWIKDKLLHIYYQNSIDDKLLVEKIFAQYLVPHNLETEERMKCLYYLYASLDPNAVKALNEMWKCQNMLRSHVRELLDLHKQPTSEANCSAMFGKLMTIAKNLPDPGKAQDFVKKFNQVLGDDEKLRSQLELLISPTCSCKQADICVREIARKLANPKQPTNPFLEMVKFLLERIAPVHIDSEAISALVKLMNKSIEGTADDEEEGVSPDTAIRSGLELLKVLSFTHPTSFHSAETYESLLQCLRMEDDKVAEAAIQIFRNTGHKIETDLPQIRSTLIPILHQKAKRGTPHQAKQAVHCIHAIFTNKEVQLAQIFEPLSRSLNADVPEQLITPLVSLGHISMLAPDQFASPMKSVVANFIVKDLLMNDRSTGEKNGKLWSPDEEVSPEVLAKVQAIKLLVRWLLGMKNNQSKSANSTLRLLSAMLVSEGDLTEQKRISKSDMSRLRLAAGSAIMKLAQEPCYHEIITPEQFQLCALVINDECYQVRQIFAQKLHKALVKLLLPLEYMAIFALCAKDPVKERRAHARQCLLKNISIRREYIKQNPMATEKLLSLLPEYVVPYMIHLLAHDPDFTRSQDVDQLRDIKECLWFMLEVLMTKNENNSHAFMKKMAENIKLTRDAQSPDESKTNEKLYTVCDVALCVINSKSALCNADSPKDPVLPMKFFTQPEKDFCNDKSYISEETRVLLLTGKPKPAGVLGAVNKPLSATGRKPYVRSTGTETGSNINVNSELNPSTGNRSREQSSEAAETGVSENEENPVRIISVTPVKNIDPVKNKEINSDQATQGNISSDRGKKRTVTAAGAENIQQKTDEKVDESGPPAPSKPRRGRRPKSESQGNATKNDDLNKPINKGRKRAAVGQESPGGLEAGNAKAPKLQDLAKKAAPAERQIDLQR

SEQ ID NO: 48714 - protein, 560 aa, Homo sapiens
MIKRLKMVVKTFMDMDQDSEDEKQQYLPLALHLASEFFLRNPNKDVRLLVACCLADIFRIYAPEAPYTSHDKLKDIFLFITRQLKGLEDTKSPQFNRYFYLLENLAWVKSYNICFELEDCNEIFIQLFRTLFSVINNSHNKKVQMHMLDLMSSIIMEGDGVTQELLDSILINLIPAHKNLNKQSFDLAKVLLKRTVQTIEACIANFFNQVLVLGRSSVSDLSEHVFDLIQELFAIDPHLLLSVMPQLEFKLKSNDGEERLAVVRLLAKLFGSKDSDLATQNRPLWQCFLGRFNDIHVPVRLESVKFASHCLMNHPDLAKDLTEYLKVRSHDPEEAIRHDVIVTIITAAKRDLALVNDQLLGFVRERTLDKRWRVRKEAMMGLAQLYKKYCLHGEAGKEAAEKVSWIKDKLLHIYYQNSIDDKLLVEKIFAQYLVPHNLETEERMKCLYYLYASLDPNAVKALNEMWKCQNMLRSHVRELLDLHKQPTSEANCSAMFGKLMTIAKNLPDPGKAQDFVKKFNQVLGDDEKLRSQLELLISPTCSCKQADICVVSKSYFTLFL

SEQ ID NO: 48715 - protein, 1702 aa, Homo sapiens
MLSECDFKVENAMDCLLELSATDTKIEESSSQSFVASENQVGAAESKIMEKRPEEESEDSKMDSFLDMQLTEDLDSLIQNAFEKLNSSPDDQVYSFLPSQDVNSFNDSSEFINPDSSNMTPIFSTQNMNLNGENLENSGSTLSLNPLPSHSVLNESKCFIKDNTLALESNYPEDSLLSSSLNVASDSIAGCSSLNQKQKELLESECVEAQFSEAPVDLDASEPQACLNLPGLDLPGTGGDQKSTRVSDVFLPSEGFNFKPHKHPELPTKGKDVSYCPVLAPLPLLLPPPPPPPMWNPMIPAFDLFQGNHGFVAPVVTTAAHWRSVNYTFPPSVISHTSPTKVWRNKDGTSAYQVQETPVSQVVRKKTSYVGLVLVLLRGLPGSGKSFLARTLQEDNPSGVILSTDDYFYINGQYQFDVKYLGEAHEWNQNRAKEAFEKKISPIIIDNTNLQAWEMKPYVALSQKHKYKVLFREPDTWWKFKPKELARRNIHGVSKEKITRMLEHYQRFVSVPIIMSSSVPEKIERIELCAYSCEDRSTSPRDDEDIISEKEENILSLSLKHLEFTEEKNLDVTKETMLPENVAYLSNADLNKRRKEISDMNPSIQSALILETPHMYFSDSESKLQATDKSENEQIEMVAVKGYSKTDTDSSMERVSPSTCCSENNQEDCDLANSGPLQNEKSSPGEIVEERATVTKKAFGKQKSKSTLEKFPRHELSNFVGDWPVDKTIGQRTKRNRKTEKTSSVQSDKKYNYPQSHKLVNSVSVNTDCVQQRGSPHESVEDGRKSQCDDASEPLNSYKYDAYKNIDKNSFNIMGDWPSSDSLAQREHRSRMPKTGLSEPNLEIGTNDKMNEISLSTAHEACWGTSSQKLKTLGSSNLGSSEMLLSEMTCESQTCLSKKSHGQHTSLPLTFTNSAPTVSGVVEPQTLAECQEQMPKRDPGKEVGMCTQTEPQDFALLWKIEKNKISISDSIKVLTGRLDGFKPKVFNINTKSDVQEAIPYRVMYDKSTFVEESELTSADESENLNILCKLFGSFSLEALKDLYERCNKDIIWATSLLLDSETKLCEDTEFENFQKSCDGSQIGPFSLGLNLKEIISQRGTLENSNSPVPEFSHGIGISNADSQSTCDAERGNSEQAEMRAVTPENHESMTSIFPSAAVGLKNNNDILPNSQEELLYSSKQSFPGILKATTPKDMSETEKNLVVTETGDNIHSPSHFSDIFNFVSSTSNLELNEEIYFTDSLEIKRNENFPKDYVKFSDEEEFMNEDEKEMKEILMAGSSLSAGVSGEDKTEILNPTPAMAKSLTIDCLELALPPELAFQLNELFGPVGIDSGSLTVEDCVVHIDLNLAKVIHEKWKESVMERQRQEEVSCGKFMQDPSLVGHTGLDNPEQKSSQRTGKKLLKTLTASEMLPLLDHWNTQTKKVSLREIMSEEIALQEKHNLKRETLMFEKDCATKLKEKQLFKIFPAINQNFLVDIFKDHNYSLEHTVQFLNCVLEGDPVKTVVAQEFVHQNENVTSHTGQKSKEKKPKKLKETEETPSELSFQDFEYPDYDDYRAEAFLHQQKRMECYSKAKEAYRIGKKNVATFYAQQGTLHEQKMKEANHLAAIEIFEKVNASLLPQNVLDLHGLHVDEALEHLMRVLEKKTEEFKQNGGKPYLSVITGRGNHSQGGVARIKPAVIKYLISHSFRFSEIKPGCLKVMLK

SEQ ID NO: 48716 - protein, 1388 aa, Homo sapiens
MIPAFDLFQGNHGFVAPVVTTAAHWRSVNYTFPPSVISHTSPTKVWRNKDGTSAYQVQETPVSQVVRKKTSYVGLVLVLLRGLPGSGKSFLARTLQEDNPSGVILSTDDYFYINGQYQFDVKYLGEAHEWNQNRAKEAFEKKISPIIIDNTNLQAWEMKPYVALSQKHKYKVLFREPDTWWKFKPKELARRNIHGVSKEKITRMLEHYQRFVSVPIIMSSSVPEKIERIELCAYSCEDRSTSPRDDEDIISEKEENILSLSLKHLEFTEEKNLDVTKETMLPENVAYLSNADLNKRRKEISDMNPSIQSALILETPHMYFSDSESKLQATDKSENEQIEMVAVKGYSKTDTDSSMERVSPSTCCSENNQEDCDLANSGPLQNEKSSPGEIVEERATVTKKAFGKQKSKSTLEKFPRHELSNFVGDWPVDKTIGQRTKRNRKTEKTSSVQSDKKYNYPQSHKLVNSVSVNTDCVQQRGSPHESVEDGRKSQCDDASEPLNSYKYDAYKNIDKNSFNIMGDWPSSDSLAQREHRSRMPKTGLSEPNLEIGTNDKMNEISLSTAHEACWGTSSQKLKTLGSSNLGSSEMLLSEMTCESQTCLSKKSHGQHTSLPLTFTNSAPTVSGVVEPQTLAECQEQMPKRDPGKEVGMCTQTEPQDFALLWKIEKNKISISDSIKVLTGRLDGFKPKVFNINTKSDVQEAIPYRVMYDKSTFVEESELTSADESENLNILCKLFGSFSLEALKDLYERCNKDIIWATSLLLDSETKLCEDTEFENFQKSCDGSQIGPFSLGLNLKEIISQRGTLENSNSPVPEFSHGIGISNADSQSTCDAERGNSEQAEMRAVTPENHESMTSIFPSAAVGLKNNNDILPNSQEELLYSSKQSFPGILKATTPKDMSETEKNLVVTETGDNIHSPSHFSDIFNFVSSTSNLELNEEIYFTDSLEIKRNENFPKDYVKFSDEEEFMNEDEKEMKEILMAGSSLSAGVSGEDKTEILNPTPAMAKSLTIDCLELALPPELAFQLNELFGPVGIDSGSLTVEDCVVHIDLNLAKVIHEKWKESVMERQRQEEVSCGKFMQDPSLVGHTGLDNPEQKSSQRTGKKLLKTLTASEMLPLLDHWNTQTKKVSLREIMSEEIALQEKHNLKRETLMFEKDCATKLKEKQLFKIFPAINQNFLVDIFKDHNYSLEHTVQFLNCVLEGDPVKTVVAQEFVHQNENVTSHTGQKSKEKKDFEYPDYDDYRAEAFLHQQKRMECYSKAKEAYRIGKKNVATFYAQQGTLHEQKMKEANHLAAIEIFEKVNASLLPQNVLDLHGLHVDEALEHLMRVLEKKTEEFKQNGGKPYLSVITGRGNHSQGGVARIKPAVIKYLISHSFRFSEIKPGCLKVMLK

SEQ ID NO: 48717 - protein, 519 aa, Homo sapiens [sequence omitted]

SEQ ID NO: 48718 - protein, 93 aa, Homo sapiens [sequence omitted]

SEQ ID NO: 48719 - protein, 538 aa, Homo sapiens
MNYTAEVFHVPLLLAPVAPHFALTPAFASLFPLLPQDVHLLNSARPDKRKLGSLGDVDSTTLTPELLLQIRCLVSGLSSLCEHLGVREECFAVGSLSQVIAADLANYAPAKNRKKTAAGRASVVFVDRTLDLTGAVGHHGDNLVEKIISALPQLPGHTNDVMVNMIALTALHTEEENYNVVAPGCLSQSSDTTAKALWEALLNTKHKEAVMEVRRHLVEAASRENLPIKMSMGRVTPGQLMSYIQLFKNNLKALMNHCGLLQLGLATAQTLKHPQTAKWDNFLAFERLLLQSIGESAMSVVLNQLLPMIKPVTQRTNEDYSPEELLILLIYIYSVTGELTVDKDLCEAEEKVKKALAQVFCEESGLSPLLQKITDWDSSINLTFHKSKIAVDELFTSLRDIAGARSLLKQFKSVYVPGNHTHQASYKPLLKQVVEEIFHPERPDSVDIEHMSSGLTDLLKTGFSMFMKVSRPHPSDYPLLILFVVGGVTVSEVKMVKDLVASLKPGTQVIVLSTRLLKPLNIPELLFATDRLHPDLGF

SEQ ID NO: 48720 - protein, 186 aa, Homo sapiens
MKVAVKMLKPTARSSEKQALMSELKIMTHLGPHLNIVNLLGACTKSGPIYIITEYCFYGDLVNYLHKNRDSFLSHHPEKPKKELDIFGLNPADESTRSYVILSFENNGDYMDMKQADTTQYVPMLERKEVSKYSDIQRSLYDRPASYKKKSMLGWAGGVGTRCQRNLSHAQAQALLAGRPLLSGLP

SEQ ID NO: 48721 - protein, 177 aa, Homo sapiens [sequence omitted]

SEQ ID NO: 48722 - protein, 2458 aa, Homo sapiens
MLETASKLLLSGTADGADLRTVDPETQARLEALLEAAGIGKLSTADGKAFADPEVLRRLTSSVSCALDEAAAALTRMRAESTANAGQSDNRSLAEACSEGDVNAVRKLLIEGRSVNEHTEEGESLLCLACSAGYYELAQVLLAMHANVEDRGIKGDITPLMAAANGGHVKIVKLLLAHKADVNAQSSTGNTALTYACAGGYVDVVKVLLESGASIEDHNENGHTPLMEAGSAGHVEVARLLLENGAGINTHSNEFKESALTLACYKGHLEMVRFLLEAGADQEHKTDEMHTALMEACMDGHVEVARLLLDSGAQVNMPADSFESPLTLAACGGHVELAALLIERGASLEEVNDEGYTPLMEAAREGHEEMVALLLGQGANINAQTEETQETALTLACCGGFLEVADFLIKAGADIELGCSTPLMEAAQEGHLELVKYLLAAGANVHATTATGDTALTYACENGHTDVADVLLQAGADLEHESEGGRTPLMKAARAGHVCTVQFLISKGANVNRTTANNDHTVLSLACAGGHLAVVELLLAHGADPTHRLKDGSTMLIEAAKGGHTSVVCYLLDYPNNLLSAPPPDVTQLTPPSHDLNRAPRVPVQALPMVVPPQEPDKPPANVATTLPIRNKAASKQKSSSHLPANSQDVQGYITNQSPESIVEEAQGKLTELEQRIKEAIEKNAQLQSLELAHADQLTKEKIEELNKTREEQIQKKQKILEELQKVERELQLKTQQQLKKQYLEVKAQRIQLQQQQQQSCQHLGLLTPVGVGEQLSEGDYARLQQVDPVLLKDEPQQTAAQMGFAPIQPLAMPQALPLAAGPLPPGSIANLTELQGVIVGQPVLGQAQLAGLGQGILTETQQGLMVASPAQTLNDTLDDIMAAVSGRASAMSNTPTHSIAASISQPQTPTPSPIISPSAMLPIYPAIDIDAQTESNHDTALTLACAGGHEELVQTLLERGASIEHRDKKGFTPLILAATAGHVGVVEILLDNGADIEAQSERTKDTPLSLACSGGRQEVVELLLARGANKEHRNVSDYTPLSLAASGGYVNIIKILLNAGAEINSRTGSKLGISPLMLAAMNGHTAAVKLLLDMGSDINAQIETNRNTALTLACFQGRTEVVSLLLDRKANVEHRAKTGLTPLMEAASGGYAEVGRVLLDKGADVNAPPVPSSRDTALTIAADKGHYKFCELLIGRGAHIDVRNKKGNTPLWLAANGGHLDVVQLLVQAGADVDAADNRKITPLMAAFRKGHVKVVRYLVKEVNQFPSDSECMRYIATITDKEMLKKCHLCMESIVQAKDRQAAEANKNASILLEELDLEKLREESRRLALAAKREKRKEKRRKKKEEQRRKLEEIEAKNKENFELQAAQEKEKLKVEDEPEVLTEPPSATTTTTIGISATWTTLAGSHGKRNNTITTTSSKRKNRKNKITPENVQIIFDDPLPISYSQPEKVNGESKSSSTSESGDSDNMRISSCSDESSNSNSSRKSDNHSPAVVTTTVSSKKQPSVLVTFPKEERKSVSGKASIKLSETISEGTSNSLSTCTKSGPSPLSSPNGKLTVASPKRGQKREEGWKEVVRRSKKVSVPSTVISRVIGRGGCNINAIREFTGAHIDIDKQKDKTGDRIITIRGGTESTRQATQLINALIKDPDKEIDELIPKNRLKSSSANSKIGSSAPTTTAANTSLMGIKMTTVALSSTSQTATALTVPAISSASTHKTIKNPVNNVRPGFPVSLPLAYPPPQFAHALLAAQTFQQIRPPRLPMTHFGGTFPPAQSTWGPFPVRPLSPARATNSPKPHMVPRHSNQNSSGSQVNSAGSLTSSPTTTTSSSASTVPGTSTNGSPSSPSVRRQLFVTVVKTSNATTTTVTTTASNNNTAPTNATYPMPTAKEHYPVSSPSSPSPPAQPGGVSRNSPLDCGSASPNKVASSSEQEAGSPPVVETTNTRPPNSSSSSGSSSAHSNQQQPPGSVSQEPRPPLQQSQVPPPEVRMTVPPLATSSAPVAVPSTAPVTYPMPQTPMGCPQPTPKMETPAIRPPPHGTTAPHKNSASVQNSSVAVLSVNHIKRPHSVPSSVQLPSTLSTQSACQNSVHPANKPIAPNFSAPLPFGPFSTLFENSPTSAHAFWGGSVVSSQSTPESMLSGKSSYLPNSDPLHQSDTSKAPGFRPPLQRPAPSPSGIVNMDSPYGSVTPSSTHLGNFASNISGGQMYGPGAPLGGAPAAANFNRQHFSPLSLLTPCSSASNDSSAQSVSSGVRAPSPAPSSVPLGSEKPSNVSQDRKVPVPIGTERSARIRQTGTSAPSVIGSNLSTSVGHSGIWSFEGIGGNQDKVDWCNPGMGNPMIHRPMSDPGVFSQHQAMERDSTGIVTPSGTFHQHVPAGYMDFPKVGGMPFSVYGNAMIPPVAPIPDGAGGPIFNGPHAADPSWNSLIKMVSSSTENNGPQTVWTGPWAPHMNSVHMNQLG

SEQ ID NO: 48723 - protein, 125 aa, Homo sapiens
MNLQGRHKCIENVSRQNCPICLEDIHTSRVVAHVLPCGHLLHRGYRCPLCMHSALDMTRYWRQLDDEVAQTPMPSEYQNMTVDILCNDCNGRSTVQFHILGMKCKICESYNTAQAGGRRISLDQQ

SEQ ID NO: 48724 - protein, 901 aa, Homo sapiens
MEHLIHVLQTDRSDSEIIGYALDTLYNIISNEEEEEVEENSTRQSEDLGSQFTEIFIKQQENVTLLLSLLEEFDFHVRWPGVKLLTSLLKQLGPQVQQIILVSPMGVSRLMDLLADSREVIRNDGVLLLQALTRSNGAIQKIVAFENAFERLLDIISEEGNSDGGIVVEDCLILLQNLLKNNNSNQNFFKEGSYIQRMKPWFEVGDENSGWSAQKVTNLHLMLQLVRVLVSPTNPPGATSSCQKAMFQCGLLQQLCTILMATGVPADILTETINTVSEVIRGCQVNQDYFASVNAPSNPPRPAIVVLLMSMVNERQPFVLRCAVLYCFQCFLYKNQKGQGEIVSTLLPSTIDATGNSVSAGQLLCGGLFSTDSLSNWCAAVALAHALQENATQKEQLLRVQLATSIGNPPVSLLQQCTNILSQGSKIQTRVGLLMLLCTWLSNCPIAVTHFLHNSANVPFLTGQIAENLGEEEQLVQGLCALLLGISIYFNDNSLESYMKEKLKQLIEKRIGKENFIEKLGFISKHELYSRASQKPQPNFPSPEYMIFDHEFTKLVKELEGVITKAIYKSSEEDKKEEEVKKTLEQHDNIVTHYKNMIREQDLQLEELRQQVSTLKCQNEQLQTAVTQQVSQIQQHKDQYNLLKIQLGKDNQHQGSYSEGAQMNGIQPEEIGRLREEIEELKRNQELLQSQLTEKDSMIENMKSSQTSGTNEQSSAIVSARDSEQVAELKQELATLKSQLNSQSVEITKLQTEKQELLQKTEAFAKSVEVQGETETIIATKTTDVEGRLSALLQETKELKNEIKALSEERTAIKEQLDSSNSTIAILQTEKDKLELEITDSKKEQDDLLVLLADQDQKILSLKNKLKDLGHPVEEEDELESGDQEDEDDESEDPGKDLDHI

SEQ ID NO: 48725 - protein, 1698 aa, Homo sapiens
MRQADIRYVKTVYDTRRGVSAEYEVNSSALLLQGREARASANGQGYDKWSNIPRGKGVPPPSWSQQCPSSLETATDNLPPKVGAPLPPARSDSYAAFRHRERPSSWSSLDQKRLCRPQANSLGSLKSPFIEEQLHTVLEKSPENSPPVKPKHNYTQKAQPGQPLLPTSIYPVPSLEPHFAQVPQPSVSSNGMLYPALAKESGYIAPQGACNKMATIDENGNQNGSGRPGFAFCQPLEHDLLSPVEKKPEATAKYVPSKVHFCSVPENEEDASLKRHLTPPQGNSPHSNERKSTHSNKPSSHPHSLKCPQAQAWQAGEDKRSSRLSEPWEGDFQEDHNANLWRRLEREGLGQSLSGNFGKTKSAFSSLQNIPESLRRHSSLELGRGTQEGYPGGRPTCAVNTKAEDPGRKAAPDLGSHLDRQVSYPRPEGRTGASASFNSTDPSPEEPPAPSHPHTSSLGRRGPGPGSASALQGFQYGKPHCSVLEKVSKFEQREQGSQRPSVGGSGFGHNYRPHRTVSTSSTSGNDFEETKAHIRFSESAEPLGNGEQHFKNGELKLEEASRQPCGQQLSGGASDSGRGPQRPDARLLRSQSTFQLSSEPEREPEWRDRPGSPESPLLDAPFSRAYRNSIKDAQSRVLGATSFRRRDLELGAPVASRSWRPRPSSAHVGLRSPEASASASPHTPRERHSVTPAEGDLARPVPPAARRGARRRLTPEQKKRSYSEPEKMNEVGIVEEAEPAPLGPQRNGMRFPESSVADRRRLFERDGKACSTLSLSGPELKQFQQSALADYIQRKTGKRPTSAAGCSLQEPGPLRERAQSAYLQPGPAALEGSGLASASSLSSLREPSLQPRREATLLPATVAETQQAPRDRSSSFAGGRRLGERRRGDLLSGANGGTRGTQRGDETPREPSSWGARAGKSMSAEDLLERSDVLAGPVHVRSRSSPATADKRQDVLLGQDSGFGLVKDPCYLAGPGSRSLSCSERGQEEMLPLFHHLTPRWGGSGCKAIGDSSVPSECPGTLDHQRQASRTPCPRPPLAGTQGLVTDTRAAPLTPIGTPLPSAIPSGYCSQDGQTGRQPLPPYTPAMMHRSNGHTLTQPPGPRGCEGDGPEHGVEEGTRKRVSLPQWPPPSRAKWAHAAREDSLPEESSAPDFANLKHYQKQQSLPSLCSTSDPDTPLGAPSTPGRISLRISESVLRDSPPPHEDYEDEVFVRDPHPKATSSPTFEPLPPPPPPPPSQETPVYSMDDFPPPPPHTVCEAQLDSEDPEGPRPSFNKLSKVTIARERHMPGAAHVVGSQTLASRLQTSIKGSEAESTPPSFMSVHAQLAGSLGGQPAPIQTQSLSHDPVSGTQGLEKKVSPDPQKSSEDIRTEALAKEIVHQDKSLADILDPDSRLKTTMDLMEGLFPRDVNLLKENSVKRKAIQRTVSSSGCEGKRNEDKEAVSMLVNCPAYYSVSAPKAELLNKIKEMPAEVNEEEEQADVNEKKAELIGSLTHKLETLQEAKGSLLTDIKLNNALGEEVEALISELCKPNEFDKYRMFIGDLDKVVNLLLSLSGRLARVENVLSGLGEDASNEERSSLYEKRKILAGQHEDARELKENLDRRERVVLGILANYLSEEQLQDYQHFVKMKSTLLIEQRKLDDKIKLGQEQVKCLLESLPSDFIPKAGALALPPNLTSEPIPAGGCTFSGIFPTLTSPL

SEQ ID NO: 48726 - protein, 344 aa, Homo sapiens
MPSNQNVSPSQRDEVIQWLAKLKYQFNLYPETFALASSLLDRFLATVKAHPKYLSCIAISCFFLAAKTVEEDERIPVLKVLARDSFCGCSSSEILRMERIILDKLNWDLHTATPLDFLHIFHAIAVSTRPQLLFSLPKLSPSQHLAVLTKQLLHCMACNQLLQFRGSMLALAMVSLEMEKLIPDWLSLTIELLQKAQMDSSQLIHCRELVAHHLSTLQSSLPLNSVYVYRPLKHTLVTCDKGVFRLHPSSVPGPDFSKDNSKPEVPVRGTAAFYHHLPAASGCKQTSTKRKVEEMEVDDFYDGIKRLYNEDNVSENVGSVCGTDLSRQEGHASPCPPLQPVSVM

SEQ ID NO: 48727 - protein, 303 aa, Homo sapiens
MVYQTSLCSCSVNIRVPNRHFAAATKSAKKTKKGAKEKTPDEKKDEIEKIKAYPYMEGEPEDDVYLKRLYPRQIYEVEKAVHLLKKFQILDFTSPKQSVYLDLTLDMALGKKKNVEPFTSVLSLPYPFASEINKVAVFTENASEVKIAEENGAAFAGGTSLIQKIWDDEIVADFYVAVPEIMPELNRLRKKLNKKYPKLSRNSIGRDIPKMLELFKNGHEIKVDEERENFLQTKIATLDMSSDQIAANLQAVINEVCRHRPLNLGPFVVRAFLRSSTSEGLLLKIDPLLPKEVKNEESEKEDA

SEQ ID NO: 48728 - protein, 3706 aa, Homo sapiens
MCDHGQVTCQTGECAKVECARDEELIHLDGKCCPECISRNGYCVYEETGEFMSSNASEVKRIPEGEKWEDGPCKVCECRGAQVTCYEPSCPPCPVGTLALEVKGQCCPDCTSVHCHPDCLTCSQSPDHCDLCQDPTKLLQNGWCVHSCGLGFYQAGSLCLACQPQCSTCTSGLECSSCQPPLLMRHGQCVPTCGDGFYQDRHSCAVCHESCAGCWGPTEKHCLACRDPLHVLRDGGCESSCGKGFYNRQGTCSACDQSCDSCGPSSPRCLTCTEKTVLHDGKCMSECPGGYYADATGRCKVCHNSCASCSGPTPSHCTACSPPKALRQGHCLPRCGEGFYSDHGVCKACHSSCLACMGPAPSHCTGCKKPEEGLQVEQLSDVGIPSGECLAQCRAHFYLESTGICEACHQSCFRCAGKSPHNCTDCGPSHVLLDGQCLSQCPDGYFHQEGSCTECHPTCRQCHGPLESDCISCYPHISLTNGNCRTSCREEQFLNLVGYCADCHHLCQHCAADLHNTGSICLRCQNAHYLLLGDHCVPDCPSGYYAERGACKKCHSSCRTCQGRGPFSCSSCDTNLVLSHTGTCSTTCFPGHYLDDNHVCQPCNTHCGSCDSQASCTSCRDPNKVLLFGECQYESCAPQYYLDFSTNTCKECDWSCSACSGPLKTDCLQCMDGYVLQDGACVEQCLSSFYQDSGLCKNCDSYCLQCQGPHECTRCKGPFLLLEAQCVQECGKGYFADHAKHKCTACPQGCLQCSHRDRCHLCDHGFFLKSGLCVYNCVPGFSVHTSNETCSGKIHTPSLHVNGSLILPIGSIKPLDFSLLNVQDQEGRVEDLLFHVVSTPTNGQLVLSRNGKEVQLDKAGRFSWKDVNEKKVRFVHSKEKLRKGYLFLKISDQQFFSEPQLINIQAFSTQAPYVLRNEVLHISRGERATITTQMLDIRDDDNPQDVVIEIIDPPLHGQLLQTLQSPATPIYQFQLDELSRGLLHYAHDGSDSTSDVAVLQANDGHSFHNILFQVKTVPQNDRGLQLVANSMVWVPEGGMLQITNRILQAEAPGASAEEIIYKITQDYPQFGEVVLLVNMPADSPADEGQHLPDGRTATPTSTFTQQDINEGIVWYRHSGAPAQSDSFRFEVSSASNAQTRLESHMFNIAILPQTPEAPKVSLEASLHMTAREDGLTVIQPHSLSFINSEKPSGKIVYNITLPLHPNQGIIEHRDHPHSPIRYFTQEDINQGKVMYRPPPAAPHLQELMAFSFAGLPESVKFHFTVSDGEHTSPEMVLTIHLLPSDQQLPVFQVTAPRLAVSPGGSTSVGLQVVVRDAETAPKELFFELRRPPQHGVLLKHTAEFRRPMATGDTFTYEDVEKNALQYIHDGSSTREDSMEISVTDGLTVTMLEVRVEVSLSEDRGPRLAAGSSLSITVASKSTAIITRSHLAYVDDSSPDPEIWIQLNYLPSYGTLLRISGSEVEELSEVSNFTMEDINNKKIRYSAVFETDGHLVTDSFYFSVSDMDHNHLDNQIFTIMITPAENPPPVIAFADLITVDEGGRAPLSFHHFFATDDDDNLQRDAIIKLSALPKYGCIENTGTGDRFGPETASDLEASFPIQDVLENYIYYFQSVHESIEPTHDIFSFYVSDGTSRSEIHSINITIERKNDEPPRMTLQPLRVQLSSGVVISNSSLSLQDLDTPDNELIFVLTKKPDHGHVLWRQTASEPLENGRVLVQGSTFTYQDILAGLVGYVPSVPGMVVDEFQFSLTDGLHVDTGRMKIYTELPASDTPHLAINQGLQLSAGSVARITEQHLKVTDIDSDDHQVMYIMKEDPGAGRLQMMKHGNLEQISIKGPIRSFTQADISQGHVEYSHGTGEPGGSFAFKFDVVDGEGNRLIDKSFSISILEDKSPPVITTNKGLVLDENSVKKITTLQLSATDQDSGPTELIYRITRQPQLGHLEHAASPGIQISSFTQADLTSRNVQYVHSSEAEKHSDAFSFTLSDGVSEVTQTFHITLHPVDDSLPVVQNLGMRVQEGMRKTITEFELKAVDADTEAESVTFTIVQPPRHGTIERTSNGQHFHLTSTFTMKDIYQNRVSYSHDGSNSLKDRFTFTVSDGTNPFFIIEEGGKEIMTAAPQPFRVDILPVDDGTPRIVTNLGLQWLEYMDGKATNLITKKELLTMDPDTEDAQLVYEITTGPKHGFVENKLQPGRAAATFTQEDVNLGLIRYVLHKEKIREMMDSFQFLVKDSKPNVVSDNVFHIQWSLISFKYTSYNVSEKAGSVSVTVQRTGNLNQYAIVLCRTEQGTASSSSRVSSQPGQQDYVEYAGQVQFDEREDTKSCTIVINDDDVFENVESFTVELSMPAYALLGEFTQAKVIINDTEDEPTLEFDKKIYWVNESAGFLFAPIERKGDASSIVSAICYTVPKSAMGSSLYALESGSDFKSRGMSAASRVIFGPGVTMSTCDVMLIDDSEYEEEEEFEIALADASDNARIGRVATAKVLISGPNDASTVSLGNTAFTVSEDAGTVKIPVIRHGTDLSTFASVWCATRPSDPASATPGVDYVPSSRKVEFGPGVIEQYCTLTILDDTQYPVIEGLETFVVFLSSAQGAELTKPFQAVIAINDTFQDVPSMQFAKDLLLVKEKEGVLHVPITRSGDLSYESSVRCYTQSHSAQVMEDFEERQNADSSRITFLKGDKVKNCTVYIHDDSMFEPEEQFRVYLGLPLGNHWSGARIGKNNMATITISNDEDAPTIEFEEAAYQVREPAGPDAIAILNIKVIRRGDQNRTSKVRCSTRDGSAQSGVDYYPKSRVLKFSPGVDHIFFKVEILSNEDREWHESFSLVLGPDDPVEAVLGDVTTATVTILDQEAAGSLILPAPPIVVTLADYDHVEEVTKEGVKKSPSPGYPLVCVTPCDPHFPRYAVMKERCSEAGINQTSVQFSWEVAAPTDGNGARSPFETITDNTPFTSVNHMVLDSIYFSRRFHVRCVAKAVDKVGHVGTPLRSNIVTIGTDSAICHTPVVAGTSRGFQAQSFIATLKYLDVKHKEHPNRIHISVQIPHQDGMLPLISTMPLHNLHFLLSESIYRHQHVCSNLVTTYDLRGISEAGFLDDVVYDSTALGPGYDRPFQFDPSVREPKTIQLYKHLNLKSCVWTFDAYYDMTELIDVCGGSVTADFQVRDSAQSFLTVHVPLYVSYIYVTAPRGWASLEHHTEMEFSFFYDTVLWRTGIQTDSVLSARLQIIRIYIREDGRLVIEFKTHAKFRGQFVMEHHTLPEVKSFVLTPDHLGGIEFDLQLLWSAQTFDSPHQLWRATSSYNRKDYSGEYTIYLIPCTVQPTQPWVDPGEKPLACTAHAPERFLIPIAFQQTNRPVPVVYSLNTEFQLCNNEKVFLMDPNTSDMSLAEMDYKGAFSKGQILYGRVLWNPEQNLNSAYKLQLEKVYLCTGKDGYVPFFDPTGTIYNEGPQYGCIQPNKHLKHRFLLLDRNQPEVTDKYFHDVPFEAHFASELPDFHVVSNMPGVDGFTLKVDALYKVEAGHQWYLQVIYIIGPDTISGPRVQRSLTAPLRRNRRDLVEPDGQLILDDSLIYDNEGDQVKNGTNMKSLNLEMQELAVAASLSQTGASIGSALAAIMLLLLVFLVACFINRKCQKQRKKKPAEDILEEYPLNTKVEVPKRHPDRVEKNVNRHYCTVRNVNILSEPEAAYTFKGAKVKRLNLEVRVHNNLQDGTEV

SEQ ID NO: 48729 - protein, 1171 aa, Homo sapiens [sequence omitted]

SEQ ID NO: 48730 - protein, 1210 aa, Homo sapiens [sequence omitted]

SEQ ID NO: 48731 - protein, 1241 aa, Homo sapiens
MQAWSPAQNHPIYLATGTSAQQLDATFSTNASLEIFELDLSDPSLDMKSCATFSSSHRYHKLIWGPYKMDSKGDVSGVLIAGGENGNIILYDPSKIIAGDKEVVIAQNDKHTGPVRALDVNIFQTNLVASGANESEIYIWDLNNFATPMTPGAKTQPPEDISCIAWNRQVQHILASASPSGRATVWDLRKNEPIIKVSDHSNRMHCSGLAWHPDVATQMVLASEDDRLPVIQMWDLRFASSPLRVLENHARGILAIAWSMADPELLLSCGKDAKILCSNPNTGEVLYELPTNTQWCFDIQWCPRNPAVLSAASFDGRISVYSIMGGSTDGLRQKQVDKLSSSFGNLDPFGTGQPLPPLQIPQQTAQHSIVLPLKKPPKWIRRPVGASFSFGGKLVTFENVRMPSHQGAEQQQQQHHVFISQVVTEKEFLSRSDQLQQAVQSQGFINYCQKKIDASQTEFEKNVWSFLKVNFEDDSRGKYLELLGYRKEDLGKKIALALNKVDGANVALKDSDQVAQSDGEESPAAEEQLLGEHIKEEKEESEFLPSSGGTFNISVSGDIDGLITQALLTGNFESAVDLCLHDNRMADAIILAIAGGQELLARTQKKYFAKSQSKITRLITAVVMKNWKEIVESCDLKNWREALAAVLTYAKPDEFSALCDLLGTRLENEGDSLLQTQACLCYICAGNVEKLVACWTKAQDGSHPLSLQDLIEKVVILRKAVQLTQAMDTSTVGVLLAAKMSQYANLLAAQGSIAAALAFLPDNTNQPNIMQLRDRLCRAQGEPVAGHESPKIPYEKQQLPKGRPGPVAGHHQMPRVQTQQYYPHVRIAPTVTTWSNKTPTALPSHPPAASPSDTQGENPPPPGFIMHGNVNPNAAGQLPTSPGHMHTQVPPYPQPQPYQPAQPYPFGTGGSAMYRPQQPVAPPTSNAYPNTPYISSASSYTGQSQLYAAQHQASSPTSSPATSFPPPPSSGASFQHGGPGAPPSSSAYALPPGTTGTLPAASELPASQRTGPQNGWNDPPALNRVPKKKKMPENFMPPVPITSPIMNPLGDPQSQMLQQQPSAPVPLSSQSSFPQPHLPGGQPFHGVQQPLGQTGMPPSFSKPNIEGAPGAPIGNTFQHVQSLPTKKITKKPIPDEHLILKTTFEDLIQRCLSSATDPQTKRKLDDASKRLEFLYDKLREQTLSPTITSGLHNIARSIETRNYSEGLTMHTHIVSTSNFSETSAFMPVLKVVLTQANKLGV

SEQ ID NO: 48732 - protein, 1156 aa, Homo sapiens [sequence omitted]

SEQ ID NO: 48733 - protein, 1195 aa, Homo sapiens [sequence omitted]

SEQ ID NO: 48734 - protein, 1096 aa, Homo sapiens [sequence omitted]

SEQ ID NO: 48735 - protein, 1057 aa, Homo sapiens
MQAWSPAQNHPIYLATGTSAQQLDATFSTNASLEIFELDLSDPSLDMKSCATFSSSHRYHKLIWGPYKMDSKGDVSGVLIAGGENGNIILYDPSKIIAGDKEVVIAQNDKHTGPVRALDVNIFQTNLVASGANESEIYIWDLNNFATPMTPGAKTQPPEDISCIAWNRQVQHILASASPSGRATVWDLRKNEPIIKVSDHSNRMHCSGLAWHPDVATQMVLASEDDRLPVIQMWDLRFASSPLRVLENHARGILAIAWSMADPELLLSCGKDAKILCSNPNTGEVLYELPTNTQWCFDIQWCPRNPAVLSAASFDGRISVYSIMGGSTDGLRQKQVDKLSSSFGNLDPFGTGQPLPPLQIPQQTAQHSIVLPLKKPPKWIRRPVGASFSFGGKLVTFENVRMPSHQGAEQQQQQHHVFISQVVTEKEFLSRSDQLQQAVQSQGFINYCQKKIDASQTEFEKNVWSFLKVNFEDDSRGKYLELLGYRKEDLGKKHIKEEKEESEFLPSSGGTFNISVSGDIDGLITQALLTGNFESAVDLCLHDNRMADAIILAIAGGQELLARTQKKYFAKSQSKITRLITAVVMKNWKEIVESCDLKNWREALAAVLTYAKPDEFSALCDLLGTRLENEGDSLLQTQACLCYICAGNVEKLVACWTKAQDGSHPLSLQDLIEKVVILRKAVQLTQAMDTSTVGVLLAAKMSQYANLLAAQGSIAAALAFLPDNTNQPNIMQLRDRLCRAQGEPVAGHESPKIPYEKQQLPKGRPGPVAGHHQMPRVQTQQYYPHGENPPPPGFIMHGNVNPNAAGQLPTSPGHMHTQVPPYPQPQRPQNGWNDPPALNRVPKKKKMPENFMPPVPITSPIMNPLGDPQSQMLQQQPSAPVPLSSQSSFPQPHLPGGQPFHGVQQPLGQTGMPPSFSKPNIEGAPGAPIGNTFQHVQSLPTKKITKKPIPDEHLILKTTFEDLIQRCLSSATDPQTKRKLDDASKRLEFLYDKLREQTLSPTITSGLHNIARSIETRNYSEGLTMHTHIVSTSNFSETSAFMPVLKVVLTQANKLGV

SEQ ID NO: 48736 - protein, 867 aa, Homo sapiens
MQAWSPAQNHPIYLATGTSAQQLDATFSTNASLEIFELDLSDPSLDMKSCATFSSSHRYHKLIWGPYKMDSKGDVSGVLIAGGENGNIILYDPSKIIAGDKEVVIAQNDKHTGPVRALDVNIFQTNLVASGANESEIYIWDLNNFATPMTPGAKTQPPEDISCIAWNRQVQHILASASPSGRATVWDLRKNEPIIKVSDHSNRMHCSGLAWHPDVATQMVLASEDDRLPVIQMWDLRFASSPLRVLENHARGILAIAWSMADPELLLSCGKDAKILCSNPNTGEVLYELPTNTQWCFDIQWCPRNPAVLSAASFDGRISVYSIMGGSTDGLRQKQVDKLSSSFGNLDPFGTGQPLPPLQIPQQTAQHSIVLPLKKPPKWIRRPVGASFSFGGKLVTFENVRMPSHQGAEQQQQQHHVFISQVVTEKEFLSRSDQLQQAVQSQGFINYCQKKIDASQTEFEKNVWSFLKVNFEDDSRGKYLELLGYRKEDLGKKIALALNKVDGANVALKDSDQVAQSDGEESPAAEEQLLGEHIKEEKEESEFLPSSGGTFNISVSGDIDGLITQALLTGNFESAVDLCLHDNRMADAIILAIAGGQELLARTQKKYFAKSQSKITRLITAVVMKNWKEIVESCDLKNWREALAAVLTYAKPDEFSALCDLLGTRLENEGDSLLQTQACLCYICAGNVEKLVACWTKAQDGSHPLSLQDLIEKVVILRKAVQLTQAMDTSTVGVLLAAKMSQYANLLAAQGSIAAALAFLPDNTNQPNIMQLRDRLCRAQGEPVAGHESPKIPYEKQQLPKGRPGPVAGHHQMPRVQTQQYYPHGENPPPPGFIMHGNVNPNAAGQLPTSPGHMHTQVPPYPQPQRK

SEQ ID NO: 48737 - protein, 499 aa, Homo sapiens [sequence omitted]

SEQ ID NO: 48738 - protein, 733 aa, Homo sapiens [sequence omitted]

SEQ ID NO: 48739 - protein, 294 aa, Homo sapiens [sequence omitted]

SEQ ID NO: 48740 - protein, 530 aa, Homo sapiens
MLLLLGPLGPLSPGALPRPAQAQDVVDLDFFTQEPLHLVSPSFLSVTIDANLATDPRFLILLGSPKLRTLARGLSPAYLRFGGTKTDFLIFDPKKESTFEERSYWQSQVNQDICKYGSIPPDVEEKLRLEWPYQEQLLLREHYQKKFKNSTYSRSSVDVLYTFANCSGLDLIFGLNALLRTADLQWNSSNAQLLLDYCSSKGYNISWELGNEPNSFLKKADIFINGSQLGEDFIQLHKLLRKSTFKNAKLYGPDVGQPRRKTAKMLKSFLKAGGEVIDSVTWHHYYLNGRTATKEDFLNPDVLDIFISSVQKVFQVVESTRPGKKVWLGETSSAYGGGAPLLSDTFAAGFMWLDKLGLSARMGIEVVMRQVFFGAGNYHLVDENFDPLPDYWLSLLFKKLVGTKVLMASVQGSKRRKLRVYLHCTNTDNPRYKEGDLTLYAINLHNVTKYLRLPYPFSNKQVDKYLLRPLGPHGLLSKSVQLNGLTLKMVDDQTLPPLMEKPLRPGSSLGLPAFSYSFFVIRNAKVAACI

SEQ ID NO: 48741 - protein, 615 aa, Homo sapiens
MSSKQARNHITKGKRQQQHQQIKNRSSISDGDGEDSFIFEANEAWKDFHGSLLRFYENGELCDVTLKVGSKLISCHKLVLACVIPYFRAMFLSEMAEAKQTLIEIRDFDGDAIEDLVKFVYSSRLTLTVDNVQPLLYAACILQVELVARACCEYMKLHFHPSNCLAVRAFAESHNRIDLMDMADQYACDHFTEVVECEDFVSVSPQHLHKLLSSSDLNIENEKQVYNAAIKWLLANPQHHSKWLDETLAQVRLPLLPVDFLMGVVAKEQIVKQNLKCRDLLDEARNYHLHLSSRAVPDFEYSIRTTPRKHTAGVLFCVGGRGGSGDPFRSIECYSINKNSWFFGPEMNSRRRHVGVISVEGKVYAVGGHDGNEHLGSMEMFDPLTNKWMMKASMNTKRRGIALASLGGPIYAIGGLDDNTCFNDVERYDIESDQWSTVAPMNTPRGGVGSVALVNHVYAVGGNDGMASLSSVERYDPHLDKWIEVKEMGQRRAGNGVSKLHGCLYVVGGFDDNSPLSSVERYDPRSNKWDYVAALTTPRGGVGIATVMGKIFAVGGHNGNAYLNTVEAFDPVLNRWELVGSVSHCRAGAGVAVCSCLTSQIRDVGHGSNNVVDCM

SEQ ID NO: 48742 - protein, 130 aa, Homo sapiens [sequence omitted]

SEQ ID NO: 48743 - protein, 910 aa, Homo sapiens
MLVLPALALLSASGTGSAAQDDDFFHELPETFPSDPPEPLPHFLIEPEEAYIVKNKPVNLYCKASPATQIYFKCNSEWVHQKDHIVDERVDETSGLIVREVSIEISRQQVEELFGPEDYWCQCVAWSSAGTTKSRKAYVRIAYLRKTFEQEPLGKEVSLEQEVLLQCRPPEGIPVAEVEWLKNEDIIDPVEDRNFYITIDHNLIIKQARLSDTANYTCVAKNIVAKRKSTTATVIVYVNGGWSTWTEWSVCNSRCGRGYQKRTRTCTNPAPLNGGAFCEGQSVQKIACTTLCPVDGRWTPWSKWSTCGTECTHWRRRECTAPAPKNGGKDCDGLVLQSKNCTDGLCMQTAPDSDDVALYVGIVIAVIVCLAISVVVALFVYRKNHRDFESDIIDSSALNGGFQPVNIKAARQDLLAVPPDLTSAAAMYRGPVYALHDVSDKIPMTNSPILDPLPNLKIKVYNTSGAVTPQDDLSEFTSKLSPQMTQSLLENEALSLKNQSLARQTDPSCTAFGSFNSLGGHLIVPNSGVSLLIPAGAIPQGRVYEMYVTVHRKETMRPPMDDSQTLLTPVVSCGPPGALLTRPVVLTMHHCADPNTEDWKILLKNQAAQGQWEDVVVVGEENFTTPCYIQLDAEACHILTENLSTYALVGHSTTKAAAKRLKLAIFGPLCCSSLEYSIRVYCLDDTQDALKEILHLERQMGGQLLEEPKALHFKGSTHNLRLSIHDIAHSLWKSKLLAKYQEIPFYHVWSGSQRNLHCTFTLERFSLNTVELVCKLCVRQVEGEGQIFQLNCTVSEEPTGIDLPLLDPANTITTVTGPSAFSIPLPIRQKLCSSLDAPQTRGHDWRMLAHKLNLDRYLNYFATKSSPTGVILDLWEAQNFPDGNLSMLAAVLEEMGRHETVVSLAAEGQY

SEQ ID NO: 48744 - protein, 252 aa, Homo sapiens [sequence omitted]

SEQ ID NO: 48745 - protein, 335 aa, Homo sapiens [sequence omitted]

SEQ ID NO: 48746 - protein, 126 aa, Homo sapiens
MPIIVLILVSLLSQLMVSNPPYSLYPRSGTGQTIKMQTENLGVVYYVNKDFKNEYKGMLLQKVEKSVEEDYVTNIRNNCWKERQQKTDMQYAAKVYRDDRLRRKADALSMDNCKELERLTSLYKGG

SEQ ID NO: 48747 - protein, 758 aa, Homo sapiens
MFNRYSFDITNVVRDVNSIELRFQSAVLYAAQQSKAHTRYQVPPDCPPLVQKGECHVNFVRKEQCSFSWDWGPSFPTQGIWKDVRIEAYNICHLNYFTFSPIYDKSAQEWNLEIESTFDVVSSKPVGGQVIVAIPKLQTQQTYSIELQPGKRIVELFVNISKNITVETWWPHGHGNQTGYNMTVLFELDGGLNIEKSAKVYFRTVELIEEPIKGSPGLSFYFKINGFPIFLKGSNWIPADSFQDRVTSELLRLLLQSVVDANMNTLRVWGGGIYEQDEFYELCDELGIMVWQDFMFACALYPTDQGFLDSVTAEVAYQIKRLKSHPSIIIWSGNNENEEALMMNWYHISFTDRPIYIKDYVTLYVKNIRELVLAGDKSRPFITSSPTNGAETVAEAWVSQNPNSNYFGDVHFYDYISDCWNWKVFPKARFASEYGYQSWPSFSTLEKVSSTEDWSFNSKFSLHRQHHEGGNKQMLYQAGLHFKLPQSTDPLRTFKDTIYLTQVMQAQCVKTETEFYRRSRSEIVDQQGHTMGALYWQLNDIWQAPSWASLEYGGKWKMLHYFAQNFFAPLLPVGFENENTFYIYGVSDLHSDYSMTLSVRVHTWSSLEPVCSRVTERFVMKGGEAVCLYEEPVSELLRRCGNCTRESCVVSFYLSADHELLSPTNYHFLSSPKEAVGLCKAQITAIISQQGDIFVFDLETSAVAPFVWLDVGSIPGRFSDNGFLMTEKTRTILFYPWEPTSKNELEQSFHVTSLTDIY

SEQ ID NO: 48748 - protein, 1937 aa, Homo sapiens [sequence omitted]

SEQ ID NO: 48749 - protein, 218 aa, Homo sapiens
MSSDRALRKQQQLNNLVYVVTNQAKPGDRIVDFCSGGGHVGIVLAHMLPSCQVTLIENKELSLIRAKKRSDELGLSNIWFIQANMEYFTGMFNIGVALHACGVATDMVIEHCIKTRASFVTCPCCYGFIQNTSKFNFPKSEQFKKTLSYKEHMILCRFADQTAVQLPPQRRLIGKQCMCLVDLDRARAAEECGYSVQVISMEPESCSPKNNMIVGVPI

SEQ ID NO: 48750 - protein, 263 aa, Homo sapiens [sequence omitted]

SEQ ID NO: 48751 - protein, 571 aa, Homo sapiens [sequence omitted]

SEQ ID NO: 48752 - protein, 8 aa, Homo sapiens
MLGICFTF

SEQ ID NO: 48753 - protein, 293 aa, Homo sapiens
MKGLGTDEESILTLLTSRSNAQRQEISAAFKTLFGRDLLDDLKSELTGKFEKLIVALMKPSRLYDAYELKHALKGAGTNEKVLTEIIASRTPEELRAIKQVYEEEYGSSLEDDVVGDTSGYYQRMLVVLLQANRDPDAGIDEAQVEQDAQALFQAGELKWGTDEEKFITIFGTRSVSHLRKVFDKYMTISGFQIEETIDRETSGNLEQLLLAVVKSIRSIPAYLAETLYYAMKGAGTDDHTLIRVMVSRSEIDLFNIRKEFRKNFATSLYSMIKGDTSGDYKKALLLLCGEDD

SEQ ID NO: 48754 - protein, 355 aa, Homo sapiens
MAAPAFEPGRQSDLLVKLNRLMERCLRNSKCIDTESLCVVAGEKVWQIRVDLHLLNHDGNIIDAASIAAIVALCHFRRPDVSVQGDEVTLYTPEERDPVPLSIHHMPICVSFAFFQQGTYLLVDPNEREERVMDGLLVIAMNKHREICTIQSSGGIMLLKDQVLRCSKIAGVKVAEITELILKALENDQKVRKEGGKFGFAESIANQRITAFKMEKAPIDTSDVEEKAEEIIAEAEPPSEVVSTPVLWTPGTAQIGEGVENSWGDLEDSEKEDDEGGGDQAIILDGIKMDTGVEVSDIGSQDAPIILSDSEEEEMIILEPDKNPKKIRTQTTSAKQEKAPSKKPVKRRKKKRAAN

SEQ ID NO: 48755 - protein, 372 aa, Homo sapiens
MAAPAFEPGRQSDLLVKLNRLMERCLRNSKCIDTESLCVVAGEKVWQIRVDLHLLNHDGNIIDAASIAAIVALCHFRRPDVSVQGDEVTLYTPEERDPVPLSIHHMPICVSFAFFQQGTYLLVDPNEREERVMDGLLVIAMNKHREICTIQSSGGIMLLKDQVLRCSKIAGVKVAEITELILKALENDQKVRKEGGKFGFAESIANQRITAFKMEKAPIDTSDVEEKAEEIIAEAEPPSEVVSTPVLWTPGTAQIGEGVENSWGDLEDSEKEDDEGGGDQAIILDGIKMDTGVEVSDIGSQELGFHHVGQTGLEFLTSDAPIILSDSEEEEMIILEPDKNPKKIRTQTTSAKQEKAPSKKPVKRRKKKRAAN

SEQ ID NO: 48756 - protein, 285 aa, Homo sapiens
MDGSFESPHTMDMSIILEDEKPVSVNEVPDYHEDIHTYLREMEVKCKPKVGYMKKQPDITNSMRAILVDWLVEVGEEYKLQNETLHLAVNYIDRFLSSMSVLRGKLQLVGTAAMLLASKFEEIYPPEVAEFVYITDDTYTKKQVLRMEHLVLKVLTFDLAAPTVNQFLTQYFLHQQPANCKVESLAMFLGELSLIDADPYLKYLPSVIAGAAFHLALYTVTGQSWPESLIRKTGYTLESLKPCLMDLHQTYLKAPQHAQQSIREKYKNSKYHGVSLLNPPETLNL

SEQ ID NO: 48757 - protein, 819 aa, Homo sapiens
MKSANICIGRPVLLTSLNGKQEVYTAWPMAGFPGGKVGLSEMAQKNVGVRPGDAIQVQPLVGAVLQAEEMDVALSDKDMEINEEELTGCILRKLDGKIVLPGNFLYCTFYGRPYKLQVLRVKGADGMILGGPQSDSDTDAQRMAFEQSSMETSSLELSLQLSQLDLEDTQIPTSRSTPYKPIDDRITNKASDVLLDVTQSPGDGSGLMLEEVTGLKCNFESAREGNEQLTEEERLLKFSIGAKCNTDTFYFISSTTRVNFTEIDKNSKEQDNQFKVTYDMIGGLSSQLKAIREIIELPLKQPELFKSYGIPAPRGVLLYGPPGTGKTMIARAVANEVGAYVSVINGPEIISKFYGETEAKLRQIFAEATLRHPSIIFIDELDALCPKREGAQNEVEKRVVASLLTLMDGIGSEVSEGQVLVLGATNRPHALDAALRRPGRFDKEIEIGVPNAQDRLDILQKLLRRVPHLLTEAELLQLANSAHGYVGADLKVLCNEAGLCALRRILKKQPNLPDVKVAGLVKITLKDFLQAMNDIRPSAMREIAIDVPNVSWSDIGGLESIKLKLEQAVEWPLKHPESFIRMGIQPPKGVLLYGPPGCSKTMIAKALANESGLNFLAIKGPELMNKYVGESERAVRETFRKARAVAPSIIFFDELDALAVERGSSLGAGNVADRVLAQLLTEMDGIEQLKDVTILAATNRPDRIDKALMRPGRIDRIIYVPLPDAATRREIFKLQFHSMPVSNEVDLDELILQTDAYSGAEIVAVCREAALLALEEDIQANLIMKRHFTQALSTVTPRIPESLRRFYEDYQEKSGLHTL

SEQ ID NO: 48758 - protein, 1418 aa, Homo sapiens
MAQTSLLQGKQFYCREWVFHKLQHCLQEKSNCCNSAVNAPSLVMNSGNNASGVSGKGAAWGVLLVGGPGSGKTALCTELLWPSSPASLQRGLHRQALAFHFCKAQDSDTLCVGGFIRGLVAQICRSGLLQGYEDKLRDPAVQSLLQPGECERNPAEAFKRCVLLPLLGMKPPQQSLYLLVDSVDEGCNITEGEQTSTSLSGTVAALLAGHHEFFPPWLLLLCSARKQSKAVTKMFTGFRKISLDDLRKAYIVKDVQQYILHRLDQEEALRQHLTKETAEMLNQLHIKSSGCFLYLERVLDGVVENFIMLREIRDIPGTLNGLYLWLCQRLFVRKQFAKVQPILNVILAACRPLTITELYHAVWTKNMSLTLEDFQRKLDILSKLLVDGLGNTKILFHYSFAEWLLDVKHCTQKYLCNAAEGHRMLAMSYTCQAKNLTPLEAQEFALHLINSNLQLETAELALWMIWNGTPVRDSLSTLIPKEQEVLQLLVKAGAHVNSEDDRTSCIVRQALEREDSIRTLLDNGASVNQCDSNGRTLLANAAYSGSLDVVNLLVSRGADLEIEDAHGHTPLTLAARQGHTKVVNCLIGCGANINHTDQDGWTALRSAAWGGHTEVVSALLYAGVKVDCADADSRTALRAAAWGGHEDIVLNLLQHGAEVNKADNEGRTALIAAAYMGHREIVEHLLDHGAEVNHEDVDGRTALSVAALCVPASKGHASVVSLLIDRGAEVDHCDKDGMTPLLVAAYEGHVDVVDLLLEGGADVDHTDNNGRTPLLAAASMGHASVVNTLLFWGAAVDSIDSEGRTVLSIASAQGNVEVVRTLLDRGLDENHRDDAGWTPLHMAAFEGHRLICEALIEQGARTNEIDNDGRIPFILASQEGHYDCVQILLENKSNIDQRGYDGRNALRVAALEGHRDIVELLFSHGADVNCKDADGRPTLYILALENQLTMAEYFLENGANVEASDAEGRTALHVSCWQGHMEMVQVLIAYHADVNAADNEKRSALQSAAWQGHVKVVQLLIEHGAVVDHTCNQGATALCIAAQEGHIDVVQVLLEHGADPNHADQFGRTAMRVAAKNGHSQIIKLLEKYGASSLNGCSPSPVHTMEQKPLQSLSSKVQSLTIKSNSSGSTGGGDMQPSLRGLPNGPTHAFSSPSESPDSTVDRQKSSLSNNSLKSSKNSSLRTTSSTATAQTVPIDSFHNLSFTEQIQQHSLPRSRSRQSIVSPSSTTQSLGQSHNSPSSEFEWSQVKPSLKSTKASKGGKSENSAKSGSAGKKAKQSNSSQPKVLEYEMTQFDRRGPIAKSGTAAPPKQMPAESQCKIMIPSAQQEIGRSQQQFLIHQQSGEQKKRNGIMTNPNYHLQSNQVFLGRVSVPRTMQDRGHQEVLEGYPSSETELSLKQALKLQIEGSDPSFNYKKETPL

SEQ ID NO: 48759 - protein, 7 aa, Homo sapiens
MPETGTI

SEQ ID NO: 48760 - protein, 154 aa, Homo sapiens
MQVKLTFENAYDVKRETSHPRQKKTQSNTSDLVKLLWGEEVEGIQQSGLNTPHIIMYLTLQLDSETSKEEQEILYHYPMSEASQKLKSVRGIFLTLCDMLENVTGTQVTSSSLLLNGKQIHVAYWKESDKLLLIGLPAEEIELPSSAHTHGERN

SEQ ID NO: 48761 - protein, 28 aa, Homo sapiens
MPFEETFPILHLPKVMLLTYYLSVSSVL

SEQ ID NO: 48762 - protein, 665 aa, Homo sapiens [sequence omitted]

SEQ ID NO: 48763 - protein, 466 aa, Homo sapiens
MESFSKYSSVQKAVCQGEGDDTFENLVFDQSFLAPLVTEYDKHLGELNGQLKYYQKQVGEMKLQLENVIKENERLHSELKDAVEKKLEAFPLGTEVGTDIYADDETVRNLQEQLQLANQEKTQAVELWQTVSQELDRLHKLYQEHMTEAQIHVFESQKQKDQLFDFQQLTKQLHVTNENMEVTNQQFLKTVTEQSVIIEQLRKKLRQAKLELRVAVAKVEELTNVTEDLQGQMKKKEKDVVSAHGREEASDRRLQQLQSSIKQLEIRLCVTIQEANQLRTENTHLEKQTRELQAKCNELENERYEAIVRARNSMQLLEEANLQKSQALLEEKQKEEDIEKMKETVSRFVQDATIRTKKEVANTKKQCNIQISRLTEELSALQMECAEKQGQIERVIKEKKAVEEELEKIYREGRGNESDYRKLEEMHQRFLVSERSKDDLQLRLTRAENRIKQLETESVQWNMNFQ

SEQ ID NO: 48764 - protein, 281 aa, Homo sapiens [sequence omitted]

SEQ ID NO: 48765 - protein, 621 aa, Homo sapiens
MNKWVRCICDICGFNPTEEDPVKPPGSSLQAPADLPLAINTAPPSTQADSSSATLPPPYQLINVPPHLETLGIQEDPQDYLLLINCQSKKPEPTRTHADSAKSTSSETDCNDNVPSHKNPASSQSKHGMNGFFQQQMIYDSPPSRAPSASVDSSLYNLPRSYSHDVLPKVSPSSTEADGELYVFNTPSGTSSVETQMRHVSISYDIPPTPGNTYQIPRTFPEGTLGQTSKLDTIPDIPPPRPPKPHPAHDRSPVETCSIPRTASDTDSSYCIPTAGMSPSRSNTISTVDLNKLRKDASSQDCYDIPRAFPSDRSSSLEGFHNHFKVKNVLTVGSVSSEELDENYVPMNPNSPPRQHSSSFTEPIQEANYVPMTPGTFDFSSFGMQVPPPAHMGFRSSPKTPPRRPVPVADCEPPPVDRNLKPDRKGQSPKILRLKPHGLERTDSQTIGDFATRRKVKPAPLEIKPLPEWEELQAPVRSPITRSFARDSSRFPMSPRPDSVHSTTSSSDSHDSEENYVPMNPNLSSEDPNLFGSNSLDGGSSPMIKPKGDKQVEYLDLDLDSGKSTPPRKQKSSGSGSSVADERVDYVVVDQQKTLALKSTREAWTDGRQSTESETPAKSVK

SEQ ID NO: 48766 - protein, 995 aa, Homo sapiens [sequence omitted]

SEQ ID NO: 48767 - protein, 1115 aa, Homo sapiens
MRFESFSSPFSSQSASSTLAALSKKVSERSLTPGQEHPPPASSFLSLASMTSSAALLKEVAARAAGSLLAEKSSLLPEDPLPPPPSEKKPEKVTPPPPPPPPPPPPPPPQSLELLLLPVPKGRVSKPSNSASEEESGKPFQCPICGLVIKRKSYWKRHMVIHTGLKSHQCPLCPFRCARKDNLKSHMKVHQHQDRGETFQCQLCPFTSSRHFSLKLHMRCHQHFLRTEAKVKEEIPDPDVKGSPHLSDSACLGQQREGGGTELVGTMMTSNTPERTSQGGAGVSPLLVKEEPKEDNGLPTSFTLNAADRPANHTKLKDPSEYVANSASALFSQDISVKMASDFLMKLSAANQKEPMNLNFKVKEEPKEGESLSTTLPRSSYVFSPESEVSAPGVSEDALKPQEGKGSVLRRDVSVKAASELLMKLSAESYKETQMVKIKEEPMEVDIQDSHVSISPSRNVGYSTLIGREKTEPLQKMPEGRVPPERNLFSQDISVKMASELLFQLSEKVSKEHNHTKENTIRTTTSPFFSEDTFRQSPFTSNSKELLPSDSVLHGRISAPETEKIVLEAGNGLPSWKFNDQLFPCDVCGKVFGRQQTLSRHLSLHTEERKYKCHLCPYAAKCRANLNQHLTVHSVKLVSTDTEDIVSAVTSEGSDGKKHPYYYSCHVCGFETELNVQFVSHMSLHVDKEQWMFSICCTACDFVTMEEAEIKTHIGTKHTGEDRKTPSESNSPSSSSLSALSDSANSKDDSDGSQKNKGGNNLLVISVMPGSQPSLNSEEKPEKGFECVFCNFVCKTKNMFERHLQIHLITRMFECDVCHKFMKTPEQLLEHKKCHTVPTGGLKCPFCIYSTNRPAAMECHLKTHYKMEYKCRICQTVKANQLELETHTREHRLGNHYKCDQCGYLSKTANKLIEHVRVHTGERPFHCDQCSYSCKRKDNLNLHKKLKHAPRQTFSCEECLFKTTHPFVFSRHVKKHQSGDCPEEDKKGLCPAPKEPAGPGAPLLVVGSSRNLLSPLSVMSASQALQTVALSAAHGSSSEPNLALKALAFNGSPLRFDKYRNSDFAHLIPLTMLYPKNHLDLTFHPPRPQTAPPSIPSPKHSFLAYLGLRERAETV

SEQ ID NO: 48768 - protein, 847 aa, Homo sapiens
MRFESFSSPFSSQSASSTLAALSKKVSERSLTPGQEHPPPASSFLSLASMTSSAALLKEVAARAAGSLLAEKSSLLPEDPLPPPPSEKKPEKVTPPPPPPPPPPPPPPPQSLELLLLPVPKGRVSKPSNSASEEESGKPFQCPICGLVIKRKSYWKRHMVIHTGLKSHQCPLCPFRCARKDNLKSHMKVHQHQDRGETFQCQLCPFTSSRHFSLKLHMRCHQHFLRTEAKVKEEIPDPDVKGSPHLSDSACLGQQREGGGTELVGTMMTSNTPERTSQGGAGVSPLLVKEEPKEDNGLPTSFTLNAADRPANHTKLKDPSEYVANSASALFSQDISVKMASDFLMKLSAANQKEPMNLNFKVKEEPKEGESLSTTLPRSSYVFSPESEVSAPGVSEDALKPQEGKGSVLRRDVSVKAASELLMKLSAESYKETQMVKIKEEPMEVDIQDSHVSISPSRNVGYSTLIGREKTEPLQKMPEGRVPPERNLFSQDISVKMASELLFQLSEKVSKEHNHTKENTIRTTTSPFFSEDTFRQSPFTSNSKELLPSDSVLHGRISAPETEKIVLEAGNGLPSWKFNDQLFPCDVCGKVFGRQQTLSRHLSLHTEERKYKCHLCPYAAKCRANLNQHLTVHSVKLVSTDTEDIVSAVTSEGSDGKKHPYYYSCHVCGFETELNVQFVSHMSLHVDKEQWMFSICCTACDFVTMEEAEIKTHIGTKHTGEDRKTPSESNSPSSSSLSALSDSANSKDDSDGSQKNKGGNNLLVISVMPGSQPSLNSEEKPEKGFECVFCNFVCKTKNMFERHLQIHLITRMFECDVCHKFMKTPEQLLEHKKCHTVPTGGLNSGQW

SEQ ID NO: 48769 - protein, 732 aa, Homo sapiens
MGFRDEAAGYFHKAVKLNPDFSDAKENFYRVANWLVERWHFIMLNDTKRNTIYNAAIQKAVCLGSKSVLDIGAGTGILSMFAKKAGAHSVYACELSKTMYELACDVVAANKMEAGIKLLHTKSLDIEIPKHIPERVSLVVTETVDAGLFGEGIVESLIHAWEHLLLQPKTKGESANCEKYGKVIPASAVIFGMAVECAEIRRHHRVGIKDIAGIHLPTNVKFQSPAYSSVDTEETIEPYTTEKMSRVPGGYLALTECFEIMTVDFNNLQELKSLATKKPDKIGIPVIKEGILDAIMVWFVLQLDDEHSLSTSPSEETCWEQAVYPVQDLADYWIKPGDHVMMEVSCQDCYLRIQSISVLGLECEMDVAKSFTQNKDLLSLGNEAELCSALANLQTSKPDAVEQTCILESTEIALLNNIPYHEGFKMAMSKVLSSLTPEKLYQTMDTHCQNEMSSGTGQSNTVQNILEPFYVLDVSEGFSVLPVIAGTLGQVKPYSSVEKDQHRIALDLISEANHFPKETLEFWLRHVEDESAMLQRPKSDKLWSIIILDVIEPSGLIQQEIMEKAAISRCLLQSGGKIFPQYVLMFGLLVESQTLLEENAVQGTERTLGLNIAPFINQFQVPIRVFLDLSSLPCIPLSKPVELLRLDLMTPYLNTSNREVKVYVCKSGRLTAIPFWYHMYLDEEIRLDTSSEASHWKQAAVVLDNPIQVEMGEELVLSIQHHKSNVSITVKQ

SEQ ID NO: 48770 - protein, 2806 aa, Homo sapiens
MKFAVLTGLVEVGEVSNRDIVETVFNLLVGGQFDLEMNFIIQEGESINCMVDLLEKCDITCQAEVWSMFTAILKKSIRNLQVCTEVGLVEKVLGKIEKVDNMIADLLVDMLGVLASYNLTVRELKLFFSKLQGDKGRWPPHAGKLLSVLKHMPQKYGPDAFFNFPGKSAAAIALPPIAKWPYQNGFTFHTWLRMDPVNNINVDKDKPYLYCFRTSKGLGYSAHFVGGCLIVTSIKSKGKGFQHCVKFDFKPQKWYMVTIVHIYNRWKNSELRCYVNGELASYGEITWFVNTSDTFDKCFLGSSETADANRVFCGQMTAVYLFSEALNAAQIFAIYQLGLGYKGTFKFKAESDLFLAEHHKLLLYDGKLSSAIAFTYNPRATDAQLCLESSPKDNPSIFVHSPHALMLQDVKAVLTHSIQSAMHSIGGVQVLFPLFAQLDYRQYLSDEIDLTICSTLLAFIMELLKNSIAMQEQMLACKGFLVIGYSLEKSSKSHVSRAVLELCLAFSKYLSNLQNGMPLLKQLCDHVLLNPAIWIHTPAKVQLMLYTYLSTEFIGTVNIYNTIRRVGTVLLIMHTLKYYYWAVNPQDRSGITPKGLDGPRPNQKEMLSLRAFLLMFIKQLVMKDSGVKEDELQAILNYLLTMHEDDNLMDVLQLLVALMSEHPNSMIPAFDQRNGLRVIYKLLASKSEGIRVQALKAMGYFLKHLAPKRKAEVMLGHGLFSLLAERLMLQTNLITMTTYNVLFEILIEQIGTQVIHKQHPDPDSSVKIQNPQILKVIATLLRNSPQCPESMEVRRAFLSDMIKLFNNSRENRRSLLQCSVWQEWMLSLCYFNPKNSDEQKITEMVYAIFRILLYHAVKYEWGGWRVWVDTLSITHSKVTFEIHKENLANIFREQQGKVDEEIGLCSSTSVQAASGIRRDINVSVGSQQPDTKDSPVCPHFTTNGNENSSIEKTSSLESASNIELQTTNTSYEEMKAEQENQELPDEGTLEETLTNETRNADDLEVSSDIIEAVAISSNSFITTGKDSMTVSEVTASISSPSEEDASEMPEFLDKSIVEEEEDDDYVELKVEGSPTEEANLPTELQDNSLSPAASEAGEKLDMFGNDDKLIFQEGKPVTEKQTDTETQDSKDSGIQTMTASGSSAMSPETTVSQIAVESDLGQMLEEGKKATNLTRETKLINDCHGSVSEASSEQKIAKLDVSNVATDTERLELKASPNVEAPQPHRHVLEISRQHEQPGQGIAPDAVNGQRRDSRSTVFRIPEFNWSQMHQRLLTDLLFSIETDIQMWRSHSTKTVMDFVNSSDNVIFVHNTIHLISQVMDNMVMACGGILPLLSAATSATHELENIEPTQGLSIEASVTFLQRLISLVDVLIFASSLGFTEIEAEKSMSSGGILRQCLRLVCAVAVRNCLECQQHSQLKTRGDKALKPMHSLIPLGKSAAKSPVDIVTGGISPVRDLDRLLQDMDINRLRAVVFRDIEDSKQAQFLALAVVYFISVLMVSKYRDILEPQNERHSQSCTETGSENENVSLSEITPAAFSTLTTASVEESESTSSARRRDSGIGEETATGLGSHVEVTPHTAPPGVSAGPDAISEVLSTLSLEVNKSPETKNDRGNDLDTKATPSVSVSKNVNVKDILRSLVNIPADGVTVDPALLPPACLGALGDLSVEQPVQFRSFDRSVIVAAKKSAVSPSTFNTSIPTNAVSVVSSVDSAQASDMGGESPGSRSSNAKLPSVPTVDSVSQDPVSNMSITERLEHALEKAAPLLREIFVDFAPFLSRTLLGSHGQELLIEGTSLVCMKSSSSVVELVMLLCSQEWQNSIQKNAGLAFIELVNEGRLLSQTMKDHLVRVANEAEFILSRQRAEDIHRHAEFESLCAQYSADKREDEKMCDHLIRAAKYRDHVTATQLIQKIINILTDKHGAWGNSAVSRPLEFWRLDYWEDDLRRRRRFVRNPLGSTHPEATLKTAVEHATDEDILAKGKQSIRSQALGNQNSENEILLEGDDDTLSSVDEKDLENLAGPVSLSTPAQLVAPSVVVKGTLSVTSSELYFEVDEEDPNFKKIDPKILAYTEGLHGKWLFTEIRSIFSRRYLLQNTALEIFMANRVAVMFNFPDPATVKKVVNYLPRVGVGTSFGLPQTRRISLASPRQLFKASNMTQRWQHREISNFEYLMFLNTIAGRSYNDLNQYPVFPWVITNYESEELDLTLPTNFRDLSKPIGALNPKRAAFFAERYESWEDDQVPKFHYGTHYSTASFVLAWLLRIEPFTTYFLNLQGGKFDHADRTFSSISRAWRNSQRDTSDIKELIPEFYYLPEMFVNFNNYNLGVMDDGTVVSDVELPPWAKTSEEFVHINRLALESEFVSCQLHQWIDLIFGYKQQGPEAVRALNVFYYLTYEGAVNLNSITDPVLREAVEAQIRSFGQTPSQLLIEPHPPRGSAMQVSPLMFTDKAQQDVIMVLKFPSNSPVTHVAANTQPGLATPAVITVTANRLFAVNKWHNLPAHQGAVQDQPYQLPVEIDPLIASNTGMHRRQITDLLDQSIQVHSQCFVITSDNRYILVCGFWDKSFRVYSTDTGRLIQVVFGHWDVVTCLARSESYIGGNCYILSGSRDATLLLWYWNGKCSGIGDNPGETAAPRAILTGHDYEVTCAAVCAELGLVLSGSQEGPCLIHSMNGDLLRTLEGPENCLKPKLIQASREGHCVIFYENGLFCTFSVNGKLQATMETDDNIRAIQLSRDGQYLLTGGDRGVVVVRQVSDLKQLFAYPGCDAGIRAMALSYDQRCIISGMASGSIVLFYNDFNRWHHEYQTRY

SEQ ID NO: 48771 - protein, 809 aa, Homo sapiens
MNLLHFVAQEAQKKDTILLNFSEKLHHVQKTARLSLENTEAELHLLFVRTKSLKENIQRDGELCQQMEDFLQFAIEKLRELECWKQELQDEAYTLIDFFCEDKKTMKLDECFQIFRDFCTKFNKAVKDNHDREAQELRQLQRLKEQEQKQRSWATGELGAFGRSSSENDVELLTKKGAEGLLPFLHPRPISPSSPSYRPPNTRRSRLSLGPSADRELLTFLESSTGSPEEPNKFHSLPRSSPRQARPTIACLEPAEVRHQDSSFAHKPQASGGQEEAPNPPSAQAHQLAAAQPENHASAFPRARRQGVSVLRKRYSEPVSLGSAQSPPLSPLALGIKEHELVTGLAQFNLQGSQGMEETSQLTLSDFSPMELESVGHRGPQSLSASSSSLTPMGRDALGSLSPALEDGKAAPDEPGSAALGSVGSSDPENKDPRPLFCISDTTDCSLTLDCSEGTDSRPRGGDPEEGGEGDGSMSSGVGEMGDSQVSSNPTSSPPGEAPAPVSVDSEPSCKGGLPRDKPTKRKDVVAPKRGSLKEASPGASKPGSARRSQGAVAKSVRTLTASENESMRKVMPITKSSRGAGWRRPELSSRGPSQNPPSSTDTVWSRQNSVRRASTGAEEQRLPRGSSGSSSTRPGRDVPLQPRGSFKKPSAKPLRNLPRQKPEENKTCRAHSEGPESPKEEPKTPSVPSVPHELPRVPSFARNTVASSSRSMRTDLPPVAKAPGITRTVSQRQLRVKGDPEDAAPKDSSTLRRASSARAPKKRPESAEGPSANTEAPLKARGAGERASLRRKDSSRTTLGRILNPLRK

SEQ ID NO: 48772 - protein, 8 aa, Homo sapiens
MTYASMIL

SEQ ID NO: 48773 - protein, 973 aa, Homo sapiens
MFGSVAMSYKGSTLKIHYIRSPPQLMISKVFSARMGSFCGSTNNLQDSFEYINQDPNLGKLNTNQNSLGPCRTGSNLAHSTPVDMPSRGQNEDRDSGIARSASLSSLLITPFPSPSSSTSSSSSYQRRWLRSQTTSLENGIIPRRSTDETFSLAEETCSSNPAMVRRKKIAISIIFSLCEKEEAQRNFQDFFFSHFPLFESHMNRLKSAIEKAMISCRKIAESSLRVQFYVSRLMEALGEFRGTIWNLYSVPRIAEPVWLTMMSGTLEKNQLCQRFLKEFTLLIEQINKNQFFAALLTAVLTYHLAWVPTVMPVDHPPIKAFSEKRTSQSVNMLAKTHPYNPLWAQLGDLYGAIGSPVRLTRTVVVGKQKDLVQRILYVLTYFLRCSELQENQLTWSGNHGEGDQVLNGSKIITALEKGEVEESEYVVITVRNEPALVPPILPPTAAERHNPWPTGFPECPEGTDSRDLGLKPDKEANRRPEQGSEACSAGCLGPASDASWKPQNAFCGDEKNKEAPQDGSSRLPSCEVLGAGMKMDQQAVCELLKVEMPTRLPDRSVAWPCPDRHLREKPSLEKVTFQIGSFASPESDFESRMKKMEERVKACGPSLEASEAADVAQDPQVSRSPFKPGFQENVCCPQNRLSEGDEGESDKGFAEDRGSRNDMAADIAGQLSHAADLGTASHGAGGTGGRRLEATRGLYVKAAEGPVLEPVAPRCVQRGPGLVAGANIPCGDDNKKANFRTEGDIPRNESSDSALGDSDDEACASAMLDLGHGGDRTGGSLEVELPLPRSQSISTQNVRNFGRSLLAGYCPTYMPDLVLHGTGSDEKLKQCLVADLVHTVHHPVLDEPIAEAVCIIADTDKWSVQVATSQRKVTDNMKLGQDVLVSSQVSSLLQSILQLYKLHLPADFCIMHLEDRLQEMYLKSKMLSEYLRGHTRVHVKELGVVLGIESNDLPLLTAIASTHSPYVAQILL

SEQ ID NO: 48774 - protein, 87 aa, Homo sapiens [sequence omitted]

SEQ ID NO: 48775 - protein, 661 aa, Homo sapiens
MQSSGSFNYARPKQFIAAQNLGPASGHGTPASSPSSSSLPSPMSPTPRQFGRAPVPPFAQPFGAEPEAPWGSSSPSPPPPPPPVFSPTAAFPVPDVFPLPPPPPPLPSPGQASHCSSPATRFGHSQTPAAFLSALLPSQPPPAAVNALGLPKGVTPAGFPKKASRTARIASDEEIQGTKDAVIQDLERKLRFKEDLLNNGQPRLTYEERMARRLLGADSATVFNIQEPEEETANQEYKVSSCEQRLISEIEYRLERSPVDESGDEVQYGDVPVENGMAPFFEMKLKHYKIFEGMPVTFTCRVAGNPKPKIYWFKDGKQISPKSDHYTIQRDLDGTCSLHTTASTLDDDGNYTIMAANPQGRISCTGRLMVQAVNQRGRSPRSPSGHPHVRRPRSRSRDSGDENEPIQERFFRPHFLQAPGDLTVQEGKLCRMDCKVSGLPTPDLSWQLDGKPVRPDSAHKMLVRENGVHSLIIEPVTSRDAGIYTCIATNRAGQNSFSLELVVAAKEAHKPPVFIEKLQNTGVADGYPVRLECRVLGVPPPQIFWKKENESLTHSTDRVSMHQDNHGYICLLIQGATKEDAGWYTVSAKNEAGIVSCTARLDVYTQWHQQSQSTKPKKVRPSASRYAALSDQGLDIKAAFQPEANPSHLTLNTALVESEDL

SEQ ID NO: 48776 - protein, 1219 aa, Homo sapiens
MSSKEREESRREVAVLANMKHPNIVQYRESFEENGSLYIVMDYCEGGDLFKRINAQKGVLFQEDQILDWFVQICLALKHVHDRKILHRDIKSQNIFLTKDGTVQLGDFGIARVLNSTVELARTCIGTPYYLSPEICENKPYNNKSDIWALGCVLYELCTLKHAFEAGSMKNLVLKIISGSFPPVSLHYSYDLRSLVSQLFKRNPRDRPSVNSILEKGFIAKRIEKFLSPQLIAEEFCLKTFSKFGSQPIPAKRPASGQNSISVMPAQKITKPAAKYGIPLAYKKYGDKKLHEKKPLQKHKQAHQTPEKRVNTGEERRKISEEAARKRRLEFIEKEKKQKDQIISLMKAEQMKRQEKERLERINRAREQGWRNVLSAGGSGEVKAPFLGSGGTIAPSSFSSRGQYEHYHAIFDQMQQQRAEDNEAKWKREIYGRGLPERGILPGVRPGFPYGAAGHHHFPDADDIRKTLKRLKAVSKQANANRQKGQLAVERAKQVEEFLQRKREAMQNKARAEGHMVYLARLRQIRLQNFNERQQIKAKLRGEKKEANHSEGQEGSEEADMRRKKIESLKAHANARAAVLKEQLERKRKEAYEREKKVWEEHLVAKGVKSSDVSPPLGQHETGGSPSKQQMRSVISVTSALKEVGVDSSLTDTRETSEEMQKTNNAISSKREILRRLNENLKAQEDEKGKQNLSDTFEINVHEDAKEHEKEKSVSSDRKKWEAGGQLVIPLDELTLDTSFSTTERHTVGEVIKLGPNGSPRRAWGKSPTDSVLKILGEAELQLQTELLENTTIRSEISPEGEKYKPLITGEKKVQCISHEINPSAIVDSPVETKSPEFSEASPQMSLKLEGNLEEPDDLETEILQEPSGTNKDESLPCTITDVWISEEKETKETQSADRITIQENEVSEDGVSSTVDQLSDIHIEPGTNDSQHSKCDVDKSVQPEPFFHKVVHSEHLNLVPQVQSVQCSPEESFAFRSHSHLPPKNKNKNSLLIGLSTGLFDANNPKMLRTCSLPDLSKLFRTLMDVPTVGDVRQDNLEIDEIEDENIKEGPSDSEDIVFEETDTDLQELQASMEQLLREQPGEEYSEEEESVLKNSDVEPTANGTDVADEDDNPSSESALNEEWHSDNSDGEIASECECDSVFNHLEELRLHLEQEMGFEKFFEVYEKIKAIHEDEDENIEICSKIVQNILGNEHQHLYAKILHLVMADGAYQEDNDE

SEQ ID NO: 48777 - protein, 1175 aa, Homo sapiens
MSSKEREESRREVAVLANMKHPNIVQYRESFEENGSLYIVMDYCEGGDLFKRINAQKGVLFQEDQILDWFVQICLALKHVHDRKILHRDIKSQNIFLTKDGTVQLGDFGIARVLNSTVELARTCIGTPYYLSPEICENKPYNNKSDIWALGCVLYELCTLKHAFEAGSMKNLVLKIISGSFPPVSLHYSYDLRSLVSQLFKRNPRDRPSVNSILEKGFIAKRIEKFLSPQLIAEEFCLKTFSKFGSQPIPAKRPASGQNSISVMPAQKITKPAAKYGIPLAYKKYGDKKLHEKKPLQKHKQAHQTPEKRVNTGEERRKISEEAARKRRLEFIEKEKKQKDQIISLMKAEQMKRQEKERLERINRAREQGWRNVLSAGGSGEVKAPFLGSGGTIAPSSFSSRGQYEHYHAIFDQMQQQRAEDNEAKWKREIYGRGLPERQKGQLAVERAKQVEEFLQRKREAMQNKARAEGHMVYLARLRQIRLQNFNERQQIKAKLRGEKKEANHSEGQEGSEEADMRRKKIESLKAHANARAAVLKEQLERKRKEAYEREKKVWEEHLVAKGVKSSDVSPPLGQHETGGSPSKQQMRSVISVTSALKEVGVDSSLTDTRETSEEMQKTNNAISSKREILRRLNENLKAQEDEKGKQNLSDTFEINVHEDAKEHEKEKSVSSDRKKWEAGGQLVIPLDELTLDTSFSTTERHTVGEVIKLGPNGSPRRAWGKSPTDSVLKILGEAELQLQTELLENTTIRSEISPEGEKYKPLITGEKKVQCISHEINPSAIVDSPVETKSPEFSEASPQMSLKLEGNLEEPDDLETEILQEPSGTNKDESLPCTITDVWISEEKETKETQSADRITIQENEVSEDGVSSTVDQLSDIHIEPGTNDSQHSKCDVDKSVQPEPFFHKVVHSEHLNLVPQVQSVQCSPEESFAFRSHSHLPPKNKNKNSLLIGLSTGLFDANNPKMLRTCSLPDLSKLFRTLMDVPTVGDVRQDNLEIDEIEDENIKEGPSDSEDIVFEETDTDLQELQASMEQLLREQPGEEYSEEEESVLKNSDVEPTANGTDVADEDDNPSSESALNEEWHSDNSDGEIASECECDSVFNHLEELRLHLEQEMGFEKFFEVYEKIKAIHEDEDENIEICSKIVQNILGNEHQHLYAKILHLVMADGAYQEDNDE

SEQ ID NO: 48778 - protein, 404 aa, Homo sapiens
MTDILSRGPKSMISLAGGLPNPNMFPFKTAVITVENGKTIQFGEEMMKRALQYSPSAGIPELLSWLKQLQIKLHNPPTIHYPPSQGQMDLCVTSGSQQGLCKVFEMIINPGDNVLLDEPAYSGTLQSLHPLGCNIINVASDESGIVPDSLRDILSRWKPEDAKNPQKNTPKFLYTVPNGNNPTGNSLTSERKKEIYELARKYDFLIIEDDPYYFLQFNKFRVPTFLSMDVDGRVIRADSFSKIISSGLRIGFLTGPKPLIERVILHIQVSTLHPSTFNQLMISQLLHEWGEEGFMAHVDRVIDFYSNQKDAILAAADKWLTGLAEWHVPAAGMFLWIKVKGINDVKELIEEKAVKMGVLMLPGNAFYVDSSAPSPYLRASFSSASPEQMDVAFQVLAQLIKESL

SEQ ID NO: 48779 - protein, 162 aa, Homo sapiens
MAALTFGCFITTAFKDRSVPVRLHVSRIMLKNVEDFTGPRERSDLGFITFDITADLENIFDWNVKQLFLYLSAEYSTKNNALNQVVLWDKIVLRGDNPKLLLKDMKTKYFFFDDGNGLKGNRNVTLTLSWNVVPNAGILPLVTGSGHVSVPFPDTYEITKSY

SEQ ID NO: 48780 - protein, 123 aa, Homo sapiens [sequence omitted]

SEQ ID NO: 48781 - protein, 325 aa, Homo sapiens
MTQSTDSRQQSGSPKKSALEGSSASASQSSSEIEVPLLGSSGSSEVELPLLSSKPSSETASSGLTSKTSSEASVSSSVAKNSSSSGTSLLTPKSSSSTNTSLLTSKSTSQVAASLLASKSSSQTSGSLVSKSTSLASVSQLASKSSSQTSTSQLPSKSTSQSSESSVKFSCKLTNEDVKQKQPFFNRLYKTVAWKLVAVGGFSPNVNHGELLNAAIEALKATLDVFFVPLKELADLPQNKSSQESIVCELRCKSVYLGTGCGKSKENAKAVASREALKLFLKKKVVVKICKRKYRGSEIEDLVLLDEESRPVNLPPALKHPQELL

SEQ ID NO: 48782 - protein, 344 aa, Homo sapiens [sequence omitted]

SEQ ID NO: 48783 - protein, 328 aa, Homo sapiens
MFTEKATEESWTSNSKKLERLGSAEQSSPDLSFLVVKNNMGEKHLFVDLGVYTRNRNFRLYKSSKIGKRVALEVTEDNKFFPIQSKDVSDEYQYFLSSLVSNVRFSDTLRILTCEPSQNKQKGVGYFNSIGTSVETIEGFQCSPYPEVDHFVLSLVNKDGIKGGIRRWNYFFPEELLVYDICKYRWCENIGRAHKSNNIMILVDLKNEVWYQKCHDPVCKAENFKSDCFPLPAEVCLLFLFKEEEEFTTDEADETRSNETQNPHKPSPSRLSTGASADAVWDNGIDDAYFLEATEDAELAEAAENSLLSYNSEVDEIPDELIIEVLQE

SEQ ID NO: 48784 - protein, 257 aa, Homo sapiens [sequence omitted]

SEQ ID NO: 48785 - protein, 333 aa, Homo sapiens [sequence omitted]

SEQ ID NO: 48786 - protein, 727 aa, Homo sapiens
MLQRPDQLDKVEQYRRREARKKASVEARLKAAIQSQLDGVRTGLSQLHNALNDVKDIQQSLADVSKDWRQSINTIESLKDVKDAVVQHSQLAAAVENLKNIFSVPEIVRETQDLIEQGALLQAHRKLMDLECSRDGLMYEQYRMDSGNTRDMTLIHGYFGSTQGLSDELAKQLWMVLQRSLVTVRRDPTLLVSVVRIIEREEKIDRRILDRKKQTGFVPPGRPKNWKEKMFTILERTVTTRIEGTQADTRESDKMWLVRHLEIIRKYVLDDLIVAKNLMVQCFPPHYEIFKNLLNMYHQALSTRMQDLASEDLEANEIVSLLTWVLNTYTSTEMMRNVELAPEVDVGTLEPLLSPHVVSELLDTYMSTLTSNIIAWLRKALETDKKDWVKETEPEADQDGYYQTTLPAIVFQMFEQNLQVAAQISEDLKTKVLVLCLQQMNSFLSRYKDEAQLYKEEHLRNRQHPHCYVQYMIAIINNCQTFKESIVSLKRKYLKNEVEEGVSPSQPSMDGILDAIAKEGCSGLLEEVFLDLEQHLNELMTKKWLLGSNAVDIICVTVEDYFNDFAKIKKPYKKRMTAEAHRRVVVEYLRAVMQKRISFRSPEERKEGAEKMVREAEQLRFLFRKLASGFGEDVDGYCDTIVAVAEVIKLTDPSLLYLEVSTLVSKYPDIRDDHIGALLAVRGDASRDMKQTIMETLEQGPAQASPSYVPLFKDIVVPSLNVAKLLK

SEQ ID NO: 48787 - protein, 389 aa, Homo sapiens
MGSQYELKDNPGVHPATFAAHTAPAYYPYGQFQYGDPGRPKNATRESTSTLKAWLNEHRKNPYPTKGEKIMLAIITKMTLTQVSTWFANARRRLKKENKVTWGARSKDQEDGALFGSDTEGDPEKAEDDEEIDLESIDIDKIDEHDGDQSNEDDEDKAEAPHAPAAPSALARDQGSPLAAADVLKPQDSPLGLAKEAPEPGSTRLLSPGAAAGGLQGAPHGKPKIWSLAETATSPDGAPKASPPPPAGHPGAHGPSAGAPLQHPAFLPSHGLYTCHIGKFSNWTNSAFLAQGSLLNMRSFLGVGAPHAAPHGPHLPAPPPPQPPVAIAPGALNGDKASVRSSPTLPERDLVPRPDSPAQQLKSPFQPVRDNSLAPQEGTPRILAALPSA

SEQ ID NO: 48788 - protein, 34 aa, Homo sapiens
MKKFKSLLIQELSKVFPEDMAKYRSIRGEDHPPS

SEQ ID NO: 48789 - protein, 533 aa, Homo sapiens
MRREVVKRIETVVKDLWPTADVQIFGSFSTGLYLPTSDIDLVVFGKWERPPLQLLEQALRKHNVAEPCSIKVLDKATVPIIKLTDQETEVKVDISFNMETGVRAAEFIKNYMKKYSLLPYLILVLKQFLLQRDLNEVFTGGISSYSLILMAISFLQLHPRIDARRADENLGMLLVEFFELYGRNFNYLKTGIRIKEGGAYIAKEEIMKAMTSGYRPSMLCIEDPLLPGNDVGRSSYGAMQVKQVFDYAYIVLSHAVSPLARSYPNRDAESTLGRIIKVTQEVIDYRRWIKEKWGSKAHPSPGMDSRIKIKERIATCNGEQTQNREPESPYGQRLTLSLSSPQLLSSGSSASSVSSLSGSDVDSDTPPCTTPSVYQFSLQAPAPLMAGLPTALPMPSGKPQPTTSRTLIMTTNNQTRFTIPPPTLGVAPVPCRQAGVEGTASLKAVHHMSSPAIPSASPNPLSSPHLYHKQHNGMKLSMKGSHGHTQGGGYSSVGSGGVRPPVGNRGHHQYNRTGWRRKKHTHTRDSLPVSLSR

SEQ ID NO: 48790 - protein, 89 aa, Homo sapiens
MSTNVHSKCSFLALKLKGQVSLLLQAQPGTPSCAPLCSLSFHSSPPGPASHIYTRPNVRVCLCPCLVRGLHFATATCSQRLAQHDLDLT

SEQ ID NO: 48791 - protein, 150 aa, Homo sapiens
MLRCRRGSLVDIGSGDGRIVIAAAKKGFTAVGYELNPWLVWYSRYRAWREGVHGSAKFYISDLWKVTFSQYSNVVIFGVPQMMLQLEKKLERELEDDARVIACRFPFPHWTPDHVTGEGIDTVWAYDASTFRGREKRPCTSMHFQLPIQA

SEQ ID NO: 48792 - protein, 348 aa, Homo sapiens
MDTAEEDICRVCRSEGTPEKPLYHPCVCTGSIKFIHQECLVQWLKHSRKEYCELCKHRFAFTPIYSPDMPSRLPIQDIFAGLVTSIGTAIRYWFHYTLVAFAWLGVVPLTACRIYKCLFTGSVSSLLTLPLDMLSTENLLADCLQGCFVVTCTLCAFISLVWLREQIVHGGAPIWLEHAAPPFNAAGHHQNEAPAGGNGAENVAADQPANPPAENAVVGENPDAQDDQAEEEEEDNEEEDDAGVEDAADANNGAQDDMNWNALEWDRAAEELTWERMLGLDGSLVFLEHVFWVVSLNTLFILVFAFCPYHIGHFSLVGLGFEEHVSIILLQSYFHSLLPNVIINKIVF

SEQ ID NO: 48793 - protein, 3035 aa, Homo sapiens
MDVLPILKEKVAYLSGGRDKRGGPILTFPARSNHDRIRQEDLRRLISYLACIPSEEVCKRGFTVIVDMRGSKWDSIKPLLKILQESFPCCIHVALIIKPDNFWQKQRTNFGSSKFEFETNMVSLEGLTKVVDPSQLTPEFDGCLEYNHEEWIEIRVAFEDYISNATHMLSRLEELQDILAKKELPQDLEGARNMIEEHSQLKKKVIKAPIEDLDLEGQKLLQRIQSSESFPKKNSGSGNADLQNLLPKVSTMLDRLHSTRQHLHQMWHVRKLKLDQCFQLRLFEQDAEKMFDWITHNKGLFLNSYTEIGTSHPHAMELQTQHNHFAMNCMNVYVNINRIMSVANRLVESGHYASQQIRQIASQLEQEWKAFAAALDERSTLLDMSSIFHQKAEKYMSNVDSWCKACGEVDLPSELQDLEDAIHHHQGIYEHITLAYSEVSQDGKSLLDKLQRPLTPGSSDSLTASANYSKAVHHVLDVIHEVLHHQRQLENIWQHRKVRLHQRLQLCVFQQDVQQVLDWIENHGEAFLSKHTGVGKSLHRARALQKRHEDFEEVAQNTYTNADKLLEAAEQLAQTGECDPEEIYQAAHQLEDRIQDFVRRVEQRKILLDMSVSFHTHVKELWTWLEELQKELLDDVYAESVEAVQDLIKRFGQQQQTTLQVTVNVIKEGEDLIQQLRDSAISSNKTPHNSSINHIETVLQQLDEAQSQMEELFQERKIKLELFLQLRIFERDAIDIISDLESWNDELSQQMNDFDTEDLTIAEQRLQHHADKALTMNNLTFDVIHQGQDLLQYVNEVQASGVELLCDRDVDMATRVQDLLEFLHEKQQELDLAAEQHRKHLEQCVQLRHLQAEVKQVLGWIRNGESMLNAGLITASSLQEAEQLQREHEQFQHAIEKTHQSALQVQQKAEAMLQANHYDMDMIRDCAEKVASHWQQLMLKMEDRLKLVNASVAFYKTSEQVCSVLESLEQEYKREEDWCGGADKLGPNSETDHVTPMISKHLEQKEAFLKACTLARRNADVFLKYLHRNSVNMPGMVTHIKAPEQQVKNILNELFQRENRVLHYWTMRKRRLDQCQQYVVFERSAKQALEWIHDNGEFYLSTHTSTGSSIQHTQELLKEHEEFQITAKQTKERVKLLIQLADGFCEKGHAHAAEIKKCVTAVDKRYRDFSLRMEKYRTSLEKALGISSDSNKSSKSLQLDIIPASIPGSEVKLRDAAHELNEEKRKSARRKEFIMAELIQTEKAYVRDLRECMDTYLWEMTSGVEEIPPGIVNKELIIFGNMQEIYEFHNNIFLKELEKYEQLPEDVGHCFVTWADKFQMYVTYCKNKPDSTQLILEHAGSYFDEIQQRHGLANSISSYLIKPVQRITKYQLLLKELLTCCEEGKGEIKDGLEVMLSVPKRANDAMHLSMLEGFDENIESQGELILQESFQVWDPKTLIRKGRERHLFLFEMSLVFSKEVKDSSGRSKYLYKSKLFTSELGVTEHVEGDPCKFALWVGRTPTSDNKIVLKASSIENKQDWIKHIREVIQERTIHLKGALKEPIHIPKTAPATRQKGRRDGEDLDSQGDGSSQPDTISIASRTSQNTLDSDKLSGGCELTVVIHDFTACNSNELTIRRGQTVEVLERPHDKPDWCLVRTTDRSPAAEGLVPCGSLCIAHSRSSMEMEGIFNHKDSLSVSSNDASPPASVASLQPHMIGAQSSPGPKRPGNTLRKWLTSPVRRLSSGKADGHVKKLAHKHKKSREVRKSADAGSQKDSDDSAATPQDETVEERGRNEGLSSGTLSKSSSSGMQSCGEEEGEEGADAVPLPPPMAIQQHSLLQPDSQDDKASSRLLVRPTSSETPSAAELVSAIEELVKSKMALEDRPSSLLVDQGDSSSPSFNPSDNSLLSSSSPIDEMEERKSSSLKRRHYVLQELVETERDYVRDLGYVVEGYMALMKEDGVPDDMKGKDKIVFGNIHQIYDWHRDFFLGELEKCLEDPEKLGSLFVKHERRLHMYIAYCQNKPKSEHIVSEYIDTFFEDLKQRLGHRLQLTDLLIKPVQRIMKYQLLLKDFLKYSKKASLDTSELERAVEVMCIVPRRCNDMMNVGRLQGFDGKIVAQGKLLLQDTFLVTDQDAGLLPRCRERRIFLFEQIVIFSEPLDKKKGFSMPGFLFKNSIKVSCLCLEENVENDPCKFALTSRTGDVVETFILHSSSPSVRQTWIHEINQILENQRNFLNALTSPIEYQRNHSGGGGGGGSGGSGGGGGSGGGGAPSGGSGHSGGPSSCGGAPSTSRSRPSRIPQPVRHHPPVLVSSAASSQAEADKMSGTSTPGPSLPPPGAAPEAGPSAPSRRPPGADAEGSEREAEPIPKMKVLESPRKGAANASGSSPDAPAKDARASLGTLPLGKPRAGAASPLNSPLSSAVPSLGKEPFPPSSPLQKGGSFWSSIPASPASRPGSFTFPGDSDSLQRQTPRHAAPGKDTDRMSTCSSASEQSVQSTQSNGSESSSSSNISTMLVTHDYTAVKEDEINVYQGEVVQILASNQQNMFLVFRAATDQCPAAEGWIPGFVLGHTSAVIVENPDGTLKKSTSWHTALRLRKKSEKKDKDGKREGKLENGYRKSREGLSNKVSVKLLNPNYIYDVPPEFVIPLSEVTCETGETVVLRCRVCGRPKASITWKGPEHNTLNNDGHYSISYSDLGEATLKIVGVTTEDDGIYTCIAVNDMGSASSSASLRVLGPGMDGIMVTWKDNFDSFYSEVAELGRGRFSVVKKCDQKGTKRAVATKFVNKKLMKRDQVTHELGILQSLQHPLLVGLLDTFETPTSYILVLEMADQGRLLDCVVRWGSLTEGKIRAHLGEVLEAVRYLHNCRIAHLDLKPENILVDESLAKPTIKLADFGDAVQLNTTYYIHQLLGNPEFAAPEIILGNPVSLTSDTWSVGVLTYVLLSGVSPFLDDSVEETCLNICRLDFSFPDDYFKGVSQKAKEFVCFLLQEDPAKRPSAALALQEQWLQAGNGRSTGVLDTSRLTSFIERRKHQNDVRPIRSIKNFLQSRLLPRV

SEQ ID NO: 48794 - protein, 1495 aa, Homo sapiens
MDVLPILKEKVAYLSGGRDKRGGPILTFPARSNHDRIRQEDLRRLISYLACIPSEEVCKRGFTVIVDMRGSKWDSIKPLLKILQESFPCCIHVALIIKPDNFWQKQRTNFGSSKFEFETNMVSLEGLTKVVDPSQLTPEFDGCLEYNHEEWIEIRVAFEDYISNATHMLSRLEELQDILAKKELPQDLEGARNMIEEHSQLKKKVIKAPIEDLDLEGQKLLQRIQSSESFPKKNSGSGNADLQNLLPKVSTMLDRLHSTRQHLHQMWHVRKLKLDQCFQLRLFEQDAEKMFDWITHNKGLFLNSYTEIGTSHPHAMELQTQHNHFAMNCMNVYVNINRIMSVANRLVESGHYASQQIRQIASQLEQEWKAFAAALDERSTLLDMSSIFHQKAEKYMSNVDSWCKACGEVDLPSELQDLEDAIHHHQGIYEHITLAYSEVSQDGKSLLDKLQRPLTPGSSDSLTASANYSKAVHHVLDVIHEVLHHQRQLENIWQHRKVRLHQRLQLCVFQQDVQQVLDWIENHGEAFLSKHTGVGKSLHRARALQKRHEDFEEVAQNTYTNADKLLEAAEQLAQTGECDPEEIYQAAHQLEDRIQDFVRRVEQRKILLDMSVSFHTHVKELWTWLEELQKELLDDVYAESVEAVQDLIKRFGQQQQTTLQVTVNVIKEGEDLIQQLRDSAISSNKTPHNSSINHIETVLQQLDEAQSQMEELFQERKIKLELFLQLRIFERDAIDIISDLESWNDELSQQMNDFDTEDLTIAEQRLQHHADKALTMNNLTFDVIHQGQDLLQYVNEVQASGVELLCDRDVDMATRVQDLLEFLHEKQQELDLAAEQHRKHLEQCVQLRHLQAEVKQVLGWIRNGESMLNAGLITASSLQEAEQLQREHEQFQHAIEKTHQSALQVQQKAEAMLQANHYDMDMIRDCAEKVASHWQQLMLKMEDRLKLVNASVAFYKTSEQVCSVLESLEQEYKREEDWCGGADKLGPNSETDHVTPMISKHLEQKEAFLKACTLARRNADVFLKYLHRNSVNMPGMVTHIKAPEQQVKNILNELFQRENRVLHYWTMRKRRLDQCQQYVVFERSAKQALEWIHDNGEFYLSTHTSTGSSIQHTQELLKEHEEFQITAKQTKERVKLLIQLADGFCEKGHAHAAEIKKCVTAVDKRYRDFSLRMEKYRTSLEKALGISSDSNKSSKSLQLDIIPASIPGSEVKLRDAAHELNEEKRKSARRKEFIMAELIQTEKAYVRDLRECMDTYLWEMTSGVEEIPPGIVNKELIIFGNMQEIYEFHNNIFLKELEKYEQLPEDVGHCFVTWADKFQMYVTYCKNKPDSTQLILEHAGSYFDEIQQRHGLANSISSYLIKPVQRITKYQLLLKELLTCCEEGKGEIKDGLEVMLSVPKRANDAMHLSMLEGFDENIESQGELILQESFQVWDPKTLIRKGRERHLFLFEMSLVFSKEVKDSSGRSKYLYKSKLFVSIGVQNCKSKGNTIAVFL

SEQ ID NO: 48795 - protein, 445 aa, Homo sapiens
MLASYGLAYSLMKFFTGPMSDFKNVGLVFVNSKRDRTKAVLCMVVAGAIAAVFHTLIAYSDLGYYIINKLHHVDESVGSKTRRAFLYLAAFPFMDAMAWTHAGILLKHKYSFLVGCASISDVIAQVVFVAILLHSHLECREPLLIPILSLYMGALVRCTTLCLGYYKNIHDIIPDRSGPELGGDATIRKMLSFWWPLALILATQRISRPIVNLFVSRDLGGSSAATEAVAILTATYPVGHMPYGWLTEIRAVYPAFDKNNPSNKLVSTSNTVTAAHIKKFTFVCMALSLTLCFVMFWTPNVSEKILIDIIGVDFAFAELCVVPLRIFSFFPVPVTVRAHLTGWLMTLKKTFVLAPSSVLRIIVLIASLVVLPYLGVHGATLGVGSLLAGFVGESTMVAIAACYVYRKQKKKMENESATEGEDSAMTDMPPTEEVTDIVEMREENE

SEQ ID NO: 48796 - protein, 305 aa, Homo sapiens
MLETVTVSGCRRLTDRGLYTIAQCCPELRRLEVSGCYNISNEAVFDVVSLCPNLEHLDVSGCSKVTCISLTREASIKLSPLHGKQISIRYLDMTDCFVLEDEGLHTIAAHCTQLTHLYLRRCVRLTDEGLRYLVIYCASIKELSVSDCRFVSDFGLREIAKLESRLRYLSIAHCGRVTDVGIRYVAKYCSKLRYLNARGCEGITDHGVEYLAKNCTKLKSLDIGKCPLVSDTGLECLALNCFNLKRLSLKSCESITGQGLQIVAANCFDLQTLNVQDCEVSVEALRFVKRHCKRCVIEHTNPAFF

SEQ ID NO: 48797 - protein, 1373 aa, Homo sapiens
MQGNTCHRMSFHPGRGCPRGRGGHGARPSAPSFRPQNLRLLHPQQPPVQYQYEPPSAPSTTFSNSPAPNFLPPRPDFVPFPPPMPPSAQGPLPPCPIRPPFPNHQMRHPFPVPPCFPPMPPPMPCPNNPPVPGAPPGQGTFPFMMPPPSMPHPPPPPVMPQQVNYQYPPGYSHHNFPPPSFNSFQNNPSSFLPSANNSSSPHFRHLPPYPLPKAPSERRSPERLKHYDDHRHRDHSHGRGERHRSLDRRERGRSPDRRRQDSRYRSDYDRGRTPSRHRSYERSRERERERHRHRDNRRSPSLERSYKKEYKRSGRSYGLSVVPEPAGCTPELPGEIIKNTDSWAPPLEIVNHRSPSREKKRARWEEEKDRWSDNQSSGKDKNYTSIKEKEPEETMPDKNEEEEEELLKPVWIRCTHSENYYSSDPMDQVGDSTVVGTSRLRDLYDKFEEELGSRQEKAKAARPPWEPPKTKLDEDLESSSESECESDEDSTCSSSSDSEVFDVIAEIKRKKAHPDRLHDELWYNDPGQMNDGPLCKCSAKARRTGIRHSIYPGEEAIKPCRPMTNNAGRLFHYRITVSPPTNFLTDRPTVIEYDDHEYIFEGFSMFAHAPLTNIPLCKVIRFNIDYTIHFIEEMMPENFCVKGLELFSLFLFRDILELYDWNLKGPLFEDSPPCCPRFHFMPRFVRFLPDGGKEVLSMHQILLYLLRCSKALVPEEEIANMLQWEELEWQKYAEECKGMIVTNPGTKPSSVRIDQLDREQFNPDVITFPIIVHFGIRPAQLSYAGDPQYQKLWKSYVKLRHLLANSPKVKQTDKQKLAQREEALQKIRQKNTMRREVTVELSSQGFWKTGIRSDVCQHAMMLPVLTHHIRYHQCLMHLDKLIGYTFQDRCLLQLAMTHPSHHLNFGMNPDHARNSLSNCGIRQPKYGDRKVHHMHMRKKGINTLINIMSRLGQDDPTPSRINHNERLEFLGDAVVEFLTSVHLYYLFPSLEEGGLATYRTAIVQNQHLAMLAKKLELDRFMLYAHGPDLCRESDLRHAMANCFEALIGAVYLEGSLEEAKQLFGRLLFNDPDLREVWLNYPLHPLQLQEPNTDRQLIETSPVLQKLTEFEEAIGVIFTHVRLLARAFTLRTVGFNHLTLGHNQRMEFLGDSIMQLVATEYLFIHFPDHHEGHLTLLRSSLVNNRTQAKVAEELGMQEYAITNDKTKRPVALRTKTLADLLESFIAALYIDKDLEYVHTFMNVCFFPRLKEFILNQDWNDPKSQLQQCCLTLRTEGKEPDIPLYKTLQTVGPSHARTYTVAVYFKGERIGCGKGPSIQQAEMGAAMDALEKYNFPQMAHQKRFIERKYRQELKEMRWEREHQEREPDETEDIKK

SEQ ID NO: 48798 - protein, 1336 aa, Homo sapiens
MQGNTCHRMSFHPGRGCPRGRGGHGARPSAPSFRPQNLRLLHPQQPPVQYQYEPPSAPSTTFSNSPAPNFLPPRPDFVPFPPPMPPSAQGPLPPCPIRPPFPNHQMRHPFPVPPCFPPMPPPMPCPNNPPVPGAPPGQGTFPFMMPPPSMPHPPPPPVMPQQVNYQYPPGYSHHNFPPPSFNSFQNNPSSFLPSANNSSSPHFRHLPPYPLPKAPSERRSPERLKHYDDHRHRDHSHGRGERHRSLDRRERGRSPDRRRQDSRYRSDYDRGRTPSRHRSYERSRERERERHRHRDNRRSPSLERSYKKEYKRSGSRSPSREKKRARWEEEKDRWSDNQSSGKDKNYTSIKEKEPEETMPDKNEEEEEELLKPVWIRCTHSENYYSSDPMDQVGDSTVVGTSRLRDLYDKFEEELGSRQEKAKAARPPWEPPKTKLDEDLESSSESECESDEDSTCSSSSDSEVFDVIAEIKRKKAHPDRLHDELWYNDPGQMNDGPLCKCSAKARRTGIRHSIYPGEEAIKPCRPMTNNAGRLFHYRITVSPPTNFLTDRPTVIEYDDHEYIFEGFSMFAHAPLTNIPLCKVIRFNIDYTIHFIEEMMPENFCVKGLELFSLFLFRDILELYDWNLKGPLFEDSPPCCPRFHFMPRFVRFLPDGGKEVLSMHQILLYLLRCSKALVPEEEIANMLQWEELEWQKYAEECKGMIVTNPGTKPSSVRIDQLDREQFNPDVITFPIIVHFGIRPAQLSYAGDPQYQKLWKSYVKLRHLLANSPKVKQTDKQKLAQREEALQKIRQKNTMRREVTVELSSQGFWKTGIRSDVCQHAMMLPVLTHHIRYHQCLMHLDKLIGYTFQDRCLLQLAMTHPSHHLNFGMNPDHARNSLSNCGIRQPKYGDRKVHHMHMRKKGINTLINIMSRLGQDDPTPSRINHNERLEFLGDAVVEFLTSVHLYYLFPSLEEGGLATYRTAIVQNQHLAMLAKKLELDRFMLYAHGPDLCRESDLRHAMANCFEALIGAVYLEGSLEEAKQLFGRLLFNDPDLREVWLNYPLHPLQLQEPNTDRQLIETSPVLQKLTEFEEAIGVIFTHVRLLARAFTLRTVGFNHLTLGHNQRMEFLGDSIMQLVATEYLFIHFPDHHEGHLTLLRSSLVNNRTQAKVAEELGMQEYAITNDKTKRPVALRTKTLADLLESFIAALYIDKDLEYVHTFMNVCFFPRLKEFILNQDWNDPKSQLQQCCLTLRTEGKEPDIPLYKTLQTVGPSHARTYTVAVYFKGERIGCGKGPSIQQAEMGAAMDALEKYNFPQMAHQKRFIERKYRQELKEMRWEREHQEREPDETEDIKK

SEQ ID NO: 48799 - protein, 711 aa, Homo sapiens [sequence omitted]

SEQ ID NO: 48800 - protein, 220 aa, Homo sapiens
MESPQTGGLPPDCSKCCHGDYSFRGYQGPPGPPGPPGIPGNHGNNGNNGATGHEGAKGEKGDKGDLGPRGERGQHGPKGEKGYPGIPPELQIAFMASLATHFSNQNSGIIFSSVETNIGNFFDVMTGRFGAPVSGVYFFTFSMMKHEDVEEVYVYLMHNGNTVFSMYSYEMKGKSDTSSNHAVLKLAKGDEVWLRMGNGALHGDHQRFSTFAGFLLFETK

SEQ ID NO: 48801 - protein, 385 aa, Homo sapiens
MNGGCSAWGGGLLSLWHAYSLIYYTPKYKTTPPLQLSAPVLASARGDHAPGALLSSQGDSEALLRIMLWRQLIYWQLLALFFLPFCLCQDEYMEVSGRTNKVVARIVQSHQQTGRSGSRREKVRERSHPKTGTVDNNTSTDLKSLRPDELPHPEVDDLAQITTFWGQSPQTGGLPPDCSKCCHGDYSFRGYQGPPGPPGPPGIPGNHGNNGNNGATGHEGAKGEKGDKGDLGPRGERGQHGPKGEKGYPGIPPELQIAFMASLATHFSNQNSGIIFSSVETNIGNFFDVMTGRFGAPVSGVYFFTFSMMKHEDVEEVYVYLMHNGNTVFSMYSYEMKGKSDTSSNHAVLKLAKGDEVWLRMGNGALHGDHQRFSTFAGFLLFETK

SEQ ID NO: 48802 - protein, 460 aa, Homo sapiens
MIAKEELESVLEEEVDDFPTFGDSQSDYDTVVHPFYAYWQSFCTQKNFAWKEEYDTRQASNRWEKRAMEKENKKIRDKARKEKNELVRQLVAFIRKRDKRVQAHRKLVEEQNAEKARKAEEMRRQQKLKQAKLVEQYREQSWMTMANLEKELQEMEARYEKEFGDGSDENEMEEHELKDEEDGKDSDEAEDAELYDDLYCPACDKSFKTEKAMKNHEKSKKHREMVALLKQQLEEEEENFSRPQIDENPLDDNSEEEMEDAPKQKLSKKQKKKKQKPAQDVPGKDSYLPAAHFQMAWGKKCVLGERRDGESEHKCAKMLLENRQNYDDNFNVNGPGEGVKVDPEDTNLNQDSAKELEDSPQENVSVTEIIKPCDDPKSEAKSVPKPKGKKTKDMKKPVRVPAEPQTMSVLISCTTCHSEFPSRNKLFDHLKATGHARAPSSSSLNSATSSQSKKEKRKNR

SEQ ID NO: 48803 - protein, 428 aa, Homo sapiens
MIAKEELESVLEEEVDDFPTFGDSQSDYDTVVHPFYAYWQSFCTQKNFAWKEEYDTRQASNRWEKRAMEKENKKIRDKARKEKNELVRQLVAFIRKRDKRVQAHRKLVEEQNAEKARKAEEMRRQQKLKQAKLVEQYREQSWMTMANLEKELQEMEARYEKEFGDGSDENEMEEHELKDEEDGKDSDEAEDAELYDDLYCPACDKSFKTEKAMKNHEKSKKHREMVALLKQQLEEEEENFSRPQIDENPLDDNSEEEMEDAPKQKVKYLTFRFIFALRLSKKQKKKKQKPAQNYDDNFNVNGPGEGVKVDPEDTNLNQDSAKELEDSPQENVSVTEIIKPCDDPKSEAKSVPKPKGKKTKDMKKPVRVPAEPQTMSVLISCTTCHSEFPSRNKLFDHLKATGHARAPSSSSLNSATSSQSKKEKRKNR

SEQ ID NO: 48804 - protein, 589 aa, Homo sapiens
MPIFWRVVYWTSQFLTWILLPFMQSYARSGGFSITGKIKTALIENAIYYGTYLLIFGAFLIYVAVNPHLHLEWNQLQTIGIAAANTWGLFLLVLLLGYGLVEIPRSYWNGAKRGYLLMKTYFKAAKLMTEKADAEENLEDAMEEVRKVNESIKYNHPLRKCVDTILKKCPTEYQEKMGRNMDDYEDFDEKHSIYPSEKSLVKLHKQVIYSVQRHRRTQVQWQILLEQAFYLEDVAKNETSATHQFVHTFQSPEPENRFIQYFYNPTFEWYWECLLRPWFYKILAVVLSIFSVIVVWSECTFFSTTPVLSLFAVFIQLAEKTYNYIYIEIACFLSIFFLSICVYSTVFRIRVFNYYYLASHHQTDAYSLLFSGMLFCRLTPPLCLNFLGLTHMDSSISHKNTQPTAYTSIMGSMKVLSFIADGFYIYYPMLVVILCIATYFSLGTRCLNLLGFQQFMGDDDMTSDLVNEGKELIRKEKRKRQRQEEGENRRREWKERYGHNREDSTRNRNIHTDPKESNFSDVNTNRSAFKYTRANNRTERDRIELLQDAEPLDFNAETFTDDPLESESGRYQPGGRYLSMSRSDIFNDV

SEQ ID NO: 48805 - protein, 2096 aa, Homo sapiens
MADADILSETFQLLIDSAKDFSKRLWGLVPFGLYLPAPPLYCPQPAILSEEDGDDLLLKAEKNNRQKVSGILQRVLLLFRAAQCSFPVAQWYILQLRWARKVMQKIRMKGSLPSLSPFPQSLLNYCKGGIAFFRPGAAGDHKLDEVSIRAIGCFRELCALCWMLHVRDKLSYSCRQYQKARENVKGEKDLEVEFDSCMIEHCLSAVEWAYRMLPFSRFFNMEELIQDIILSLIGELPPIRKVAEIFVKAFPYPEDVRVPLRDKYHSLHQRLRHCVVKGPQTEEMMSVVMHSIQKVRVKALKRVQRNIGSFEVNIWEPIEEEKPDEAPGVDRYSLGTSLSRSTLTELGDSVVHSDADTFSEALSVEEKSRINIYQRNAPNHMELTSIHKPTDKRKMCNQKENPTKKEDHEKLSQNTLPVIGVWEFERDDDEYIKFLDLFLSYILERDLPYSRDADIPFLTSFSGKLREHELNSLLFDVHTTLKRHQSKTKSQNVFRAGSCFVVAPESYESEKSSSLNDEYGMHLENQKLSSSVLVNQGIKPFLQYPSNEVNKNEGMSGLFGLKQRSIYKIQDDTREKCLIQRSSNHIFWTPKSIKTRRCIFKAIQCNDINPQEDLPLALNTFGSIGRLLEWMIRWSNRRLLCDSGITESSSEYSPVIRVKTSTAAILTSLWLLEQPYFATYKAKNAIIKMVENRDTGCQIGPNIERESKSDAGGSVAVATPGGTEERNGQNKSCQNILNRMPTEAKNPDIKEINDDIISITHNTKKEFIDIDENLLEVEAFTEEEMDMHISDYEEDIEESVGGFRSPSLAICMMTLPQQLEEEFTEEVQCQREEPLETIMEEKSTEQKGMIEAFSHPGHTTPQSMQVDTSSEISSAQISTYKEKSSSVPLLISNGVNVASQPPAPTPQKTQRNEFTAQLPDCSESVRQMLQDEMFKLVQLQQINFMSLMQIVGSSFANLPDTQQLVQQSQSVHLGESQESNLRGCGDVEDSNKNLKERFFIKPQSMGENAREPRKNSPHCHEGTIPSGQNSTGNVQNVPHGSIPLCQLNGQPRKKGPIPSSQNLPSTSFYPAPAGNTHLYLLSTPSVVQKAPRLIPHAKTFSPGDGFPLLQFKSKQEFQPLFLHTGSIPQVPFRPLPQPREAWGLSDSFQPALPQRAAQTTPASHLNVSQYNTEARKKEVEQKTWAETVITEIPNHVNLDQYVGQENLTPQQDSSVFIKPEKLFDVKPGTLEISPHHSFGLPLLYLPLKPPNMFPSTSRASITVPSTPIQPIAEERKYPRLSLLHSHLSPENRCKKTQLIPLENLIAFKQSQQKLTHNLFEQGDAGHLQLLKVKIEPPEVRQGKDSKKRQRRRAEKELQEKRCEKLRRKPNVTFRPENSIINNDDSEIIKKPKEQQEHCGSHPLDDFDVPFEMLQDDNTSAGLHFMASVKKKAIGSQDASTNTDPEHEPLTAPQLLVPDVYLNLKLSSEMSEKPWSPSIPHTVTNLVGHTYINVIDIEANDLLQELPVREEPSNDNVIKQQSDHLAVPSSAELHYMAASVTNAVPPHNFKSQGLPKPEFRFKGQSTKSDSAEDYLLWKRLQGVSAACPAPSSAAHQLEHLSAKLQKIDEQLLAIQNIAENIEQDFPKPEMLDLHCDKIGPVDHIEFSSGPEFKKTLASKTISISEEVRFLTHMDEEDQSDKKETSEPEFSITENYSGQKTCVFPTADSAVSLSSSSDQNTTSPGMNSSDELCESVSVHPLQMTGLTDIADIIDDLIIKDGVSSEELGLTEQAMGTSRIQHYSGRHSQRTDKERREIQAWMKRKRKERMAKYLNELAEKRGQEHDPFCPRSNPLYMTSREIRLRQKMKHEKDRLLLSEHYSRRISQAYGLMNELLSESVQLPTLPQKPLPNKPSPTQSSSCQHCPSPRGENQHGHSFLINRPGKVKYMSKPSYIHKRKSFGQPQGSPWPHGTATFTIQKKAGGAKAAVRKATQSPVTFQKGSNAPCHSLQHTKKHGSAGLAPQTKQVCVEYEREETVVSPWTIPSEIHKILHESHNSLLQDLSPTEEEEPEHPFGVGGVDSVSESTGSILSKLDWNAIEDMVASVEDQGLSVHWALDL

SEQ ID NO: 48806 - protein, 1382 aa, Homo sapiens [sequence omitted]

SEQ ID NO: 48807 - protein, 630 aa, Homo sapiens
MGFTGFGKKARTFDLEAMFEQTRRTAVERSRKTLEAREKEEEMNREKELRRQNEDIEPTSSRSNVVRDCSKSSSRDTSSSESEQSSDSSDDELIGPPLPPKMVGKPVNFMEEDILGPLPPPLNEEEEEAEEEEEEEEEEENPVHKIPDSHEITLKHGTKTVSALGLDPSGARLVTGGYDYDVKFWDFAGMDASFKAFRSLQPCECHQIKSLQYSNTGDMILVVSGSSQAKVIDRDGFEVMECIKGDQYIVDMANTKGHTAMLHTGSWHPKIKGEFMTCSNDATVRTWEVENPKKQKSVFKPRTMQGKKVIPTTCTYSRDGNLIAAACQNGSIQIWDRNLTVHPKFHYKQAHDSGTDTSCVTFSYDGNVLASRGGDDSLKLWDIRQFNKPLFSASGLPTMFPMTDCCFSPDDKLIVTGTSIQRGCGSGKLVFFERRTFQRVYEIDITDASVVRCLWHPKLNQIMVGTGNGLAKVYYDPNKSQRGAKLCVVKTQRKAKQAETLTQDYIITPHALPMFREPRQRSTRKQLEKDRLDPLKSHKPEPPVAGPGRGGRVGTHGGTLSSYIVKNIALDKTDDSNPREAILRHAKAAEDSPYWVSPAYSKTQPKTMFAQVESDDEEAKNEPEWKKRKI

SEQ ID NO: 48808 - protein, 1078 aa, Homo sapiens [sequence omitted]

SEQ ID NO: 48809 - protein, 1679 aa, Homo sapiens
MRKLGHLNNFTKLLCDIGHSEEKLGFHYEDIIICLRLALLNEAKEVRAAGLRALRYLIQDSSILQKVLKLKVDYLIARCIDIQQSNEVERTQALRLVRKMITVNASLFPSSVTNSLIAVGNDGLQERDRMVRACIAIICELALQNPEVVALRGGLNTILKNVIDCQLSRINEALITTILHLLNHPKTRQYVRADVELERILAPYTDFHYRHSPDTAEGQLKEDREARFLASKMGIIATFRSWAGIINLCKPGNSGIQSLIGVLCIPNMEIRRGLLEVLYDIFRLPLPVVTEEFIEALLSVDPGRFQDSWRLSDGFVAAEAKTILPHRARSRPDLMDNYLALILSAFIRNGLLEGLVEVITNSDDHISVRATILLGELLHMANTILPHSHSHHLHCLPTLMNMAASFDIPKEKRLRASAALNCLKRFHEMKKRGPKPYSLHLDHIIQKAIATHQKRDQYLRVQKDIFILKDTEEALLINLRDSQVLQHKENLEWNWNLIGTILKWPNVNLRNYKDEQLHRFVRRLLYFYKPSSKLYANLDLDFAKAKQLTVVGCQFTEFLLESEEDGQGYLEDLVKDIVQWLNASSGMKPERSLQNNGLLTTLSQHYFLFIGTLSCHPHGVKMLEKCSVFQCLLNLCSLKNQDHLLKLTVSSLDYSRDGLARVILSKILTAATDACRLYATKHLRVLLRANVEFFNNWGIELLVTQLHDKNKTISSEALDILDEACEDKANLHALIQMKPALSHLGDKGLLLLLRFLSIPKGFSYLNERGYVAKQLEKWHREYNSKYVDLIEEQLNEALTTYRKPVDGDNYVRRSNQRLQRPHVYLPIHLYGQLVHHKTGCHLLEVQNIITELCRNVRTPDLDKWEEIKKLKASLWALGNIGSSNWGLNLLQEENVIPDILKLAKQCEVLSIRGTCVYVLGLIAKTKQGCDILKCHNWDAVRHSRKHLWPVVPDDVEQLCNELSSIPSTLSLNSESTSSRHNSESESVPSSMFILEDDRFGSSSTSTFFLDINEDTEPTFYDRSGPIKDKNSFPFFASSKLVKNRILNSLTLPNKKHRSSSDPKGGKLSSESKTSNRRIRTLTEPSVDFNHSDDFTPISTVQKTLQLETSFMGNKHIEDTGSTPSIGENDLKFTKNFGTENHRENTSRERLVVESSTSSHMKIRSQSFNTDTTTSGISSMSSSPSRETVGVDATTMDTDCGSMSTVVSTKTIKTSHYLTPQSNHLSLSKSNSVSLVPPGSSHTLPRRAQSLKAPSIATIKSLADCNFSYTSSRDAFGYATLKRLQQQRMHPSLSHSEALASPAKDVLFTDTITMKANSFESRLTPSRIDFKKKHVGGIRSLRPTITNNLFRFMKALSYASLDKEDLLSPINQNTLQRSSSVRSMVSSATYGGSDDYIGLALPVDINDIFQVKDIPYFQTKNIPPHDDRGARAFAHDAGGLPSGTGGLVKNSFHLLRQQMSLTEIMNSIHSDASLFLESTEDTGLQEHTDDNCLYCVCIEILGFQPSNQLSAICSHSDFQDIPYSDWCEQTIHNPLEVVPSKFSGISGCSDGVSQEGSASSTKSTELLLGVKTIPDDTPMCRILLRKEVLRLVINLSSSVSTKCHETGLLTIKEKYPQTFDDICLYSEVSHLLSHCTFRLPCRRFIQELFQDVQFLQMHEEAEAVLATPPKQPIVDTSAES

SEQ ID NO: 48810 - protein, 221 aa, Homo sapiens
MTYFEENKLVDEDFPEDSSSQKVKELISFLSEPEILVKENNMHPKHCNLLGDELLECLSWRRGALLYMYCHSLTKRREWLLRKSSLLKKYLLDGISYLLQMLNYRCPIQLNEGVSFQDLDTAKLLSAGIFSDIHLLAMMYSGEMCYWGSKYCADQQPENHEVDTSVSGAGCTTYKEPLDFREVGEKILKKYVSVCEGPLKEQEWNTTNAKQILNFFHHRCN

SEQ ID NO: 48811 - protein, 465 aa, Homo sapiens [sequence omitted]

SEQ ID NO: 48812 - protein, 521 aa, Homo sapiens
MESGIVKITSLDGHAYLCLPRSQHEFTVHFLCKVSQKSDSSAVLSETNNKAPKDKLVEKTGKICIRGNLPGQRLKNKENEFHCQIMKSKETLKKMSCVNGTEGREELPSPGTKHTCVYTWVKQCWSVAACPEEWKYPLSLALHFHNKISNMSKIDAHITQSRFLTSDISEERGKVVSVLPRALSLSCPVPHLHRWNFCDSLLQRQSDEYSYPELVKMVWYKGVTYRLTHQNMNSIEIYSGDGSVFKSEGAYFGNYFTYYSIQEGSGKREEKTYSVNNLPPDRPGSPFTVGSLIKQATRILQHCVKMRLSLSHNYRICCWKMVPGINDSNILPLVLKESLIPSVGRFLAYSDDKVHAIFLDGITLTLNWNFSSPIEKRQVNQGLNLGWCKLTFPDGQEQLIQIEHPEPYERYVTTVTSWCRRLTQTSPREMPTHSSSSVLQENWSVASELEKIQKFNLLLENSGILNQISNKKNEQQSFDHYKPGSSETLLGEVNENRVSIALKKTSEILHDIDCLLSNSKK

SEQ ID NO: 48813 - protein, 1134 aa, Homo sapiens [sequence omitted]

SEQ ID NO: 48814 - protein, 192 aa, Homo sapiens [sequence omitted]

SEQ ID NO: 48815 - protein, 121 aa, Homo sapiens
MGTSILSIPWGIKQAGFTTGMCVIILMGLLTLYCCYRVVKSRTMMFSLDTTSWEYPDVCRHYFGSFGQWSSLLFSLVSLIGAMIVYWVLMSNFLFNTGKFIFSKYLYHMLLTQYFQILLPL

SEQ ID NO: 48816 - protein, 1319 aa, Homo sapiens
MPAWKHEWLERRNRRGPVVVKPIPVKGDGSEMNHLAAESPGEVQASAASPASKGRRSPSPGNSPSGRTVKSESPGVRRKRVSPVPFQSGRITPPRRAPSPDGFSPYSPEETNRRVNKVMRARLYLLQQIGPNSFLIGGDSPDNKYRVFIGPQNCSCARGTFCIHLLFVMLRVFQLEPSDPMLWRKTLKNFEVESLFQKYHSRRSSRIKAPSRNTIQKFVSRMSNSHTLSSSSTSTSSSENSIKDEEEQMCPICLLGMLDEESLTVCEDGCRNKLHHHCMSIWAEECRRNREPLICPLCRSKWRSHDFYSHELSSPVDSPSSLRAAQQQTVQQQPLAGSRRNQESNFNLTHYGTQQIPPAYKDLAEPWIQVFGMELVGCLFSRNWNVREMALRRLSHDVSGALLLANGESTGNSGGSSGSSPSGGATSGSSQTSISGDVVEACCSVLSMVCADPVYKVYVAALKTLRAMLVYTPCHSLAERIKLQRLLQPVVDTILVKCADANSRTSQLSISTLLELCKGQAGELAVGREILKAGSIGIGGVDYVLNCILGNQTESNNWQELLGRLCLIDRLLLEFPAEFYPHIVSTDVSQAEPVEIRYKKLLSLLTFALQSIDNSHSMVGKLSRRIYLSSARMVTTVPHVFSKLLEMLSVSSSTHFTRMRRRLMAIADEVEIAEAIQLGVEDTLDGQQDSFLQASVPNNYLETTENSSPECTVHLEKTGKGLCATKLSASSEDISERLASISVGPSSSTTTTTTTTEQPKPMVQTKGRPHSQCLNSSPLSHHSQLMFPALSTPSSSTPSVPAGTATDVSKHRLQGFIPCRIPSASPQTQRKFSLQFHRNCPENKDSDKLSPVFTQSRPLPSSNIHRPKPSRPTPGNTSKQGDPSKNSMTLDLNSSSKCDDSFGCSSNSSNAVIPSDETVFTPVEEKCRLDVNTELNSSIEDLLEASMPSSDTTVTFKSEVAVLSPEKAENDDTYKDDVNHNQKCKEKMEAEEEEALAIAMAMSASQDALPIVPQLQVENGEDIIIIQQDTPETLPGHTKAKQPYREDTEWLKGQQIGLGAFSSCYQAQDVGTGTLMAVKQVTYVRNTSSEQEEVVEALREEIRMMSHLNHPNIIRMLGATCEKSNYNLFIEWMAGGSVAHLLSKYGAFKESVVINYTEQLLRGLSYLHENQIIHRDVKGANLLIDSTGQRLRIADFGAAARLASKGTGAGEFQGQLLGTIAFMAPEVLRGQQYGRSCDVWSVGCAIIEMACAKPPWNAEKHSNHLALIFKIASATTAPSIPSHLSPGLRDVALRCLELQPQDRPPSRELLKHPVFRTTW

SEQ ID NO: 48817 - protein, 523 aa, Homo sapiens
MLVHDYDDERTLEEEEMMDEGKNFSSEIEDLEKEGTMPLEDLLAFYGYEPTIPAVANSSANSSPSELADELPDMTLDKEEIAKDLLSGDDEETQSSADDLTPSVTSHETSDFFPRPLRSNTACDGDKESEVEDVETDSGNSPEDLRKEIMIGLQYQAEIPPYLGEYDGNEKVYENEDQLLWCPDVVLESKVKEYLVETSLRTGSEKIMDRISAGTHTRDNEQALYELLKCNHNIKEAIERYCCNGKASQEGMTAWTEEECRSFEHALMLFGKDFHLIQKNKVRTRTVAECVAFYYMWKKSERYDYFAQQTRFGKKRYNHHPGVTDYMDRLVDETEALGGTVNASALTSNRPEPIPDQQLNILNSFTASDLTALTNSVATVCDPTDVNCLDDSFPPLGNTPRGQVNHVPVVTEELLTLPSNGESDCFNLFETGFYHSELNPMNMCSEESERPAKRLKMGIAVPESFMNEVSVNNLGVDFENHTHHITSAKMAVSVADFGSLSANETNGFISAHALHQHAALHSE

SEQ ID NO: 48818 - protein, 655 aa, Homo sapiens
MCEQALGKGCGADSKKKRPPQPPEESQPPQSQAQVPPAISRIIVDPTTGKRYCRGKVLGKGGFAKCYEMTDLTNNKVYAAKIIPHSRVAKPHQREKIDKEIELHRILHHKHVVQFYHYFEDKENIYILLEYCSRRSMAHILKARKVLTEPEVRYYLRQIVSGLKYLHEQEILHRDLKLGNFFINEAMELKVGDFGLAARLEPLEHRRRTICGTPNYLSPEVLNKQGHGCESDIWALGCVMYTMLLGRPPFETTNLKETYRCIREARYTMPSSLLAPAKHLIASMLSKNPEDRPSLDDIIRHDFFLQGFTPDRLSSSCCHTVPDFHLSSPAKNFFKKAAAALFGGKKDKARYIDTHNRVSKEDEDIYKLRHDLKKTSITQQPSKHRTDEELQPPTTTVARSGTPAVENKQQIGDAIRMIVRGTLGSCSSSSECLEDSTMGSVADTVARVLRGCLENMPEADCIPKEQLSTSFQWVTKWVDYSNKYGFGYQLSDHTVGVLFNNGAHMSLLPDKKTVHYYAELGQCSVFPATDAPEQFISQVTVLKYFSHYMEENLMDGGDLPSVTDIRRPRLYLLQWLKSDKALMMLFNDGTFQVNFYHDHTKIIICSQNEEYLLTYINEDRISTTFRLTTLLMSGCSSELKNRMEYALNMLLQRCN

SEQ ID NO: 48819 - protein, 499 aa, Homo sapiens
MLNRELTHLSEMSRSGNQVSEFISNTFLDKQHEVEIPSPTQKEKEKKKRPMSQISGVKKLMHSSSLTNSSIPRFGVKTEQEDVLAKELEDVNKWGLHVFRIAELSGNRPLTVIMHTIFQERDLLKTFKIPVDTLITYLMTLEDHYHADVAYHNNIHAADVVQSTHVLLSTPALEAVFTDLEILAAIFASAIHDVDHPGVSNQFLINTNSELALMYNDSSVLENHHLAVGFKLLQEENCDIFQNLTKKQRQSLRKMVIDIVLATDMSKHMNLLADLKTMVETKKVTSSGVLLLDNYSDRIQVLQNMVHCADLSNPTKPLQLYRQWTDRIMEEFFRQGDRERERGMEISPMCDKHNASVEKSQVGFIDYIVHPLWETWADLVHPDAQDILDTLEDNREWYQSTIPQSPSPAPDDPEEGRQGQTEKFQFELTLEEDGESDTEKDSGSQVEEDTSCSDSKTLCTQDSESTEIPLDEQVEEEAVGEEEESQPEACVIDDRSPDT

SEQ ID NO: 48820 - protein, 85 aa, Homo sapiens [sequence omitted]

SEQ ID NO: 48821 - protein, 1093 aa, Homo sapiens
MYSSFNTGGGAAGGPGDDSGGGGGAGGGGGGGSSSSPAATSAAATSAAAAAAAAAAAAAAAAGAGAPSVGAAGAADGGDETRLPFRRGIALLESGCVDNVLQVGFHLSGTVTEPAIQSEPETVCNVAISFDRCKITSVTCSCGNKDIFYCAHVVALSLYRIRKPDQVKLHLPISETLFQMNRDQLQKFVQYLITVHHTEVLPTAQKLADEILSQNSEINQVHGAPDPTAGASIDDENCWHLDEEQVQEQVKLFLSQGGYHGSGKQLNLLFAKVREMLKMRDSNGARMLTLITEQFMADPRLSLWRQQGTAMTDKYRQLWDELGALWMCIVLNPHCKLEQKASWLKQLKKWNSVDVCPWEDGNHGSELPNLTNALPQGANANQDSSNRPHRTVFTRAIEACDLHWQDSHLQHIISSDLYTNYCYHDDTENSLFDSRGWPLWHEHVPTACARVDALRSHGYPREALRLAIAIVNTLRRQQQKQLEMFRTQKKELPHKNITSITNLEGWVGHPLDPVGTLFSSLMEACRIDDENLSGFSDFTENMGQCKSLEYQHLPAHKFLEEGESYLTLAVEVALIGLGQQRIMPDGLYTQEKVCRNEEQLISKLQEIELDDTLVKIFRKQAVFLLEAGPYSGLGEIIHRESVPMHTFAKYLFTSLLPHDAELAYKIALRAMRLLVLESTAPSGDLTRPHHIASVVPNRYPRWFTLSHIESQQCELASTMLTAAKGDVRRLETVLESIQKNIHSSSHIFKLAQDAFKIATLMDSLPDITLLKVSLELGLQVMRMTLSTLNWRRREMVRWLVTCATEVGVYALDSIMQTWFTLFTPTEATSIVATTVMSNSTIVRLHLDCHQQEKLASSARTLALQCAMKDPQNCALSALTLCEKDHIAFETAYQIVLDAATTGMSYTQLFTIARYMEHRGYPMRAYKLATLAMTHLNLSYNQDTHPAINDVLWACALSHSLGKNELAAIIPLVVKSVKCATVLSDILRRCTLTTPGMVGLHGRRNSGKLMSLDKAPLRQLLDATIGAYINTTHSRLTHISPRHYSEFIEFLSKARETFLMAHDGHIQFTQFIDNLKQIYKGKKKLMMLVRERFG

SEQ ID NO: 48822 - protein, 285 aa, Homo sapiens
MFNTGIGQHILKNPLIINSIIDKAALRPTDVVLEVGPGTGNMTVKLLEKAKKVVACELDPRLVAELHKRVQGTPVASKLQVLVGDVLKTDLPFFDTCVANLPYQISSPFVFKLLLHRPFFRCAILMFQREFALRLVAKPGDKLYCRLSINTQLLARVDHLMKVGKNNFRPPPKVESSVVRIEPKNPPPPINFQEWDGLVRITFVRKNKTLSAAFKSSAVQQLLEKNYRIHCSVHNIIIPEDFSIADKIQQILTSTGFSDKRARSMDIDDFIRLLHGFNAEGIHFS

SEQ ID NO: 48823 - protein, 674 aa, Homo sapiens
MSPLQAMSSYTVAGRNVLRWDLSPEQIKTRTEELIVQTKQVYDAVGMLGIEEVTYENCLQALADVEVKYIVERTMLDFPQHVSSDKEVRAASTEADKRLSRFDIEMSMRGDIFERIVHLQETCDLGKIKPEARRYLEKSIKMGKRNGLHLPEQVQNEIKSMKKRMSELCIDFNKNLNEDDTFLVFSKAELGALPDDFIDSLEKTDDDKYKITLKYPHYFPVMKKCCIPETRRRMEMAFNTRCKEENTIILQQLLPLRTKVAKLLGYSTHADFVLEMNTAKSTSRVTAFLDDLSQKLKPLGEAEREFILNLKKKECKDRGFEYDGKINAWDLYYYMTQTEELKYSIDQEFLKEYFPIEVVTEGLLNTYQELLGLSFEQMTDAHVWNKSVTLYTVKDKATGEVLGQFYLDLYPREGKYNHAACFGLQPGCLLPDGSRMMAVAALVVNFSQPVAGRPSLLRHDEVRTYFHEFGHVMHQICAQTDFARFSGTNVETDFVEVPSQMLENWVWDVDSLRRLSKHYKDGSPIADDLLEKLVASRLVNTGLLTLRQIVLSKVDQSLHTNTSLDAASEYAKYCSEILGVAATPGTNMPATFGHLAGGYDGQYYGYLWSEVFSMDMFYSCFKKEGIMNPEVGMKYRNLILKPGGSLDGMDMLHNFLKREPNQKAFLMSRGLHAP

SEQ ID NO: 48824 - protein, 413 aa, Homo sapiens [sequence omitted]

SEQ ID NO: 48825 - protein, 175 aa, Homo sapiens [sequence omitted]

SEQ ID NO: 48826 - protein, 1358 aa, Homo sapiens
MPSSGAETEEEIKNSVSSRSAAEKEDIKRVKSLVVQHNEHEDQHSLDLDRSFDILKKSKPPSTLLAAGRLSDMLNGGDEVYANCMVIDQVGDLDISYINIEGITATTSPESRGCTLWPQSSKHTLPTETSPSVYPLSENVEGTAHTEAQQSFMSPSSSCASNLNLSFGWHGFEKEQSHLKKRSSSLDALDADSEGEGHSEPSHICYTPGSQSSSRTGIPSGDELDSFETNTEPDFNISRAESLPLSSNLQSKESLLSGVRSRSYSCSSPKISLGKTRLVRELTVCSSSEEQRAYSLSEPPRENRIQEEEWDKYIIPAKSESEKYKVSRTFSFLMNRMTSPRNKSKTKSKDAKDKEKLNRHQFAPGTFSGVLQCLVCDKTLLGKESLQCSNCNANVHKGCKDAAPACTKKFQEKYNKNKPQTILGNSSFRDIPQPGLSLHPSSSVPVGLPTGRRETVGQVHPLSRSVPGTTLESFRRSATSLESESDHNSCRSRSHSDELLQSMGSSPSTESFIMEDVVDSSLWSDLSSDAQEFEAESWSLVVDPSFCNRQEKDVIKRQDVIFELMQTEMHHIQTLFIMSEIFRKGMKEELQLDHSTVDKIFPCLDELLEIHRHFFYSMKERRQESCAGSDRNFVIDRIGDILVQQFSEENASKMKKIYGEFCCHHKEAVNLFKELQQNKKFQNFIKLRNSNLLARRRGIPECILLVTQRITKYPVLVERILQYTKERTEEHKDLRKALCLIKDMIATVDLKVNEYEKNQKWLEILNKIENKTYTKLKNGHVFRKQALMSEERTLLYDGLVYWKTATGRFKDILALLLTDVLLFLQEKDQKYIFAAVDQKPSVISLQKLIAREVANEERGMFLISASSAGPEMYEIHTNSKEERNNWMRRIQQAVESCPEEKGGRTSESDEDKRKAEARVAKIQQCQEILTNQDQQICAYLEEKLHIYAELGELSGFEDVHLEPHLLIKPDPGEPPQAASLLAAALKEAESLQVAVKASQMGAVSQSCEDSCGDSVLADTLSSHDVPGSPTASLVTGGREGRGCSDVDPGIQGVVTDLAVSDAGEKVECRNFPGSSQSEIIQAIQNLTRLLYSLQAALTIQDSHIEIHRLVLQQQEGLSLGHSILRGGPLQDQKSRDADRQHEELANVHQLQHQLQQEQRRWLRRCEQQQRAQATRESWLQERERECQSQEELLLRSRGELDLQLQEYQHSLERLREGQRLVEREQARMRAQQSLLGHWKHGRQRSLPAVLLPGGPEVMELNRSESLCHENSFFINEALVQMSFNTFNKLNPSVIHQDATYPTTQSHSDLVRTSEHQVDLKVDPSQPSNVSHKLWTAAGSGHQILPFHESSKDSCKNGN

SEQ ID NO: 48827 - protein, 1412 aa, Homo sapiens
MPSSGAETEEEIKNSVSSRSAAEKEDIKRVKSLVVQHNEHEDQHSLDLDRSFDILKKSKPPSTLLAAGRLSDMLNGGDEVYANCMVIDQVGDLDISYINIEGITATTSPESRGCTLWPQSSKHTLPTETSPSVYPLSENVEGTAHTEAQQSFMSPSSSCASNLNLSFGWHGFEKEQSHLKKRSSSLDALDADSEGEGHSEPSHICYTPGSQSSSRTGIPSGDELDSFETNTEPDFNISRAESLPLSSNLQSKESLLSGVRSRSYSCSSPKISLGKTRLVRELTVCSSSEEQRAYSLSEPPRENRIQEEEWDKYIIPAKSESEKYKVSRTFSFLMNRMTSPRNKSKTKSKDAKDKEKLNRHQFAPGTFSGVLQCLVCDKTLLGKESLQCSNCNANVHKGCKDAAPACTKKFQEKYNKNKPQTILGNSSFRDIPQPGLSLHPSSSVPVGLPTGRRETVGQVHPLSRSVPGTTLESFRRSATSLESESDHNSCRSRSHSDELLQSMGSSPSTESFIMEDVVDSSLWSDLSSDAQEFEAESWSLVVDPSFCNRQEKDVIKRQDVIFELMQTEMHHIQTLFIMSEIFRKGMKEELQLDHSTVDKIFPCLDELLEIHRHFFYSMKERRQESCAGSDRNFVIDRIGDILVQQFSEENASKMKKIYGEFCCHHKEAVNLFKELQQNKKFQNFIKLRNSNLLARRRGIPECILLVTQRITKYPVLVERILQYTKERTEEHKDLRKALCLIKDMIATVDLKVNEYEKNQKWLEILNKIENKTYTKLKNGHVFRKQALMSEERTLLYDGLVYWKTATGRFKDILALLLTDVLLFLQEKDQKYIFAAVDQKPSVISLQKLIAREVANEERGMFLISASSAGPEMYEIHTNSKEERNNWMRRIQQAVESCPEEKGGRTSESDEDKRKAEARVAKIQQCQEILTNQDQQICAYLEEKLHIYAELGELSGFEDVHLEPHLLIKPDPGEPPQAASLLAAALKEAESLQVAVKASQMGAVSQSCEDSCGDSVLADTLSSHDVPGSPTASLVTGGREGRGCSDVDPGIQGVVTDLAVSDAGEKVECRNFPGSSQSEIIQAIQNLTRLLYSLQAALTIQDSHIEIHRLVLQQQEGLSLGHSILRGGPLQDQKSRDADRQHEELANVHQLQHQLQQEQRRWLRRCEQQQRAQATRESWLQERERECQSQEELLLRSRGELDLQLQEYQHSLERLREGQRLVEREQARMRAQQSLLGHWKHGRQRSLPAVLLPGGPEVMELNRSESLCHENSFFINEALVQMSFNTFNKLNPSVIHQDATYPTTQSHSDLVRTSEHQVDLKVDPSQPSNVSHKLWTAAGSGHQILPFHESSKDSCKNDLDTSHTESPTPHDSNSHRPQLQAFITEAKLNLPTRTMTRQDGETGDGAKENIVYL

SEQ ID NO: 48828 - protein, 107 aa, Homo sapiens
MYEKEAKQQEEKIEKMRAEDGENYDIKKQAGLQLLASSDPPTPASQSPGMISAEILQESRMMIPDCQRRLEAAYLDLQRILENEKDLEEAEEYKEARLVLDSVKLEA

SEQ ID NO: 48829 - protein, 1023 aa, Homo sapiens
MSGNSEPKKCLRTRNVSKSLEKLKEFCCDSALPQSRVQTESLQERFAVLPKCTDFDDISLLHAKNAVSSEDSKRQINQKDTTLFDLSQFGSSNTSHENLQKTASKSANKRSKSIYTPLELQYIEMKQQHKDAVLCVECGYKYRFFGEDAEIAARELNIYCHLDHNFMTASIPTHRLFVHVRRLVAKGYKVGVVKQTETAALKAIGDNRSSLFSRKLTALYTKSTLIGEDVNPLIKLDDAVNVDEIMTDTSTSYLLCISENKENVRDKKKGNIFIGIVGVQPATGEVVFDSFQDSASRSELETRMSSLQPVELLLPSALSEQTEALIHRATSVSVQDDRIRVERMDNIYFEYSHAFQAVTEFYAKDTVDIKGSQIISGIVNLEKPVICSLAAIIKYLKEFNLEKMLSKPENFKQLSSKMEFMTINGTTLRNLEILQNQTDMKTKGSLLWVLDHTKTSFGRRKLKKWVTQPLLKLREINARLDAVSEVLHSESSVFGQIENHLRKLPDIERGLCSIYHKKCSTQEFFLIVKTLYHLKSEFQAIIPAVNSHIQSDLLRTVILEIPELLSPVEHYLKILNEQAAKVGDKTELFKDLSDFPLIKKRKDEIQGVIDEIRMHLQEIRKILKNPSAQYVTVSGQEFMIEIKNSAVSCIPTDWVKVGSTKAVSRFHSPFIVENYRHLNQLREQLVLDCSAEWLDFLEKFSEHYHSLCKAVHHLATVDCIFSLAKVAKQGDYCRPTVQEERKIVIKNGRHPVIDVLLGEQDQYVPNNTDLSEDSERVMIITGPNMGGKSSYIKQVALITIMAQIGSYVPAEEATIGIVDGIFTRMGAADNIYKGQSTFMEELTDTAEIIRKATSQSLVILDELGRGTSTHDGIAIAYATLEYFIRDVKSLTLFVTHYPPVCELEKNYSHQVGNYHMGFLVSEDESKLDPGAAEQVPDFVTFLYQITRGIAARSYGLNVAKLADVPGEILKKAAHKSKELEGLINTKRKRLKYFAKLWTMHNAQDLQKWTEEFNMEETQTSLLH

SEQ ID NO: 48830 - protein, 157 aa, Homo sapiens
MFVNRVGHDYQWIGLNDKMFEHDFRWTDGSTLQYENWRPNQPDSFFSAGEDCVVIIWHENGQWNDVPCNYHLTYTCKKGTVACGQPPVVENAKTFGKMKPRYEINSLIRYHCKDGFIQRHLPTIRCLGNGRWAIPKITCMNRKWSFRKNGLPCYNNY

SEQ ID NO: 48831 - protein, 451 aa, Homo sapiens
MDERNRQVTFTKRKFGLMKKAYELSVLCDCEIALIIFNSTNKLFQYASTDMDKVLLKYTEYNEPHESRTNSDIVETLRKKGLNGCDSPDPDADDSVGHSPESEDKYRKINEDIDLMISRQRLCAVPPPNFEMPVSIPVSSHNSLVYSNPVSSLGNPNLLPLAHPSLQRNSMSPGVTHRPPSAGGLMGGDLTSGAGTSAGNGYGNPRNSPGLLVSPGNLNKNMQAKSPPPMNLGMNNRKPDLRVLIPPGSKNTMPSVNQRINNSQSAQSLATPVVSVATPTLPGQGMGGYPSAISTTYGTEYSLSSADLSSLSGFNTASALHLGSVTGWQQQHLHNMPPSALSQLGACTSTHLSQSSNLSLPSTQSLNIKSEPVSPPRDRTTTPSRYPQHTRHEAGRSPVDSLSSCSSSYDGSDREDHRNEFHSPIGLTRPSPDERESPSVKRMRLSEGWAT

SEQ ID NO: 48832 - protein, 266 aa, Homo sapiens
MVLIHGSGVVRAGQWARRLIINEDLDSGTQIPFIKRAVAEGYGVIVLNPNENYIEVEKPKIHVQSSSDSSDEPAEKRERKDKVSKETKKRRDFYEKYRNPQREKEMMQLYIRENGSPEEHAIYVWDHFIAQAAAENVFFVAHSYGGLAFVELMIQREADVKNKVTAVALTDSVHNVWHQEAGKTIREWMRENCCNWVSSSEPLDTSVESMLPDCPRVSAGTDRHELTSWKSFPSIFKFFTEASEAKTSSLKPAVTRRSHRIKHEEL

SEQ ID NO: 48833 - protein, 1042 aa, Homo sapiens
MEEKEALVKLLLKLDCTFIKSEKYKNCTHLIAERLCKSEKFLAACAAGKWILTKDYIIHSAKSGRWLDETTYEWGYKIEKDSRYSPQMQSAPKRWREELKRTGAPGAFHRWKVVLLVRTDKRSDSLIRVLEAGKANVILPKSSPSGITHVIASNARIKAEKEKDNFKAPFYPIQYLGDFLLEKEIQNDEDSQTNSVWTEHSNEETNKDFRKDAGFLEMKGALRETMYRTQKEMQNHEDVNVGSILIQHHKKEKFSGSSKDLKFVKMRNTFGSHTYENQKEIKKKDEDIQRSYTLRRKRKKGKESNCKKGVEHEKIKSTLRRHIYNRDQKEMKNSIFAEYAKESKAMAIKTDVDVVEIKNTLRKHIYRAQAVRYNCIRIDKQPVYNVEVKNAEFPRGVLNLIESLIEGHFFKEAIEELSTLQAHYIPPVCVLHALLENVLQDNIDTFSGRYFHILSALLHLHPPWKSPAMSRYYLELFQCPTCMKGAWSLVEVLIRSCLFNESFCHQISENIGSKVLHLTLLKFFFNLIESEVQHLSQKLYDWSDSQNLKITGKAMLLEIFWSGSETSGLLTKPVNMLLEWTIYSHKEKFKSNDVFKHELAYLLAGILGAAIDYWIFLGLKMGRNVMRHMSDDLGSYVSLSCDDFSSQELEIFICSFSSSWLQMFVAEAVFKKLCLQSSGSVSSEPLSLQKMVYSYLPALGKTGVLGSGKIQVSKKIGQRPCFDSQRTLLMLNGTKQKQVEGLPELLDLNLAKCSSSLKKLKKKSEGELSCSKENCPSVVKKMNFHKTNLKGETALHRACINNQVEKLILLLSLPGIDINVKDNAGWTPLHEACNYGNTVCVQEILQRCPEVDLLTQVDGVTPLHDALSNGHVEIGKLLLQHGGPVLLQQRNAKGELPLDYVVSPQIKEELFAITKIEDTVENFHAQAEKHFHYQQLEFGSFLLSRMLLNFCSIFDLSSEFILASKGLTHLNELLMACKSHKETTSVHTDWLLDLYAGNIKTLQKLPHILKELPENLKVCPGVHTEALMITLEMMCRSVMEFS

SEQ ID NO: 48834 - protein, 102 aa, Homo sapiens
MEPSAIELPDYLIKYIAIVSYEQRQNYKDDFNAEYDEYRALHARMETVARRFIKLDAQRKRLSPGSKEYQVNGFVTRWADFHILPSFFPCPAQPQPSQWPLE

SEQ ID NO: 48835 - protein, 947 aa, Homo sapiens
MSFMNRSSGLRNSATGYRQSPDGACSVPSARTMVVCAFVIVVAVSVIMVIYLLPRCTFTKEGCHKKNQSIGLIQPFATNGKLFPWAQIRLPTAVVPLRYELSLHPNLTSMTFRGSVTISVQALQVTWNIILHSTGHNISRVTFMSAVSSQEKQAEILEYAYHGQIAIVAPEALLAGHNYTLKIEYSANISSSYYGFYGFSYTDESNEKKYFAATQFEPLAARSAFPCFDEPAFKATFIIKIIRDEQYTALSNMPKKSSVVLDDGLVQDEFSESVKMSTYLVAFIVGEMKNLSQDVNGTLVSIYAVPEKIGQVHYALETTVKLLEFFQNYFEIQYPLKKLDLVAIPDFEAGAMENWGLLTFREETLLYDSNTSSMADRKLVTKIIAHELAHQWFGNLVTMKWWNDLWLNEGFATFMEYFSLEKIFKELSSYEDFLDARFKTMKKDSLNSSHPISSSVQSSEQIEEMFDSLSYFKGSSLLLMLKTYLSEDVFQHAVVLYLHNHSYASIQSDDLWDSFNEVTNQTLDVKRMMKTWTLQKGFPLVTVQKKGKELFIQQERFFLNMKPEIQPSDTSYLWHIPLSYVTEGRNYSKYQSVSLLDKKSGVINLTEEVLWVKVNINMNGYYIVHYADDDWEALIHQLKINPYVLSDKDRANLINNIFELAGLGKVPLKRAFDLINYLGNENHTAPITEALFQTDLIYNLLEKLGYMDLASRLVTRVFKLLQNQIQQQTWTDEGTPSMRELRSALLEFACTHNLGNCSTTAMKLFDDWMASNGTQSLPTDVMTTVFKVGAKTDKGWSFLLGKYISIGSEAEKNKILEALASSEDVRKLYWLMKSSLNGDNFRTQKLSFIIRTVGRHFPGHLLAWDFVKENWNKLVQKFPLGSYTIQNIVAGSTYLFSTKTHLSEVQAFFENQSEATFRLRCVQEALEVIQLNIQWMEKNLKSLTWWL

SEQ ID NO: 48836 - protein, 1560 aa, Homo sapiens [sequence omitted]

SEQ ID NO: 48837 - protein, 1184 aa, Homo sapiens
MKEILERISLFKYITVVVFEEEVILNEPVENWPLCDCLISFHSKGFPLDKAVAYAKLRNPFVINDLNMQYLIQDRREVYSILQAEGILLPRYAILNRDPNNPKECNLIEGEDHVEVNGEVFQKPFVEKPVSAEDHNVYIYYPTSAGGGSQRLFRKIGSRSSVYSPESNVRKTGSYIYEEFMPTDGTDVKVYTVGPDYAHAEARKSPALDGKVERDSEGKEVRYPVILNAREKLIAWKVCLAFKQTVCGFDLLRANGQSYVCDVNGFSFVKNSMKYYDDCAKILGNIVMRELAPQFHIPWSIPLEAEDIPIVPTTSGTMMELRCVIAVIRHGDRTPKQKMKMEVRHQKFFDLFEKCDGYKSGKLKLKKPKQLQEVLDIARQLLMELGQNNDSEIEENKPKLEQLKTVLEMYGHFSGINRKVQLTYLPHGCPKTSSEEEDSRREEPSLLLVLKWGGELTPAGRVQAEELGRAFRCMYPGGQGDYAGFPGCGLLRLHSTYRHDLKIYASDEGRVQMTAAAFAKGLLALEGELTPILVQMVKSANMNGLLDSDSDSLSSCQQRVKARLHEILQKDRDFTAEDYEKLTPSGSISLIKSMHLIKNPVKTCDKVYSLIQSLTSQIRHRMEDPKSSDIQLYHSETLELMLRRWSKLEKDFKTKNGRYDISKIPDIYDCIKYDVQHNGSLKLENTMELYRLSKALADIVIPQEYGITKAEKLEIAKGYCTPLVRKIRSDLQRTQDDDTVNKLHPVYSRGVLSPERHVRTRLYFTSESHVHSLLSILRYGALCNESKDEQWKRAMDYLNVVNELNYMTQIVIMLYEDPNKDLSSEERFHVELHFSPGAKGCEEDKNLPSGYGYRPASRENEGRRPFKIDNDDEPHTSKRDEVDRAVILFKPMVSEPIHIHRKSPLPRSRKTATNDEESPLSVSSPEGTGTWLHYTSGVGTGRRRRRSGEQITSSPVSPKSLAFTSSIFGSWQQVVSENANYLRTPRTLVEQKQNPTVGSHCAGLFSTSVLGGSSSAPNLQDYARTHRKKLTSSGCIDDATRGSAVKRFSISFARHPTNGFELYSMVPSICPLETLHNALSLKQVDEFLASIASPSSDVPRKTAEISSTALRSSPIMRKKVSLNTYTPAKILPTPPATLKSTKASSKPATSGPSSAVVPNTSSRKKNITSKTETHEHKKNTGKKK

SEQ ID NO: 48838 - protein, 791 aa, Homo sapiens
MALRIKSDKEYASTLQNLCNQVDKESTVQMNYVSNVSKSWLLMIQQTEQLSRIMKTHAEDLNSGPLHRLTMMIKDKQQVKKSYIGVHQQIEAEMIKVTKTELEKLKCSYRQLIKEMNSAKEKYKEALAKGKETEKAKERYDKATMKLHMLHNQYVLALKGAQLHQNQYYDITLPLLLDSLQKMQEEMIKALKGIFDEYSQITSLVTEEIVNVHKEIQMSVEQIDPSTEYNNFIDVHRTTAAKEQEIEFDTSLLEENENLQANEIMWNNLTAESLQVMLKTLAEELMQTQQMLLNKEEAVLELEKRIEESSETCEKKSDIVLLLSQKQALEELKQSVQQLRCTEAKFSAQKELLEQKVQENDGKEPPPVVNYEEDARSVTSMERKERLSKFESIRHSIAGIIRSPKSALGSSALSDMISISEKPLAEQDWYHGAIPRIEAQELLKKQGDFLVRESHGKPGEYVLSVYSDGQRRHFIIQYVDNMYRFEGTGFSNIPQLIDHHYTTKQVITKKSGVVLLNPIPKDKKWILSHEDVILGELLGKGNFGEVYKGTLKDKTSVAVKTCKEDLPQELKIKFLQEAKILKQYDHPNIVKLIGVCTQRQPVYIIMELVSGGDFLTFLRRKKDELKLKQLVKFSLDAAAGMLYLESKNCIHRDLAARNCLVGENNVLKISDFGMSRQEDGGVYSSSGLKQIPIKWTAPEALNYGRYSSESDVWSFGILLWETFSLGVCPYPGMTNQQAREQVERGYRMSAPQHCPEDISKIMMKCWDYKPENRPKFSELQKELTIIKRKLT

SEQ ID NO: 48839 - protein, 697 aa, Homo sapiens [sequence omitted]

SEQ ID NO: 48840 - protein, 26 aa, Homo sapiens
MIPQSAVDTAMASTLTNFYGDLRKAL

SEQ ID NO: 48841 - protein, 61 aa, Homo sapiens
MRYTTAGQLWNIISPREFVDFSYTVGYKEGLLSCGNNLNMLCFFSVWFKYLCFLGWMSLSL

SEQ ID NO: 48842 - protein, 89 aa, Homo sapiens
MTDRVPCSKCFQVHCQISVLNCVYYPELFVWVSQEPFPNKDMEGRLPKGRLPVPKEVNRKKNDETNAASLTPLGSSELRSPRISYLHFF

SEQ ID NO: 48843 - protein, 171 aa, Homo sapiens [sequence omitted]

SEQ ID NO: 48844 - protein, 104 aa, Homo sapiens
MTDLLAKLEAKTGVNRSFIALGVIGLVALYLVFGYGASLLCNLIGFGYPAYISIKAIESPNKEDDTQWLTYWVVYGVFSIAEFFSDIFLSWFPFYYMLKRRKLP

SEQ ID NO: 48845 - protein, 118 aa, Homo sapiens [sequence omitted]

SEQ ID NO: 48846 - protein, 71 aa, Homo sapiens
MWKTQSLRKCSGRGRANLAQPTQRLRMVWRRKRKPAGRQQPNPLPHLWRRTPQTRRKSLAYGQNPVLMVPL

SEQ ID NO: 48847 - protein, 335 aa, Homo sapiens
MLHSGPRYKANMHFHKLFLSVPTEEPLKQSFTCALQKEILYQGKLFVSENWICFHSKVFGKDTKISIPAFSVTLIKKTKTALLVPNALIIATVTDRYIFVSLLSRDSTYKLLKSVCGHLENTSVGNSPNPSSAENSFRADRPSSLPLDFNDEFSDLDGVVQQRRQDMEGYSSSGSQTPESENSRVDFHATESQTVLNVSKGEAKPTRADAHVNRVPEGKAKSLPVQGLSETVGILHKVKSQKCPMLHHILIFYAIVVCALIISTFYMRYRINTLEEQLGLLTSIVDTHNTEQAAPSGLRSQVQFNVEVLCQELTANIVKLEKIQNNLQKLLENGD

SEQ ID NO: 48848 - protein, 383 aa, Homo sapiens
MIGGPILPSERSGHALIEQWNPVGLVGIITAFNFPVAVYGWNNAIAMICGNVCLWKGAPTTSLISVAVTKIIAKVLEDNKLPGAICSLTCGGADIGTAMAKDERVNLLSFTGSTQVGKQVGLMVQERFGRSLLELGGNNAIIAFEDADLSLVVPSALFAAVGTAGQRCTTARRLFIHESIHDEVVNRLKKAYAQIRVGNPWDPNVLYGPLHTKQAVSMFLGAVEEAKKEGGTVVYGGKVMDRPGNYVEPTIVTGLGHDASIAHTETFAPILYVFKFKNEEEVFAWNNEVKQGLSSSIFTKDLGRIFRWLGPKGSDCGIVNVNIPTSGAEIGGAFGGEKHTGGGRESGSDAWKQYMRRSTWKMYTKRVYWDDFSFILITVAASS

SEQ ID NO: 48849 - protein, 334 aa, Homo sapiens
MIGGPILPSERSGHALIEQWNPVGLVGIITAFNFPVAVYGWNNAIAMICGNVCLWKGAPTTSLISVAVTKIIAKVLEDNKLPGAICSLTCGGADIGTAMAKDERVNLLSFTGSTQVGKQVGLMVQERFGRSLLELGGNNAIIAFEDADLSLVVPSALFAAVGTAGQRCTTARRLFIHESIHDEVVNRLKKAYAQIRVGNPWDPNVLYGPLHTKQAVSMFLGAVEEAKKEGGTVVYGGKVMDRPGNYVEPTIVTGLGHDASIAHTETFAPILYVFKFKNEEEVFAWNNEVKQGLSSSIFTKDLGRIFRWLGYNFVYFENLYKSDLCDLKDQTVAL

SEQ ID NO: 48850 - protein, 515 aa, Homo sapiens
MSVVFLAGTPEHRCRVPDAANLSSAWRNNSVPLRLRDGREVPHSCSRYRLATIANFSALGLEPGRDVDLGQLEQESCLDGWEFSQDVYLSTVVTEWNLVCEDNWKVPLTTSLFFVGVLLGSFVSGQLSDRFGRKNVLFATMAVQTGFSFLQIFSISWEMFTVLFVIVGMGQISNYVVAFILGTEILGKSVRIIFSTLGVCTFFAVGYMLLPLFAYFIRDWRMLLLALTVPGVLCVPLWWFIPESPRWLISQRRFREAEDIIQKAAKMNNIAVPAVIFDSVEELNPLKQQKAFILDLFRTRNIAIMTIMSLLLWMLTSVGYFALSLDAPNLHGDAYLNCFLSALIEIPAYITAWLLLRTLPRRYIIAAVLFWGGGVLLFIQLVPVDYYFLSIGLVMLGKFGITSAFSMLYVFTAELYPTLVRNMAVGVTSTASRVGSIIAPYFVYLGAYNRMLPYIVMGSLTVLIGILTLFFPESLGMTLPETLEQMQKVKWFRSGKKTRDSMETEENPKVLITAF

SEQ ID NO: 48851 - protein, 318 aa, Homo sapiens [sequence omitted]

SEQ ID NO: 48852 - protein, 1306 aa, Homo sapiens [sequence omitted]

SEQ ID NO: 48853 - protein, 653 aa, Homo sapiens [sequence omitted]

SEQ ID NO: 48854 - protein, 72 aa, Homo sapiens
MRHVISYSLSPFEQRAYPHVFTKGIPNVLRRIRESFFRVVPQFVVFYLIYTWGTEEFERSKRKNPAAYENDK

SEQ ID NO: 48855 - protein, 355 aa, Homo sapiens
MKERERRNQEIQQGEDAFPPSSPLFAEPYKVTSKEDKLSSRIQSMLGNYDEMKDFIGDRSIPKLVAIPKPTVPPSADEKSNPNFFEQRHGGSHQSSKWTPVGPAPSTSQSQKRSSGLQSGHSSQRTSAGSSSGTNSSGQRHDRESYNNSGSSSRKKGQHGSEHSKSRSSSPGKPQAVSSLNSSHSRSHGNDHHSKEHQRSKSPRDPDANWDSPSRVPFSSGQHSTQSFPPSLMSKSNSMLQKPTAYVRPMDGQESMEPKLSSEHYSSQSHGNSMTELKPSSKAHLTKLKIPSQPLDASASGDVSCVDEILKEMTHSWPPPLTAIHTPCKTEPSKFPFPTKESQQSNFGTGEQRLK

SEQ ID NO: 48856 - protein, 467 aa, Homo sapiens
MATGNPYLPSSSDLDLLHKIVLKVGNLSPHLQNIFSKSPIFAGVVLPQVQHPKNARKKYPKLNGLLADIVHACLQIDPADRISSSDLLHHEYFTRDGFIEKFMPELKAKLLQEAKVNSLIKPKESSKENELRKDERKTVYTNTLLSSSVLGKEIEKEKKPKEIKVRVIKVKGGRGDISEPKKKEYEGGLGQQDANENVHPMSPDTKLVTIEPPNPINPSTNCNGLKENPHCGGSVTMPPINLTNSNLMAANLSSNLFHPSVRLTERAKKRRTSSQSIGQVMPNSRQEDPGPIQSQMEKGIFNERTGHSDQMANENKRKLNFSRSDRKEFHFPELPVTIQSKDTKGMEVKQIKMLKRESKKTESSKIPTLLNVDQNQEKQEAKEILTKESNVQEVRCPVTVCGDVHGQFHDLMELFRIGGKSPDTNYLFMGDYVDRGYYSVETVTLLVALKVISILCWGMLKWVRQSS

SEQ ID NO: 48857 - protein, 730 aa, Homo sapiens
MKIPDSYQLSPDDYYILADPWRQEWEKGVQVPAGAEAIPEPVVRILPPLEGPPAQASPSSTMLGEGSQPDWPGGSRYDLDEIDAYWLELINSELKEMERPELDELTLERVLEELETLCHQNMARAIETQEGLGIEYDEDVVCDVCRSPEGEDGNEMVFCDKCNVCVHQACYGILKVPTGSWLCRTCALGVQPKCLLCPKRGGALKPTRSGTKWVHVSCALWIPEVSIGCPEKMEPITKISHIPASRWALSCSLCKECTGTCIQCSMPSCVTAFHVTCAFDHGLEMRTILADNDEVKFKSFCQEHSDGGPRNEPTSEPTEPSQAGEDLEKVTLRKQRLQQLEEDFYELVEPAEVAERLDLAEALVDFIYQYWKLKRKANANQPLLTPKTDEVDNLAQQEQDVLYRRLKLFTHLRQDLERVRNLCYMVTRRERTKHAICKLQEQIFHLQMKLIEQDLCRGLSTSFPIDGTFFNSWLAQSVQITAENMAMSEWPLNNGHREDPAPGLLSEELLQDEETLLSFMRDPSLRPGDPARKARGRTRLPAKKKPPPPPPQDGPGSRTTPDKAPKKTWGQDAGSGKGGQGPPTRKPPRRTSSHLPSSPAAGDCPILATPESPPPLAPETPDEAASVAADSDVQVPGPAASPKPLGRLRPPRESKVTRRLPGARPDAGMGPPSAVAERPKVSLHFDTETDGYFSDGEMSDSDVEAEDGGVQRGPREAGAEEVVRMGVLAS

SEQ ID NO: 48858 - protein, 344 aa, Homo sapiens
MLRYIKKGHPKYRIGVGAPVYMAAVLEYLTAEILELAGNAARDNKKGRVTPRHILLAVANDEELNQLLKGVTIASGGVLPNIHPELLAKKRGSKGKLEAIITPPPAKKAKSPSQKKPVSKKAGGKKGARKSKKQGEVSKAASADSTTEGTPADGFTVLSTKSLFLGQKLNLIHSEISNLAGFEVEAIINPTNADIDLKDDLGNTLEKKGGKEFVEAVLELRKKNGPLEVAGAAVSAGHGLPAKFVIHCNSPVWGADKCEELLEKTVKNCLALADDKKLKSIAFPSIGSGRNGFPKQTAAQLILKAISSYFVSTMSSSIKTVYFVLFDSESIGIYVQEMAKLDAN

SEQ ID NO: 48859 - protein, 342 aa, Homo sapiens
MLRYIKKGHPKYRIGVGAPVYMAAVLEYLTAEILELAGNAARDNKKGRVTPRHILLAVANDEELNQLLKGVTIASGGVLPNIHPELLAKKRGSKGKLEAIITPPPAKKAKSPSQKKPVSKKAGGKKGARKSKKKQGEVSKAASADSTTEGTPADGFTVLSTKSLFLGQKLQVVQADIASIDSDAVVHPTNTDFYIGGEVGNTLEKKGGKEFVEAVLELRKKNGPLEVAGAAVSAGHGLPAKFVIHCNSPVWGADKCEELLEKTVKNCLALADDKKLKSIAFPSIGSGRNGFPKQTAAQLILKAISSYFVSTMSSSIKTVYFVLFDSESIGIYVQEMAKLDAN

SEQ ID NO: 48860 - protein, 345 aa, Homo sapiens
MLRYIKKGHPKYRIGVGAPVYMAAVLEYLTAEILELAGNAARDNKKGRVTPRHILLAVANDEELNQLLKGVTIASGGVLPNIHPELLAKKRGSKGKLEAIITPPPAKKAKSPSQKKPVSKKAGGKKGARKSKKKQGEVSKAASADSTTEGTPADGFTVLSTKSLFLGQKLNLIHSEISNLAGFEVEAIINPTNADIDLKDDLGNTLEKKGGKEFVEAVLELRKKNGPLEVAGAAVSAGHGLPAKFVIHCNSPVWGADKCEELLEKTVKNCLALADDKKLKSIAFPSIGSGRNGFPKQTAAQLILKAISSYFVSTMSSSIKTVYFVLFDSESIGIYVQEMAKLDAN

SEQ ID NO: 48861 - protein, 797 aa, Homo sapiens
MQLSQDYNNEDEFGRKLRFLLQQLPPVNYSLLKFLCRFLANVASHHEEIWSANSLAAVFGPDVFHIYTDVEDMKEQEIVSRIMAGLLENYYEFFENEEEDFSSNDLSSITEQVNELSEEEEEDEKLEHIEELPEEGAEKSNDMPEVVQLRMTENILESNSVTATSTHISPISILPASTDILERTIRAAVEQHLFDLQSSIDHDLKNLQQQSVVCNNEAESIHCDGEGSNNQIDIADDIINASESNRDCSKPVASTNLDNEAMQQDCVFENEENTQSVGILLEPCSDRGDSEDGCLEREEYLLFDSDKLSHLILDSSSKICDLNANTESEVPGGQSVGVQGEAACVSIPHLDLKNVSDGDKWEEPFPAFKSWQEDSESGEAQLSPQAGRMNHHPLEEDCPPVLSHRSLDFGQSQRFLHDPEKLDSSSKALSFTRIRRSSFSSKDEKREDRTPYQLVKKLQKKIRQFEEQFERERNSKPSYSDIAANPKVLKWMTELTKLRKQIKDAKHKNSDGEFVPQTRPRSNTLPKSFGSSLDHEDEENEDEPKVIQKEKKPSKEATLELILKRLKEKRIERCLPEDIKKMTKDHLVEEKASLQKSLLYYESQHGRPVTKEERHIVKPLYDRYRLVKQMLTRASITPVLGSPSTKRRGQMLQPIIEGETAHFFEEIKEEEEDGVNLSSELGDMLKTAVQVQSSLENSESDVEENQEKLALDLRLSSSRAASMPELLEQLWKARAEKKKLRKTLREFEEAFYQQNGRNAQKEDRVPVLEEYREYKKIKAKLRLLEVLISKQDSSKSI

SEQ ID NO: 48862 - protein, 920 aa, Homo sapiens
MRSGDQNWVSVSRAIKPFAEPGRPPDWFSQKHCASQYSELLETTETPKRKRGEKGEVVETVEDVIVRKLTAERVEELKKVIKETQERYRRLKRDAELIQAGHMDSRLDELCNDIATKKKLEEEEAEVKRKATDAAYQARQAVKTPPRRLPTVMVRSPIDSASPGGDYPLGDLTPTTMEEATSGVTPGTLPSTPVTSFPGIPDTLPPGSAPLEAPMTPVTDDSPQKKMLGQKATPPPSPLLSELLKKGSLLPTSPRLVNESEMAVASGHLNSTGVLLEVGGVLPMIHGGEIQQTPNTVAASPAASGAPTLSRLLEAGPTQFTTPLASFTTVASEPPVKLVPPPVESVSQATIVMMPALPAPSSAPAVSTTESVAPVSQPDNCVPMEAVGDPHTVTVSMDSSEISMIINSIKEECFRSGVAEAPVGSKAPSIDGKEELDLAEKMDIAVSYTGEELDFETVGDIIAIIEDKVDDHPEVLDVAAVEAALSFCEENDDPQSLPGPWEHPIQQERDKPVPLPAPEMTVKQERLDFEETENKGIHELVDIREPSAEIKVEPAEPEPVISGAEIVAGVVPATSMEPPELRSQDLDEELGSTAAGEIVEADVAIGKGDETPLTNVKTEASPESMLSPSHGSNPIEDPLEAETQHKFEMSDSLKEESGTIFGSQIKDAPGEDEEEDGVSEAASLEEPKEEDQGEGYLSEMDNEPPVSESDDGFSIHNATLQSHTLADSIPSSPASSQFSVCSEDQEAIQAQKIWKKAIMLVWRAAANHRYANVFLQPVTDDIAPGYHSIVQRPMDLSTIKKNIENGLIRSTAEFQRDIMLMFQNAVMYNSSDHDVYHMAVEMQRDVLEQIQQFLATQLIMQTSESGISAKSLRGRDSTRKQDASEKDSVPMGSPAFLLSLFDGGTRGRRCAIEADMKMKK

SEQ ID NO: 48863 - protein, 835 aa, Homo sapiens
MRSGDQNWVSVSRAIKPFAEPGRPPDWFSQKHCASQYSELLETTETPKRKRGEKGEVVETVEDVIVRKLTAERVEELKKVIKETQERYRRLKRDAELIQAGHMDSRLDELCNDIATKKKLEEEEAEVKRKATDAAYQARQAVKTPPRRLPTVMVRSPIDSASPGGDYPLGDLTPTTMEEATSGVTPGTLPSTPVTSFPGIPDTLPPGSAPLEAPMTPVTDDSPQKKMLGQKATPPPSPLLSELLKKGSLLPTSPRLVNESEMAVASGHLNSTGVLLEVGGVLPMIHGGEIQQTPNTVAASPAASVSQPDNCVPMEAVGDPHTVTVSMDSSEISMIINSIKEECFRSGVAEAPVGSKAPSIDGKEELDLAEKMDIAVSYTGEELDFETVGDIIAIIEDKVDDHPEVLDVAAVEAALSFCEENDDPQSLPGPWEHPIQQERDKPVPLPAPEMTVKQERLDFEETENKGIHELVDIREPSAEIKVEPAEPEPVISGAEIVAGVVPATSMEPPELRSQDLDEELGSTAAGEIVEADVAIGKGDETPLTNVKTEASPESMLSPSHGSNPIEDPLEAETQHKFEMSDSLKEESGTIFGSQIKDAPGEDEEEDGVSEAASLEEPKEEDQGEGYLSEMDNEPPVSESDDGFSIHNATLQSHTLADSIPSSPASSQFSVCSEDQEAIQAQKIWKKAIMLVWRAAANHRYANVFLQPVTDDIAPGYHSIVQRPMDLSTIKKNIENGLIRSTAEFQRDIMLMFQNAVMYNSSDHDVYHMAVEMQRDVLEQIQQFLATQLIMQTSESGISAKSLRGRDSTRKQDASEKDGGTRGRRCAIEADMKMKK

SEQ ID NO: 48864 - protein, 514 aa, Homo sapiens [sequence omitted]

SEQ ID NO: 48865 - protein, 68 aa, Homo sapiens [sequence omitted]

SEQ ID NO: 48866 - protein, 1603 aa, Homo sapiens
MGTDSQNQILLEHAALRETVNALISDQKLQEIFSRGPYSVQGHRVKIYQPEGEEGWLYGVVSHQDSITRLMEVSVTESGEIKSVDPRLIHVMLMDNSAPQSEGGTLKAVKSSKGKKKRESIEGKDGRRRKSASDSGCDPASKKLKGDRGEVDSNGSDGGEASRGPWKGGNASGEPGLDQRAKQPPSTFVPQINRNIRFATYTKENGRTLVVQDEPVGGDTPASFTPYSTATGQTPLAPEVGGAENKEAGKTLEQVGQGIVASAAVVTTASSTPNTVRISDTGLAAGTVPEKQKGSRSQASGENSRNSILASSGFGAPLPSSSQPLTFGSGRSQSNGVLATENKPLGFSFGCSSAQEAQKDTDLSKNLFFQCMSQTLPTSNYFTTVSESLADDSSSRDSFKQSLESLSSGLCKGRSVLGTDTKPGSKAGSSVDRKVPAESMPTLTPAFPRSLLNARTPENHENLFLQPPKLSREEPSNPFLAFVEKVEHSPFSSFASQASGSSSSATTVTSKVAPSWPESHSSADSASLAKKKPLFITTDSSKLVSGVLGSALTSGGPSLSAMGNGRSSSPTSSLTQPIEMPTLSSSPTEERPTVGPGQQDNPLLKTFSNVFGRHSGGFLSSPADFSQENKAPFEAVKRFSLDERSLACRQDSDSSTNSDLSDLSDSEEQLQAKTGLKGIPEHLMGKLGPNGERSAELLLGKSKGKQAPKGRPRTAPLKVGQSVLKDVSKVKKLKQSGEPFLQDGSCINVAPHLHKCRECRLERYRKFKEQEQDDSTVACRFFHFRRLIFTRKGVLRVEGFLSPQQSDPDAMNLWIPSSSLAEGIDLETSKYILANVGDQFCQLVMSEKEAMMMVEPHQKVAWKRAVRGVREMCDVCETTLFNIHWVCRKCGFGVCLDCYRLRKSRPRSETEEMGDEEVFSWLKCAKGQSHEPENLMPTQIIPGTALYNIGDMVHAARGKWGIKANCPCISRQNKSVLRPAVTNGMSQLPSINPSASSGNETTFSGGGGPAPVTTPEPDHVPKADSTDIRSEEPLKTDSSASNSNSELKAIRPPCPDTAPPSSALHWLADLATQKAKEETKEAGSLRSVLNKESHSPFGLDSFNSTAKVSPLTPKLFNSLLLGPTASNNKTEGSSLRDLLHSGPGKLPQTPLDTGIPFPPVFSTSSAGVKSKASLPNFLDHIIASVVENKKTSDASKRACNLTDTQKEVKEMVMGLNVLDPHTSHSWLCDGRLLCLHDPSNKNNWKIFRECWKQGQPVLVSGVHKKLKSELWKPEAFSQEFGDQDVDLVNCRNCAIISDVKVRDFWDGFEIICKRLRSEDGQPMVLKLKDWPPGEDFRDMMPTRFEDLMENLPLPEYTKRDGRLNLASRLPSYFVRPDLGPKMYNAYGLITAEDRRVGTTNLHLDVSDAVNVMVYVGIPIGEGAHDEEVLKTIDEGDADEVTKQRIHDGKEKPGALWHIYAAKDAEKIRELLRKVGEEQGQENPPDHDPIHDQSWYLDQTLRKRLYEEYGVQGWAIVQFLGDAVFIPAGAPHQVHNLYSCIKVAEDFVSPEHVKHCFRLTQEFRHLSNTHTNHEDKLQVKNIIYHAVKDAVGTLKAHESKLARS

SEQ ID NO: 48867 - protein, 4 aa, Homo sapiens
MCLP

SEQ ID NO: 48868 - protein, 219 aa, Homo sapiens
MSVAVEFRDYLGDFIEHYAQLGPSQPPDLAQAQDEPRRALKSEFLVRENRKYYMDLKENQRGRFLRIRQTVNRGPGLGSTQGQTIALPAQGLIEFRDALAKLIDDYGVEEEPAELPEGTSLTVDNKRFFFDVGSNKYGVFMRVSEVKPTYRNSITVPYKVWAKFGHTFCKYSEEMKKIQEKQREKRAACEQLHQQQQQQQEETAAATLLLQGEEEGEED

SEQ ID NO: 48869 - protein, 730 aa, Homo sapiens
MHYKGNKELLQLDIKTGNLLLYEKLDREVMCGATEPCILHFQLLLENPVQFFQTDLQLTDINDHAPEFPEKEMLLKIPESTQPGTVFPLKIAQDFDIGSNTVQNYTISPNSHFHVATHNRGDGRKYPELVLDKALDREERPELSLTLTALDGGAPPRSGTTTIRIVVLDNNDNAPEFLQSFYEVQVPENSPLNSLVVVVSARDLDAGAYGSVAYALFQGDEVTQPFVIDEKTAEIRLKRALDFEATPYYNVEIVATDGGGLSGKCTVAIEVVDVNDNAPELTMSTLSSPTPENAPETVVAVFSVSDPDSGDNGRMICSIQNDLPFLLKPTLKNFYTLVTQRTLDRESQAEYNITITVTDMGTPRLKTEHNITVLVSDVNDNAPAFTQTSYTLFVRENNSPALHIGSVSATDRDSGTNAQVTYSLLPPQNPHLRLASLVSINADNGHLFALRSLDYEALQAFEFRVGATDRGSPALSSEALVRVLVLDANDNSPFVLYPLQNGSAPCTELVPRAAEPGYLVTKVVAVDGDSGQNAWLSYQLLKATEPGLFSMWAHNGEVRTARLLSERDAAKHRLVVLVKDNGEPPRSATATLHVLLVDGFSQPYLPLPEAAPAQAQADSLTVYLVVALASVSSLFLFSVLLFVAVRLCRRSRAAPVGRCSVPEGPFPGHLVDVSGTGTLSQSYHYEVCLTGDSGAGEFKFLKPIIPNLLPQGAGEEIGKTAAFRNSFGLN

SEQ ID NO: 48870 - protein, 771 aa, Homo sapiens
MHNRRQRQVLVFFVLLSLSGAGAELGSYSVVEETERGSFVANLGKDLGLGLTEMSTRKARIISQGNKQHLQLKAQTGDLLINEKLDREELCGPTEPCILHFQVLMENPLEIFQAELRVIDINDHSPMFTEKEMILKIPENSPLGTEFPLNHALDLDVGSNNVQNYKISPSSHFRVLIHEFRDGRKYPELVLDKELDREEEPQLRLTLTALDGGSPPRSGTAQVRIEVVDINDNAPEFEQPIYKVQIPENSPLGSLVATVSARDLDGGANGKISYTLFQPSEDISKTLEVNPMTGEVRLRKQVDFEMVTSYEVRIKATDGGGLSGKCTLLLQVVDVNDNPPQVTMSALTSPIPENSPEIVVAVFSVSDPDSGNNGKTISSIQEDLPFLLKPSVKNFYTLVTERALDREARAEYNITLTVTDMGTPRLKTEHNITVQISDVNDNAPTFTQTSYTLFVRENNSPALHIGSVSATDRDSGTNAQVTYSLLPPQDPHLPLASLVSINADNGHLFALRSLDYEALQAFEFRVGATDRGSPALSREALVRVLVLDANDNSPFVLYPLQNGSAPCTELVPRAAEPGYLVTKVVAVDGDSGQNAWLSYQLLKATEPGLFGVWAHNGEVRTARLLSERDAAKQRLVVLVKDNGEPPRSATATLHVLLVDGFSQPFLPLPEAAPGQTQANSLTVYLVVALASVSSLFLFSVLLFVAVRLCRRSRAASVGRCSMPEGPFPGRLVDVSGTGTLSQSYQYEVCLTGGSETSEFKFLKPIIPNFSP

SEQ ID NO: 48871 - protein, 5 aa, Homo sapiens
MNLSL

SEQ ID NO: 48872 - protein, 860 aa, Homo sapiens
MPLFALNPRSGSLITARRIDREELCAQSMPCLVSFNILVEDKMKLFPVEVEIIDINDNTPQFQLEELEFKMNEITTPGTRVSLPFGQDLDVGMNSLQSYQLSSNPHFSLDVQQGADGPQHPEMVLQSPLDREEEAVHHLILTASDGGEPVRSGTLRIYIQVVDANDNPPAFTQAQYHINVPENVPLGTQLLMVNATDPDEGANGEVTYSFHNVDHRVAQIFRLDSYTGEISNKEPLDFEEYKMYSMEVQAQDGAGLMAKVKVLIKVLDVNDNAPEVTITSVTTAVPENFPPGTIIALISVHDQDSGDNGYTTCFIPGNLPFKLEKLVDNYYRLVTERTLDRELISGYNITITAIDQGTPALSTETHISLLVTDINDNSPVFHQDSYSAYIPENNPRGASIFSVRAHDLDSNENAQITYSLIEDTIQGAPLSAYLSINSDTGVLYALRSFDYEQFRDMQLKVMARDSGDPPLSSNVSLSLFLLDQNDNAPEILYPALPTDGSTGVELAPLSAEPGYLVTKVVAVDRDSGQNAWLSYRLLKASEPGLFSVGLHTGEVRTARALLDRDALKQSLVVAVQDHGQPPLSATVTLTVAVADRISDILADLGSLEPSAKPNDSDLTLYLVVAAAAVSCVFLAFVIVLLAHRLRRWHKSRLLQASGGGLASMPGSHFVGVDGVRAFLQTYSHEVSLTADSRKSHLIFPQPNYADTLISQESCEKKGFLSAPQSLLEDKKEPFSQQAPPNTDWRFSQAQRPGTSGSQNGDDTGTWPNNQFDTEMLQAMILASASEAADGSSTLGGGAGTMGLSARYGPQFTLQHVPDYRQNVYIPGSNATLTNAAGKRDGKAPAGGNGNKKKSGKKEKK

SEQ ID NO: 48873 - protein, 931 aa, Homo sapiens
MAAPPARPDHTRLLQICLLLGVLVEIRAEQILYSVFEEQEEGSVVGNIAKDLGLAPRELAERGVRIVSRGRTQLFALNPRSGTLVTAGRIDREELCDRSPNCVTNLEILLEDTVKILRVEVEIIDVNDNPPSFGTEQREIKVAENENPGARFPLPEAFDPDVGVNSLQGYQLNSNGYFSLDVQSGADGIKYPELVLERALDREEEAVHHLVLTAFDGGDPVRSGTARILIILVDTNDNAPVFTQPEYHVSVRENVPVGTRLLTVKATDPDEGANGDVTYSFRKVRDKISQLFQLNSLSGDITILGGLDYEDSGFYDIDVEAHDGPGLRARSKVLVTVLDENDNAPEVTVTSLTSSVQESSSPGTVIALFNVHDSDSGGNGLVTCSIPDNLPFTLEKTYGNYYRLLTHRTLDREEVSEYNITVTATDQGTPPLSTETHISLQVMDINDNPPTFPHASYSAYIPENNPRGASILSMTAQDPDSGDNARITYSLAEDTFQGAPLSSYVSINSNTGILYALCSFDYEQFRDLQLLMTASDSGDPPLSSNVSLSLFVLDQNDNVPEILYPTFPTDGSTGVELAPRSADSGYLVTKVVAVDRDSGQNAWLSYSLLKSSEPGLFAVGLHTGEVRTARALLDRDALKQRLVVVVQDHGQPPLSATVTLTVAVADSIPDVLADLGSLKPSADPDDSGLTLYLVVAVAAVSCVFLAFVTVLLALKLRRWHKSRLLHAEGSRLAGVPASHFVGVDGVRAFLQTYSHEVSLTADSRKSHLIFSQPSYADTLISRESCEKSEPLLITQDLLETKGDPNLQQAPPNTDWRFSQAQRPGTSGSQNGDDTGTWPNNQFDTEMLQAMILASASEAADGSSTLGGGAGTMGLSARYGPQFTLQHVPDYRQNVYIPGSNATLTNAAGKRDGKAPAGGNGNKKKSGKKEKK

SEQ ID NO: 48874 - protein, 515 aa, Homo sapiens
MVTASDAGNPPLSTHRTIFLNISDVNDNPPSFFQRSHEVFVPENNRPGDLLCSLAASDPDSGLNALISYSLLEPRNRDVSASSFISLNPQTGAVHATRSFDYEQTQTLQFEVQARDRGNPPLSSTVTVRLFVLDLNDNAPAVLRPRARPGSLCPQALPPSVGAGHLITKVTAVDLDSGYNAWVSYQLLEAPDPSLFAVSRYAGEVRTAVPIPADLPPQKLVIVVKDSGSPPLSTSVTLLVSLEEDTHPVVPDLRESSAPREGESRLTLYLAVSLVAICFVSFGSFVALLSKCLRGAACGVTCFPAGTCACLTRSRRREGLPPSNGILRIQLGSDDPIKFVDVGGHSHGCTPLASAPTRSDSFMMVKSPSAPMAGEPVRPSCPPSDLLYGLEQAPPNTDWRFSQAQRPGTSGSQNGDDTGTWPNNQFDTEMLQAMILASASEAADGSSTLGGGAGTMGLSARYGPQFTLQHVPDYRQNVYIPGSNATLTNAAGKRDGKAPAGGNGNKKKSGKKEKK

SEQ ID NO: 48875 - protein, 443 aa, Homo sapiens [sequence omitted]

SEQ ID NO: 48876 - protein, 138 aa, Homo sapiens [sequence omitted]

SEQ ID NO: 48877 - protein, 1159 aa, Homo sapiens
MNQLSHEVLCHIFRYLPLQDIMCMECLSRKLKEAVTLYLRVVRVVDLCAGRWWEYMPSGFTDASFLTLLKKMPDVEQLYGLHPRYLERRRVRGHEAFSIPGVLEALQACPNLVGVETSHLELVESIWTYMPHVHILGKFRNRNGAFPIPPENKLKIPIGAKIQTLHLVGVNVPEIPCIPMLRHLYMKWVRLTKPQPFKDFLCISLRTFVMRNCAGPTNSLKYVPLVTGLASARNLEHLEMVRVPFLGGLIQHVVEDSWRSGGFRNLHTIVLGACKNALEVDLGYLIITAARRLHEVRIQPSLTKDGVFSALKMAELEFPQFETLHLGYVDEFLLQSRMANADLVKYGLADVVENPGIITDIGMKAVNEVFSCIKYLAIYNCPHLHNPYNWISDHSRWTRLVDINLVRCHALKLDSFGQFIELLPSLEFISLDQMFREPPKGCARVGLSAGTGIGVSSALVSNQNSNNDDNNAQNNNANIHDNNHHHPDDSDEENDFRQDLQPGEQQFAADALNEMEDIVQEDGEVVAESGNNTPAHSQAIIPVDVDEEQAGPSGLQRVVKPTSITVHDSESDDEEDSLELQEVWIPKNGTRRYSEREEKTGESVQSRELSVSGKGKTPLRKRYNSHQMGQSKQFPLEESSCEKGCQVTSEQIKADMKAARDIPEKKKNKDVYPSCSSTTASTVGNSSSHNTASQSPDFVRTVNSGGSSEPSPTEVDVSRQCACSPGGSEDSEAMEEGDAESSVCPRCCCHRPQESQRRTSRCSDEERPSTSRACVVNGPDGTRSAFSFRTLPQGGSSGPAHDERTNGSGSGATGEDRRGSSQPESCDVQSNEDYPRRPLTRARSRLSHVLLVSESEVAKTKPRHAMKRKRTADKSTSTSDPVIEDDHVQVLVLKSKNLVGVTMTNCGITDLVLKDCPKMMFIHATRCRVLKHLKVENAPIVNRFDYAQCKKLNMDQVLDQILRMPPERNRIIYLRPMQQVDTLTLEQKLFSGPYPYHICIIHEFSNPPNVRNKVRIRSWMDTIANINQELIKYEFFPEATRSEEDLKKYPKYPWGREIYTLEGVVDGAPYSMISDFPWLRSLRAAEPNSFARYDFEDDEESTIYAPRRKGQLSADICMETIGEEISEMRQMKKGVFQRVVAIFIHYCDVNGEPVEDDYI

SEQ ID NO: 48878 - protein, 521 aa, Homo sapiens
MAPAVTAAGTSSQAKSSRPWAALTTPSASCAACAGHLQGWRAHPCLLLYLPHHHHLLIQQVKPFPIGDKVTFSGKECVCQTCSQSMASSKPIKIRGPSHCAGCKEEIKHGQSLLALDKQWHVSCFKCQTCSVILTGEYISKDGVPYCESDYHAQFGIKCETCDRYISGRVLEAGGKHYHPTCARCVRCHQMFTEGEEMYLTGSEVWHPICKQAARAEKKLKHRRTSETSISPPGSSIGSPNRVICDIYENLDLRQRRASSPGYIDSPTYSRQGMSPTFSRSPHHYYRSGDLSTATKSKTSEDISQTSKYSPIYSPDPYYASESEYWTYHGSPKVPRARRFSSGGEEDDFDRSMHKLQSGIGRLILKEEMKARSSSYADPWTPPRSSTSSREALHTAGYEMSLNGSPRSHYLADSDPLISKSASLPAYRRNGLHRTPSADLFHYDSMNAVNWGMREYKIYPYELLLVTTRGRNRLPKDVDRTRLERHLSQEEFYQVFGMTISEFDRLALWKRNELKKQARLF

SEQ ID NO: 48879 - protein, 584 aa, Homo sapiens [sequence omitted]

SEQ ID NO: 48880 - protein, 477 aa, Homo sapiens
MPRRAKSVREGRAVVGAGIGGSAVAHFLQQHFGPRVQIDVYEKGTVGGRLATISVNKQHYESGAASFHSLSLHMQDFVKLLGLRHRREVVGRSAIFGGEHFMLEETDWYLLNLFRLWWHYGISFLRLQMWVEEVMEKFMRIYKYQAHGYAFSGVEELLYSLGESTFVNMTQHSVAESLLQVGVTQRFIDDVVSAVLRASYGQSAAMPAFAGAMSLAGAQGSLWSVEGGNKLVCSGLLKLTKANVIHATVTSVTLHSTEGKALYQVAYENEVGNSSDFYDIVVIATPLHLDNSSSNLTFAGFHPPIDDVQGSFQPTVVSLVHGYLNSSYFGFPDPKLFPFANILTTDFPSFFCTLDNICPVNISASFRRKQPQEAAVWRVQSPKPLFRTQLKTLFRSYYSVQTAEWQAHPLYGSRPTLPRFALHDQLFYLNALEWAASSVEVMAVAAKNVALLAYNRWYQDLDKIDQKDLMHKVKTEL

SEQ ID NO: 48881 - protein, 1368 aa, Homo sapiens
MKEKAKAETEKAGKTGNSMPHPATGKTVANLLSGKSPRKSAEPSANTTLVSETEEEGSVPAFGAAAKPGMVSAGQADSSSEDTSSSSDETDVEGKPSVKPAQVKASSVSTKESPARKAAPAPGKVGDVTPQVKGGALPPAKRAKKPEEESESSEEGSESEEEAPAGTRSQVKASEKILQVRAASAPAKGTPGKGATPAPPGKAGAVASQTKAGKPEEDSESSSEESSDSEEETPAAKALLQAKASGKTSQVGAASAPAKESPRKGAAPAPPGKTGPAVAKAQAGKREEDSQSSSEESDSEEEAPAQAKPSGKAPQVRAASAPAKESPRKGAAPAPPRKTGPAAAQVQVGKQEEDSRSSSEESDSDREALAAMNAAQVKPLGKSPQVKPASTMGMGPLGKGAGPVPPGKVGPATPSAQVGKWEEDSESSSEESSDSSDGEVPTAVAPAQEKSLGNILQAKPTSSPAKGPPQKAGPVAVQVKAEKPMDNSESSEESSDSADSEEAPAAMTAAQAKPALKIPQTKACPKKTNTTASAKVAPVRVGTQAPRKAGTATSPAGSSPAVAGGTQRPAEDSSSSEESDSEEEKTGLAVTVGQAKSVGKGLQVKAASVPVKGSLGQGTAPVLPGKTGPTVTQVKAEKQEDSESSEEESDSEEAAASPAQVKTSVKKTQAKANPAAARAPSAKGTISAPGKVVTAAAQAKQRSPSKVKPPVRNPQNSTVLARGPASVPSVGKAVATAAQAQTGPEEDSGSSEEESDSEEEAETLAQVKPSGKTHQIRAALAPAKESPRKGAAPTPPGKTGPSAAQAGKQDDSGSSSEESDSDGEAPAAVTSAQVIKPPLIFVDPNRSPAGPAATPAQAQAASTPRKARASESTARSSSSESEDEDVIPATQCLTPGIRTNVVTMPTAHPRIAPKASMAGASSSKESSRISDGKKQEGPATQVSKKNPASLPLTQAALKVLAQKASEAQPPVARTQPSSGVDSAVGTLPATSPQSTSVQAKGTNKLRKPKLPEVQQATKAPESSDDSEDSSDSSSGSEEDGEGPQGAKSAHTLGPTPSRTETLVEETAAESSEDDVVAPSQSLLSGYMTPGLTPANSQASKATPKLDSSPSVSSTLAAKDDPDGKQEAKPQQAAGMLSPKTGGKEAASGTTPQKSRKPKKGAGNPQASTLALQSNITQCLLGQPWPLNEAQVQASVVKVLTELLEQERKKVVDTTKESSRKGWESRKRKLSGDQPAARTPRSKKKKKLGAGEGGEASVSPEKTSTTSKGKAKRDKASGDVKEKKGKGSLGSQGAKDEPEEELQKGMGTVEGGDQSNPKSKKEKKKSDKRKKDKEKKEKKKKAKKASTKDSESPSQKKKKKKKKTAEQTV

SEQ ID NO: 48882 - protein, 385 aa, Homo sapiens
MTKEKYGKECKICARPFTVFRWCPGVRMRFKKTEVCQTCSKLKNVCQTCLLDLEYGLPIQVRDAGLSFKDDMPKSDVNKEYYTQNMEREISNSDGTRPVGMLGKATSTSDMLLKLARTTPYYKRNRPHICSFWVKGECKRGEECPYRHEKPTDPDDPLADQNIKDRYYGINDPVADKLLKRASTMPRLDPPEDKTITTLYVGGLGDTITETDLRNHFYQFGEIRTITVVQRQQCAFIQFATRQAAEVAAEKSFNKLIVNGRRLNVKWGRSQAARGKEKEKDGTTDSGIKLEPVPGLPGALPPPPAAEEEASANYFNLPPSGPPAVVNIALPPPPGIAPPPPPGFGPHMFHPMGPPPPFMRAPGPIHYPSQDPQRMGAHAGKHSSP

SEQ ID NO: 48883 - protein, 53 aa, Homo sapiens [sequence omitted]

SEQ ID NO: 48884 - protein, 593 aa, Homo sapiens [sequence omitted]

SEQ ID NO: 48885 - protein, 382 aa, Homo sapiens
MGILVKCAHHFCRRLNKSFVDYGDTVMYGLESSPCSWLRNHAHWGRRVVDFFLIVTQLGFCCVYFVFLADNFKQVIEAANGTTNNCHNNETVILTPTMDSRLYMLSFLPFLVLLVFIRNLRALSIFSLLANITMLVSLVMIYQFIVQRIPDPSHLPLVAPWKTYPLFFGTAIFSFEGIGMVLPLENKMKDPRKFPLILYLGMVIVTILYISLGCLGYLQFGANIQGSITLNLPNCWLYQSVKLLYSIGIFFTYALQFYVPAEIIIPFFVSRAPEHCELVVDLFVRTVLVCLTCILAILIPRLDLVISLVGSVSSSALALIIPPLLEVTTFYSEGMSPLTIFKDALISILGFVGFVVGTYEALYELIQPSNAPIFINSTCAFI

SEQ ID NO: 48886 - protein, 321 aa, Homo sapiens
MDVIAEGDPGFKRTKGLMNRNATLSQVLREAKEKEEIRTSNEVTVETDKKTHYGLLFDEFQGLSHLEALEMLSQESEIKVKSILNSLSGEELETLKVELEQLKETFSLAEFCEEEEEEKKGDEDFTKDITELFSQLHVSSKPEKLARARNTAHEWIRKSLTKPLAENEEGEKQSEAENTEQVNKNSIEDIHAFAIRSLAELTACSIELFHKTAALVLHGRKQEVTAIERSQTLSQMTIVLCKELSSLSKEFTTCLTTAGVKEMADVLNPLITAVFLEASNSASYIQDAFQLLLPVLEISLIENKIESHRHELQGQKPLLEH

SEQ ID NO: 48887 - protein, 838 aa, Homo sapiens [sequence omitted]

SEQ ID NO: 48888 - protein, 254 aa, Homo sapiens
MDTEFPGVVVRPIGEFRSSIDYQYQLLRCNVDLLKIIQLGLTFTNEKGEYPSGINTWQFNFKFNLTEDMYSQDSIDLLANSGLQFQKHEEEGIDTLHFAELLMTSGVVLCDNVKWLSFHSGYDFGYMVKLLTDSRLPEEEHEFFHILNLFFPSIYDVKYLMKSCKNLKGGLQEVADQLDLQRIGRQHQAGSDSLLTGMAFFRMKELFFEDSIDDAKYCGRLYGLGTGVAQKQNEDVDSAQEKMSILAIINNMQQ

SEQ ID NO: 48889 - protein, 200 aa, Homo sapiens
MDTEFPGVVVRPIGEFRSSIDYQYQLLRCNVDLLKIIQLGLTFTNEKGEYPSGINTWQFNFKFNLTGYDFGYMVKLLTDSRLPEEEHEFFHILNLFFPSIYDVKYLMKSCKNLKGGLQEVADQLDLQRIGRQHQAGSDSLLTGMAFFRMKELFFEDSIDDAKYCGRLYGLGTGVAQKQNEDVDSAQEKMSILAIINNMQQ

SEQ ID NO: 48890 - protein, 189 aa, Homo sapiens
MSDEEKQKRREESTRLKEEGNEQFKKGDYIEAESSYSRALEMCPSCFQKERSILFSNRAAARMKQDKKEMAINDCSKAIQLNPSYIRAILRRAELYEKTDKLDEALEDYKSILEKDPSIHQAREACMRLPKQIEERNERLKEEMLGKLKDLGNLVLRPFGLSTENFQIKQDSSTGSYSINFVQNPNNNR

SEQ ID NO: 48891 - protein, 567 aa, Homo sapiens [sequence omitted]

SEQ ID NO: 48892 - protein, 249 aa, Homo sapiens
MTARLRDFEVKDLLSLTQFFGFDTETFSLAVNLLDRFLSKMKVQPKHLGCVGLSCFYLAVKSIEEERNVPLATDLIRISQYRFTVSDLMRMEKIVLEKVCWKVKATTAFQFLQLYYSLLQENLPLERRNSINFERLEAQLKACHCRIIFSKAKPSVLALSIIALEIQAQKCVELTEGIECLQKHSKINGRDLTFWQELVSKCLTEYSSNKCSKPNVQKLKWIVSGRTARQLKHSYYRITHLPTIPEMVP

SEQ ID NO: 48893 - protein, 555 aa, Homo sapiens
MTESYEQEKYTLQREVELKSRMLESLSCECEAIKQQQKMHLEKLEEQLSRSHGQEVNELKTKIEKLKVELDEARLSEKQLKHQVDHQKELLSCKSEELRVMSERVQESMSSEMLALQIELTEMESMKTTLKEEVNELQYRQEQLELLITNLMRQVDRLKEEKEEREKEAVSYYNALEKARVANQDLQVQLDQALQQALDPNSKGNSLFAEVEDRRAAMERQLISMKVKYQSLKKQNVFNREQMQRMKLQIATLLQMKGSQTEFEQQERLLAMLEQKNGEIKHLLGEIRNLEKFKNLYDSMESKPSVDSGTLEDNTYYTDLLQMKLDNLNKEIESTKGELSIQRMKALFESQRALDIERKLFANERCLQLSESENMKLRAKLDELKLKYEPEETVEVPVLKKRREVLPVDITTAKDACVNNSALGGEVYRLPPQKEETQSCPNSLEDNNLQLEKSVSIYTPVVSLSPHKNLPVDMQLKKEKKCVKLIGVPADAEALSERSGNTPNSPRLAAESKLQTEVKEGKETSSKLEKETCKKLHPILYVSSKSTPETQCPQQ

SEQ ID NO: 48894 - protein, 1620 aa, Homo sapiens [sequence omitted]

SEQ ID NO: 48895 - protein, 530 aa, Homo sapiens
MKVRPVLLKRNSLESVEFVKQPHHRRSKSQQVRFKEDGTTKNPTGLAEVDVQTPEDPAVMGKTQATRHHLPPTYSLSFPRSQKAGGFRNIAIQTSPSLRKHFPVFKRKRLTASKSLVEMPTASQSAIQVNGNLSEQDIVSSDLAYLRLAQHLEDGPRRVKVSHAFLPRVPKVQSNGPVSICLEAGTWRSLEKATAAIQVPDDIYHSPSWEARESALSPDRSAEVSNSIHPLDDTRPGDGRRVTPLDSEKSTSCLNATSVASHTPGTEELKPELLLPKDNSDDKDLGSLSSQSKETCVPSSPRTHSSPSQGSHSQPAHPGRASDCPSSSNNHQNLVSLKTNSASKSAPGCQEQTANNPTESDTLEFPNCPGSNHLPSSLSRSETKLQSNREISDINQIHLARGELCDLQGRLQSVEESLHSNQEKIKVLLNVIQDLEKARALTEGRNFYRTGQDLNNCSTCQNTACIIYSVEYDFRQQEGRFHEVLQSLEEAEPVEEASPPPKSPAEPPAPEKQDLRRKTKKVKKKCFWWI

SEQ ID NO: 48896 - protein, 190 aa, Homo sapiens
MTDGQLRSKRDEFWDTAPAFEGRKEIWDALKAAAHAFESNDHELAQAIIDGANITLPHGALTECYDELGNRYQLPVYCLAPPINMIEEKSDIETLDIPEPPPNSGYECQLRLRLSTGKDLKLVVRSTDTVFHMKRRLHAAEGVEPGSQRWFFSGRPLTDKMKFEELKIPKDYVVQVIVSQPVQNPTPVEN

SEQ ID NO: 48897 - protein, 271 aa, Homo sapiens [sequence omitted]

SEQ ID NO: 48898 - protein, 2616 aa, Homo sapiens
MINVEYLNGSADGSESFQDPEKSDSRAQTPIVCTSLSPGGPTALAMKQEPSCNNSPELQVKVTKTIKNGFLHFENFTCVDDADVDSEMDPEQPVTEDESIEEIFEETQTNATCNYETKSENGVKVAMGSEQDSTPESRHGAVKSPFLPLAPQTETQKNKQRNEVDGSNEKAALLPAPFSLGDTNITIEEQLNSINLSFQDDPDSSTSTLGNMLELPGTSSSSTSQELPFCQPKKKSTPLKYEVGDLIWAKFKRRPWWPCRICSDPLINTHSKMKVSNRRPYRQYYVEAFGDPSERAWVAGKAIVMFEGRHQFEELPVLRRRGKQKEKGYRHKVPQKILSKWEASVGLAEQYDVPKGSKNRKCIPGSIKLDSEEDMPFEDCTNDPESEHDLLLNGCLKSLAFDSEHSADEKEKPCAKSRARKSSDNPKRTSVKKGHIQFEAHKDERRGKIPENLGLNFISGDISDTQASNELSRIANSLTGSNTAPGSFLFSSCGKNTAKKEFETSNGDSLLGLPEGALISKCSREKNKPQRSLVCGSKVKLCYIGAGDEEKRSDSISICTTSDDGSSDLDPIEHSSESDNSVLEIPDAFDRTENMLSMQKNEKIKYSRFAATNTRVKAKQKPLISNSHTDHLMGCTKSAEPGTETSQVNLSDLKASTLVHKPQSDFTNDALSPKFNLSSSISSENSLIKGGAANQALLHSKSKQPKFRSIKCKHKENPVMAEPPVINEECSLKCCSSDTKGSPLASISKSGKVDGLKLLNNMHEKTRDSSDIETAVVKHVLSELKELSYRSLGEDVSDSGTSKPSKPLLFSSASSQNHIPIEPDYKFSTLLMMLKDMHDSKTKEQRLMTAQNLVSYRSPGRGDCSTNSPVGVSKVLVSGGSTHNSEKKGDGTQNSANPSPSGGDSALSGELSASLPGLLSDKRDLPASGKSRSDCVTRRNCGRSKPSSKLRDAFSAQMVKNTVNRKALKTERKRKLNQLPSVTLDAVLQGDRERGGSLRGGAEDPSKEDPLQIMGHLTSEDGDHFSDVHFDSKVKQSDPGKISEKGLSFENGKGPELDSVMNSENDELNGVNQVVPKKRWQRLNQRRTKPRKRMNRFKEKENSECAFRVLLPSDPVQEGRDEFPEHRTPSASILEEPLTEQNHADCLDSAGPRLNVCDKSSASIGDMEKEPGIPSLTPQAELPEPAVRSEKKRLRKPSKWLLEYTEEYDQIFAPKKKQKKVQEQVHKVSSRCEEESLLARGRSSAQNKQVDENSLISTKEEPPVLEREAPFLEGPLAQSELGGGHAELPQLTLSVPVAPEVSPRPALESEELLVKTPGNYESKRQRKPTKKLLESNDLDPGFMPKKGDLGLSKKCYEAGHLENGITESCATSYSKDFGGGTTKIFDKPRKRKRQRHAAAKMQCKKVKNDDSSKEIPGSEGELMPHRTATSPKETVEEGVEHDPGMPASKKMQGERGGGAALKENVCQNCEKLGELLLCEAQCCGAFHLECLGLTEMPRGKFICNECRTGIHTCFVCKQSGEDVKRCLLPLCGKFYHEECVQKYPPTVMQNKGFRCSLHICITCHAANPANVSASKGRLMRCVRCPVAYHANDFCLAAGSKILASNSIICPNHFTPRRGCRNHEHVNVSWCFVCSEGGSLLCCDSCPAAFHRECLNIDIPEGNWYCNDCKAGKKPHYREIVWVKVGRYRWWPAEICHPRAVPSNIDKMRHDVGEFPVLFFGSNDYLWTHQARVFPYMEGDVSSKDKMGKGVDGTYKKALQEAAARFEELKAQKELRQLQEDRKNDKKPPPYKHIKVNRPIGRVQIFTADLSEIPRCNCKATDENPCGIDSECINRMLLYECHPTVCPAGGRCQNQCFSKRQYPEVEIFRTLQRGWGLRTKTDIKKGEFVNEYVGELIDEEECRARIRYAQEHDITNFYMLTLDKDRIIDAGPKGNYARFMNHCCQPNCETQKWSVNGDTRVGLFALSDIKAGTELTFNYNLECLGNGKTVCKCGAPNCSGFLGVRPKNQPIATEEKSKKFKKKQQGKRRTQGEITKEREDECFSCGDAGQLVSCKKPGCPKVYHADCLNLTKRPAGKWECPWHQCDICGKEAASFCEMCPSSFCKQHREGMLFISKLDGRLSCTEHDPCGPNPLEPGEIREYVPPPVPLPPGPSTHLAEQSTGMAAQAPKMSDKPPADTNQMLSLSKKALAGTCQRPLLPERPLERTDSRPQPLDKVRDLAGSGTKSQSLVSSQRPLDRPPAVAGPRPQLSDKPSPVTSPSSSPSVRSQPLERPLGTADPRLDKSIGAASPRPQSLEKTSVPTGLRLPPPDRLLITSSPKPQTSDRPTDKPHASLSQRLPPPEKVLSAVVQTLVAKEKALRPVDQNTQSKNRAALVMDLIDLTPRQKERAASPHQVTPQADEKMPVLESSSWPASKGLGHMPRAVEKGCVSDPLQTSGKAAAPSEDPWQAVKSLTQARLLSQPPAKAFLYEPTTQASGRASAGAEQTPGPLSQSPGLVKQAKQMVGGQQLPALAAKSGQSFRSLGKAPASLPTEEKKLVTTEQSPWALGKASSRAGLWPIVAGQTLAQSCWSAGSTQTLAQTCWSLGRGQDPKPEQNTLPALNQAPSSHKCAESEQK

SEQ ID NO: 48899 - protein, 586 aa, Homo sapiens
MYGFCSVKDSQAALPKYVLINWVGEDVPDARKCACASHVAKVAEFFQGVDVIVNASSVEDIDAGAIGQRLSNGLARLSSPVLHRLRLREDENAEPVGTTYQKTDAAVEMKRINREQFWEQAKKEEELRKEEERKKALDERLRFEQERMEQERQEQEERERRYREREQQIEEHRRKQQTLEAEEAKRRLKEQSIFGDHRDEEEETHMKKSESEVEEAAAIIAQRPDNPREFFKQQERVASASAGSCDVPSPFNHRPGSHLDSHRRMAPTPIPTRSPSDSSTASTPVAEQIERALDEVTSSQPPPLPPPPPPAQETQEPSPILDSEETRAAAPQAWAGPMEEPPQAQAPPRGPGSPAEDLMFMESAEQAVLAAPVEPATADATEIHDAADTIETDTATADTTVANNVPPAATSLIDLWPGNGEGASTLQGEPRAPTPPSGTEVTLAEVPLLDEVAPEPLLPAGEGCATLLNFDELPEPPATFCDPEEVEGESLAAPQTPTLPSALEELEQEQEPEPHLLTNGETTQKEGTQASEGYFSQSQEEEFAQSEELCAKAPPPVFYNKPPEIDITCWDADPVPEEEEGFEGGD

SEQ ID NO: 48900 - protein, 632 aa, Homo sapiens
MYGFCSVKDSQAALPKYVLINWVGEDVPDARKCACASHVAKVAEFFQGVDVIVNASSVEDIDAGAIGQRLSNGLARLSSPVLHRLRLREDENAEPVGTTYQKTDAAVEMKRINREQFWEQAKKEEELRKEEERKKALDERLRFEQERMEQERQEQEERERRYREREQQIEEHRRKQQTLEAEEAKRRLKEQSIFGDHRDEEEETHMKKSESEVEEAAAIIAQRPDNPREFFKQQERVASASAGSCDVPSPFNHRPGRPYCPFIKASDSGPSSSSSSSSSPPRTPFPYITCHRTPNLSSSLPCSHLDSHRRMAPTPIPTRSPSDSSTASTPVAEQIERALDEVTSSQPPPLPPPPPPAQETQEPSPILDSEETRAAAPQAWAGPMEEPPQAQAPPRGPGSPAEDLMFMESAEQAVLAAPVEPATADATEIHDAADTIETDTATADTTVANNVPPAATSLIDLWPGNGEGASTLQGEPRAPTPPSGTEVTLAEVPLLDEVAPEPLLPAGEGCATLLNFDELPEPPATFCDPEEVEGESLAAPQTPTLPSALEELEQEQEPEPHLLTNGETTQKEGTQASEGYFSQSQEEEFAQSEELCAKAPPPVFYNKPPEIDITCWDADPVPEEEEGFEGGD

SEQ ID NO: 48901 - protein, 323 aa, Homo sapiens
METTGATENGHEAVPEGESPAGAGTGAAAGAGGATAAPPSGNQNGAEGDQINASKNEEDAGKMFVGGLSWDTSKKDLKDYFTKFGEVVDCTIKMDPNTGRSRGFGFILFKDAASVEKVLDQKEHRLDGRVIDPKKAMAMKKDPVKKIFVGGLNPEATEEKIREYFGEFGEIEAIELPMDPKLNKRRGFVFITFKEEEPVKKVLEKKFHTVSGSKCEIKVAQPKEVYQQQQYGSGGRGNRNRGNRGSGGGGGGGGQSQSWNQGYGNYWNQGYGYQQGYGPGYGGYDYSPYGYYGYGPGYDYSQGSTNYGKSQRRGGHQNNYKPY

SEQ ID NO: 48902 - protein, 308 aa, Homo sapiens [sequence omitted]

SEQ ID NO: 48903 - protein, 409 aa, Homo sapiens
MYDEQGAEYIDCISNVAHVGHCHPLVVQAAHEQNQVLNTNSRYLHDNIVDYAQRLSETLPEQLCVFYFLNSGSEANDLALRLARHYTGHQDVVVLDHAYHGHLSSLIDISPYKFRNLDGQKEWVHVAPLPDTYRGPYREDHPNPAMAYANEVKRVVSSAQEKGRKIAAFFAESLPSVGGQIIPPAGYFSQVAEHIRKAGGVFVADEIQVGFGRVGKHFWAFQLQGKDFVPDIVTMGKSIGNGHPVACVAATQPVARAFEATGVEYFNTFGGSPVSCAVGLAVLNVLEKEQLQDHATSVGSFLMQLLGQQKIKHPIVGDVRGVGLFIGVDLIKDEATRTPATEEAAYLVSRLKENYVLLSTDGPGRNILKFKPPMCFSLDNARQVVAKLDAILTDMEEKVRSCETLRLQP

SEQ ID NO: 48904 - protein, 221 aa, Homo sapiens
MYSDVWKQLKEEKKVRLELEKELELQIGMKTEMEIAMKLLEKDTHEKQDTLVALRQQLEEVKAINLQMFHKAQNAESSLQQKNEAITSFEGKTNQVMSSMKQMEERLQHSERARQGAEERSHKLQQELGGRIGALQLQLSQLHEQCSSLEKELKSEKEQRQALQRELQHEKDTSSLLRMELQQVEGLKKELRELQDEKAELQKICEEQEQALQEMGLHLSQ

SEQ ID NO: 48905 - protein, 190 aa, Homo sapiens
MQRPGPYDRPGAGRGYNSIGRGAGFERMRRGAYGGGYGGYDDYNGYNDGYGFGSDRFGRDLNYCFSGMSDHRYGDGGSTFQSTTGHCVHMRGLPYRATENDIYNFFSPLNPVRVHIEIGPDGRVTGEADVEFATHEDAVAAMSKDKANMQHRYVELFLNSTAGASGGAYGSQMLGGMGLCKYHFSVFFLS

SEQ ID NO: 48906 - protein, 153 aa, Homo sapiens
MQRPGPYDRPGAGRGYNSIGRGAGFERMRRGAYGGGYGGYDDYNGYNDGYGFGSDRFGRDLNYCFSGMSDHRYGDGGSTFQSTTGHCVHMRGLPYRATENDIYNFFSPLNPVRVHIEIGPDGRVTGEADVEFATHEDAVAAMSKDKANMRKCD

SEQ ID NO: 48907 - protein, 544 aa, Homo sapiens [sequence omitted]

SEQ ID NO: 48908 - protein, 491 aa, Homo sapiens
MEEEDLRGEDEEDEEEVLEEVEEEDLDPVTPLPPPPAPRRCFTCPQCRKSFPRRSFRPNLQLANMVQVIRQMHPTPGRGSRVTDQGICPKHQEALKLFCEVDEEAICVVCRESRSHKQHSVVPLEEVVQEYKAKLQGHVEPLRKHLEAVQKMKAKEERRVTELKSQMKSELAAVASEFGRLTRFLAEEQAGLERRLREMHEAQLGRAGAAASRLAEQAAQLSRLLAEAQERSQQGGLRLLQDIKETFNRCEEVQLQPPEVWSPDPCQPHSHDFLTDAIVRKMSRMFCQAARVDLTLDPDTAHPALMLSPDRRGVRLAERRQEVADHPKRFSADCCVLGAQGFRSGRHYWEVEVGGRRGWAVGAARESTHHKEKVGPGGSSVGSGDASSSRHHHRRRRLHLPQQPLLQREVWCVGTNGKRYQAQSSTEQTLLSPSEKPRRFGVYLDYEAGRLGFYNAETLAHVHTFSAAFLGERVFPFFRVLSKGTRIKLCP

SEQ ID NO: 48909 - protein, 640 aa, Homo sapiens
MMPAAHINSHLDRCLLLHPAGHAEPAAGSHRAGERAKGPSPPGAKRRRLSESSALKQPATPTAAESSEGEGEEGDDGGETESRESYDAPPTPSGARLIPDFPVARSSSPGRKGSGKRPAAAAAAGSASPRSWDEAEAQEEEEAVGDGDGDGDADADGEDDPGHWDADAAEAATAFGASGGGRPHPRALAAEEIRQMLQGKPLADTMRPDTLQDYFGQSKAVGQDTLLRSLLETNEIPSLILWGPPGCGKTTLAHIIASNSKKHSIRFVTLSATNAKTNDVRDVIKQAQNEKSFFKRKTILFIDEIHRFNKSQQDTFLPHVECGTITLIGATTENPSFQVNAALLSRCRVIVLEKLPVEAMVTILMRAINSLGIHVLDSSRPTDPLSHSSNSSSEPAMFIEDKAVDTLAYLSDGDARAGLNGLQLAVLARLSSRKMFCKKSGQSYSPSRVLITENDVKEGLQRSHILYDRAGEEHYNCISALHKSMRGSDQNASLYWLARMLEGGEDPLYVARRLVRFASEDIGLADPSALTQAVAAYQGCHFIGMPECEVLLAQCVVYFARAPKSIEVYSAYNNVKACLRNHQGPLPPVPLHLRNAPTRLMKDLGYGKGYKYNPMYSEPVDQEYLPEELRGVDFFKQRRC

SEQ ID NO: 48910 - protein, 103 aa, Homo sapiens
MFVRGCWVNGIRRLIVSRRGDEEEFFEIRTEWSDRSVLYLHRSLADLGRLWQRLRDAFPEDRSELAQGPLRQGLVAIKEAHDIETRLNEVEKLLKTIISMPLF

SEQ ID NO: 48911 - protein, 993 aa, Homo sapiens [sequence omitted]

SEQ ID NO: 48912 - protein, 1718 aa, Homo sapiens [sequence omitted]

SEQ ID NO: 48913 - protein, 435 aa, Homo sapiens
MQKEILSVLGLPHRPRPLHGLQQPQPPALRQQEEQQQQQQLPRGEPPPGRLKSAPLFMLDLYNALSADNDEDGASEGERQQSWPHEAASSSQRRQPPPGAAHPLNRKSLLAPGSGSGGASPLTSAQDSAFLNDADMVMSFVNLVEYDKEFSPRQRHHKEFKFNLSQIPEGEVVTAAEFRIYKDCVMGSFKNQTFLISIYQVLQEHQHRDSDLFLLDTRVVWASEEGWLEFDITATSNLWVVTPQHNMGLQLSVVTRDGVHVHPRAAGLVGRDGPYDKQPFMVAFFKVSEVHVRTTRSASSRRRQQSRNRSTQSQDVARVSSASDYNSSELKTACRKHELYVSFQDLGWQDWIIAPKGYAANYCDGECSFPLNAHMNATNHAIVQTLVHLMNPEYVPKPCCAPTKLNAISVLYFDDNSNVILKKYRNMVVRACGCH

SEQ ID NO: 48914 - protein, 229 aa, Homo sapiens
MSPHIKSVDDVVVLGMNLSKFNKLTQFFICVAGVFVFYLIYGYLQELIFSVEGFKSCGWYLTLVQFAFYSIFGLIELQLIQDKRRRIPGKTYMIIAFLTVGTMGLSNTSLGYLNYPTQVIFKCCKLIPVMLGGVFIQGKRYNVADVSAAICMSLGLIWFTLADSTTAPNFNLTGVVLISLALCADAVIGNVQEKAMKLHNASNSEMNITTSSYSGVFIFPNKLKIPLVL

SEQ ID NO: 48915 - protein, 278 aa, Homo sapiens [sequence omitted]

SEQ ID NO: 48916 - protein, 160 aa, Homo sapiens
MDIVYKDMVTKMQQEITFQQVMSQIANVKKDMIILEKSEFSALRAENEKIKLELHQLKQQVMDEVIKVRTDTKLDFNLEKSRVKELYSLNEKKLLELRTEIVALHAQQDRALTQTDRKIETEVAGLKTMLESHKLDNIKYLAGSIFTCLTVALGFYRLWI

SEQ ID NO: 48917 - protein, 922 aa, Homo sapiens
MREVRPSPSKTVKYTATVTKGAVTYTKAKRELVKDTKPNHHKPSSAVNHTISGKTESSNAKTRKQVLSLGGASKSTGPAVNGLKVSGRLNPKSCTKEVGGRQLREGLQLREGLRNSKRRLEEAHQAEKPQSPPKKMKGAAGPAEGPGKKAPAERGLLNGHVKKEVPERSLERNRPKRATAGKSTPGRQAHGKADSASCENRSTSQPESVHKPQDSGKAEKGGGKAGWAAMDEIPVLRPSAKEFHDPLIYIESVRAQVEKFGMCRVIPPPDWRPECKLNDEMRFVTQIQHIHKLGRRWGPNVQRLACIKKHLKSQGITMDELPLIGGCELDLACFFRLINEMGGMQQVTDLKKWNKLADMLRIPRTAQDRLAKLQEAYCQYLLSYDSLSPEEHRRLEKEVLMEKEILEKRKGPLEGHTENDHHKFHPLPRFEPKNGLIHGVAPRNGFRSKLKEVGQAQLKTGRRRLFAQEKEVVKEEEEDKGVLNDFHKCIYKGRSVSLTTFYRTARNIMSMCFSKEPAPAEIEQEYWRLVEEKDCHVAVHCGKVDTNTHGSGFPVGKSEPFSRHGWNLTVLPNNTGSILRHLGAVPGVTIPWLNIGMVFSTSCWSRDQNHLPYIDYLHTGADCIWYCIPAEEENKLEDVVHTLLQANGTPGLQMLESNVMISPEVLCKEGIKVHRTVQQSGQFVVCFPGSFVSKVCCGYSVSETVHFATTQWTSMGFETAKEMKRRHIAKPFSMEKLLYQIAQAEAKKENGPTLSTISALLDELRDTELRQRRQLFEAGLHSSARYGSHDGSSTVADGKKKPRKWLQLETSERRCQICQHLCYLSMVVQENENVVFCLECALRHVEKQKSCRGLKLMYRYDEEQIISLVNQICGKVSGKNGSIENCLSKPTPKRGPRKRATVDVPPSRLSASSSSKSASSSS

SEQ ID NO: 48918 - protein, 497 aa, Homo sapiens [sequence omitted]

SEQ ID NO: 48919 - protein, 964 aa, Homo sapiens [sequence omitted]

SEQ ID NO: 48920 - protein, 334 aa, Homo sapiens
MPDADGLFMVTTAVIIRDKSVRNMSCSINNTLLGQKKESVIFIPESFMPSVSPCAVALPIIVVILMIPIAVCIYWINKLQKEKKILSGEKEFERETREIALKELEKERVQKEEELQVKEKLQEELRWRRTFLHAVDVVLDPDTAHPDLFLSEDRRSVRRCPFRHLGESVPDNPERFDSQPCVLGRESFASGKHYWEVEVENVIEWTVGVCRDSVERKGEVLLIPQNGFWTLEMHKGQYRAVSSPDRILPLKESLCRVGVFLDYEAGDVSFYNMRDRSHIYTCPRSAFSVPVRPFFRLGCEDSPIFICPALTGANGVTVPEEGLTLHRVGTHQSL

SEQ ID NO: 48921 - protein, 67 aa, Homo sapiens
MGIMNSFVNDIFERIAGEASRLAHYNKRSTITSREIQTAVRLLLPGELAKHAVSEGTKAVTKYTSAK

SEQ ID NO: 48922 - protein, 663 aa, Homo sapiens
MEPSIPVGTCADWETRLENSVSAPEPDISEEELSPEVIVEKHKRDDSWSSNLLESWEYEGSLERQQANQQTLPKEIKVTEKTIPSWEKGPVNNEFGKSVNVSSNLVTQEPSPEETSTKRSIKQNSNPVKKEKSCKCNECGKAFSYCSALIRHQRTHTGEKPYKCNECEKAFSRSENLINHQRIHTGDKPYKCDQCGKGFIEGPSLTQHQRIHTGEKPYKCDECGKAFSQRTHLVQHQRIHTGEKPYTCNECGKAFSQRGHFMEHQKIHTGEKPFKCDECDKTFTRSTHLTQHQKIHTGEKTYKCNECGKAFNGPSTFIRHHMIHTGEKPYECNECGKAFSQHSNLTQHQKTHTGEKPYDCAECGKSFSYWSSLAQHLKIHTGEKPYKCNECGKAFSYCSSLTQHRRIHTREKPFECSECGKAFSYLSNLNQHQKTHTQEKAYECKECGKAFIRSSSLAKHERIHTGEKPYQCHECGKTFSYGSSLIQHRKIHTGERPYKCNECGRAFNQNIHLTQHKRIHTGAKPYECAECGKAFRHCSSLAQHQKTHTEEKPYQCNKCEKTFSQSSHLTQHQRIHTGEKPYKCNECDKAFSRSTHLTEHQNTHTGEKPYNCNECRKTFSQSTYLIQHQRIHSGEKPFGCNDCGKSFRYRSALNKHQRLHPGI

SEQ ID NO: 48923 - protein, 370 aa, Homo sapiens
MKVEAKSHLQWQESRLKRSNPLAREIFRRHFRQLCYQETPGPREALTRLQELCYQWLRPHVSTKEQILDLLVLEQFLSILPKELQGWVREHCPESGEEAVILLEDLERELDEPQHEMVAHRHRQEVLCKEMVPLAEQTPLTLQSQPKEPQLTCDSAQKCHSIGETDEVTKTEDRELVLRKDCPKIVEPHGKMFNEQTWEVSQQDPSHGEVGEHKDRIERQWGNLLGEGQHKCDECGKSFTQSSGLIRHQRIHTGERPYECNECGKAFSRSSGLFNHRGIHNIQKRYHCKECGKVFSQSAGLIQHQRIHKGEKPYQCSQCSKSYSRRSFLIEHQRSHTGERPHQCIECGKSFNRHCNLIRHQKIHTVAELV

SEQ ID NO: 48924 - protein, 578 aa, Homo sapiens
MPAWKRGLLERRRAKLGLSPGEPSPVLGTVEAGPPDPDESAVLLEAIGPVHQNRFIRQERQQQQQQQQRSEELLAERKPGPLEARERRPSPGEMRDQSPKGRESREERLSPRETRERRLGIGGAQELSLRPLEARDWRQSPGEVGDRSSRLSEAWKWRLSPGETPERSLRLAESREQSPRRKEVESRLSPGESAYQKLGLTEAHKWRPDSRESQEQSLVQLEATEWRLRSGEERQDYSEECGRKEEWPVPGVAPKETAELSETLTREAQGNSSAGVEAAEQRPVEDGERGMKPTEGWKWTLNSGKAREWTPRDIEAQTQKPEPPESAEKLLESPGVEAGEGEAEKEEAGAQGRPLRALQNCCSVPSPLPPEDAGTGGLRQQEEEAVELQPPPPAPLSPPPPAPTAPQPPGDPLMSRLFYGVKAGPGVGAPRRSGHTFTVNPRRSVPPATPATPTSPATVDAAVPGAGKKRYPTAEEILVLGGYLRLSRSCLAKGSPERHHKQLKISFSETALETTYQYPSESSVLEELGPEPEVPSAPNPPAAQPDDEEDEEELLLLQPELQGGLRTKALIVDESCRR

SEQ ID NO: 48925 - protein, 740 aa, Homo sapiens
MSVCLRVELYGCLWRDGLLSYTAPVGQTMYLSEAVYLNDSTYDGHTVGGLQYGGLGQLADGVVGLDDFRKSQELRVWPGYDYVGWSNHSFSSGYVEMEFEFDRLRAFQAMQVHCNNMHTLGARLPGGVECRFRRGPAMAWEGEPMRHNLGGNLGDPRARAVSVPLGGRVARFLQCRFLFAGPWLLFSEISFISDVVNNSSPALGGTFPPAPWWPPGPPPTNFSSLELEPRGQQPVAKAEGSPTAILIGCLVAIILLLLLIIALMLWRLHWRRLLSKAERRVLEEELTVHLSVPGDTILINNRPGPREPPPYQEPRPRGNPPHSAPCVPNGSALLLSNPAYRLLLATYARPPRGPGPPTPAWAKPTNTQAYSGDYMEPEKPGAPLLPPPPQNSVPHYAEADIVTLQGVTGGNTYAVPALPPGAVGDGPPRVDFPRSRLRFKEKLGEGQFGEVHLCEVDSPQDLVSLDFPLNVRKGHPLLVAVKILRPDATKNARNDFLKEVKIMSRLKDPNIIRLLGVCVQDDPLCMITDYMENGDLNQFLSAHQLEDKAAEGAPGDGQAAQGPTISYPMLLHVAAQIASGMRYLATLNFVHRDLATRNCLVGENFTIKIADFGMSRNLYAGDYYRVQGRAVLPIRWMAWECILMGKFTTASDVWAFGVTLWEVLMLCRAQPFGQLTDEQVIENAGEFFRDQGRQVYLSRPPACPQGLYELMLRCWSRESEQRPPFSQLHRFLAEDALNTV

SEQ ID NO: 48926 - protein, 338 aa, Homo sapiens
MRYFDTAVSRPGRGEPRFISVGYVDDTQFVRFDSDAASPRGEPRAPWVEQEGPEYWDRETQKYKRQAQADRVSLRNLRGYYNQSEDGSHTLQRMSGCDLGPDGRLLRGYDQSAYDGKDYIALNEDLRSWTAADTAAQITQRKLEAARAAEQLRAYLEGTCVEWLRRYLENGKETLQRAEPPKTHVTHHPLSDHEATLRCWALGFYPAEITLTWQRDGEDQTQDTELVETRPAGDGTFQKWAAVVVPSGQEQRYTCHMQHEGLQEPLTLSWEPSSQPTIPIMGIVAGLAVLVVLAVLGAVVTAMMCRRKSSGGKGGSCSQAACSNSAQGSDESLITCKA

SEQ ID NO: 48927 - protein, 69 aa, Homo sapiens [sequence omitted]

SEQ ID NO: 48928 - protein, 1062 aa, Homo sapiens
MRLLSMPGAQGAAAAGSEPPPATTSPEGQPKVHRARKTMSKPGNGQPPVPEKRPPEIQHFRMSDDVHSLGKVTSDLAKRRKLNSGGGLSEELGSARRSGEVTLTKGDPGSLEEWETVVGDDFSLYYDSYSVDERVDSDSKSEVEALTEQLSEEEEEEEEEEEEEEEEEEEEEEEEDEESGNQSDRSGSSGRRKAKKKWRKDSPWVKPSRKRRKREPPRAKEPRGVNGVGSSGPSEYMEVPLGSLELPSEGTLSPNHAGVSNDTSSLETERGFEELPLCSCRMEAPKIDRISERAGHKCMATESVDGELSGCNAAILKRETMRPSSRVALMVLCETHRARMVKHHCCPGCGYFCTAGTFLECHPDFRVAHRFHKACVSQLNGMVFCPHCGEDASEAQEVTIPRGDGVTPPAGTAAPAPPPLSQDVPGRADTSQPSARMRGHGEPRRPPCDPLADTIDSSGPSLTLPNGGCLSAVGLPLGPGREALEKALVIQESERRKKLRFHPRQLYLSVKQGELQKVILMLLDNLDPNFQSDQQSKRTPLHAAAQKGSVEICHVLLQAGANINAVDKQQRTPLMEAVVNNHLEVARYMVQRGGCVYSKEEDGSTCLHHAAKIGNLEMVSLLLSTGQVDVNAQDSGGWTPIIWAAEHKHIEVIRMLLTRGADVTLTDNEENICLHWASFTGSAAIAEVLLNARCDLHAVNYHGDTPLHIAARESYHDCVLLFLSRGANPELRNKEGDTAWDLTPERSDVWFALQLNRKLRLGVGNRAIRTEKIICRDVARGYENVPIPCVNGVDGEPCPEDYKYISENCETSTMNIDRNITHLQHCTCVDDCSSSNCLCGQLSIRCWYDKDGRLLQEFNKIEPPLIFECNQACSCWRNCKNRVVQSGIKVRLQLYRTAKMGWGVRALQTIPQGTFICEYVGELISDAEADVREDDSYLFDLDNKDGEVYCIDARYYGNISRFINHLCDPNIIPVRVFMLHQDLRFPRIAFFSSRDIRTGEELGFDYGDRFWDIKSKYFTCQCGSEKCKHSAEAIALEQSRLARLDPHPELLPELGSLPPVNT

SEQ ID NO: 48929 - protein, 212 aa, Homo sapiens
MYMGYKFEQYMCADKPGSSPDPSGEVNTNVAFCSVLRSRLGSHPLLFSGEVDCTDPQAPSTQPPTCYVELKTSKEMHSPGQWRSFYRHKLLKWWAQSFLPGVPNVVAGFRNPDGFVSSLKTFPTMKMFEYVRNDRDGWNPSVCMNFCAAFLSFAQSTVVQDDPRLVHLFSWEPGGPVTVSVHQDAPYAFLPIWYVEAMTQDLPSPPKTPSPK

SEQ ID NO: 48930 - protein, 699 aa, Homo sapiens [sequence omitted]

SEQ ID NO: 48931 - protein, 748 aa, Homo sapiens
MASSRCPAPRGCRCLPGASLAWLGTVLLLLADWVLLRTALPRIFSLLVPTALPLLRVWAVGLSRWAVLWLGACGVLRATVGSKSENAGAQGWLAALKPLAAALGLALPGLALFRELISWGAPGSADSTRLLHWGSHPTAFVVSYAAALPAAALWHKLGSLWVPGGQGGSGNPVRRLLGCLGSETRRLSLFLVLVVLSSLGEMAIPFFTGRLTDWILQDGSADTFTRNLTLMSILTIASAVLEFVGDGIYNNTMGHVHSHLQGEVFGAVLRQETEFFQQNQTGNIMSRVTEDTSTLSDSLSENLSLFLWYLVRGLCLLGIMLWGSVSLTMVTLITLPLLFLLPKKVGKWYQLLEVQVRESLAKSSQVAIEALSAMPTVRSFANEEGEAQKFREKLQEIKTLNQKEAVAYAVNSWTTSISGMLLKVGILYIGGQLVTSGAVSSGNLVTFVLYQMQFTQAVEVLLSIYPRVQKAVGSSEKIFEYLDRTPRCPPSGLLTPLHLEGLVQFQDVSFAYPNRPDVLVLQGLTFTLRPGEVTALVGPNGSGKSTVAALLQNLYQPTGGQLLLDGKPLPQYEHRYLHRQVAAVGQEPQVFGRSLQENIAYGLTQKPTMEEITAAAVKSGAHSFISGLPQGYDTEVDEAGSQLSGGQRQAVALARALIRKPCVLILDDATSALDANSQLQVEQLLYESPERYSRSVLLITQHLSLVEQADHILFLEGGAIREGGTHQQLMEKKGCYWAMVQAPADAPE

SEQ ID NO: 48932 - protein, 117 aa, Homo sapiens [sequence omitted]

SEQ ID NO: 48933 - protein, 58 aa, Homo sapiens
MQNPRQYKIPDWFLNRQKDVKDGKYSQVLANGLDNKLREDLERLKKIRAHRGLRHFWG

SEQ ID NO: 48934 - protein, 356 aa, Homo sapiens
MSRFVPLPASAKWASGLTPAQNCPRALDGAWLMVSISSPVLSLSSLLRPQPEPQQEPVLITMATVVLTVLTHTPAPRVRLGQDALLDLSFAYMPPTSEAASSLAPGPPPFGLEWRRQHLGKGHLLLAATPGLNGQMPAAQEGAVAFAAWDDDEPWGPWTGNGTFWLPTVQPFQEGTYLATIHLPYLQGQVTLELAVYKPPKVSLMPATLARAAPGEAPPELLCLVSHFYPSGGLEVEWELRGGPGGRSQKAEGQRWLSALRHHSDGSVSLSGHLQPPPVTTEQHGARYACRIHHPSLPASGRSAEVTLEVAGLSGPSLEDSVGLFLSAFLLLGLFKALGWAAVYLSTCKDSKKKAE

SEQ ID NO: 48935 - protein, 429 aa, Homo sapiens
MAQDAFRDVGIRLQERRHLDLIYNFGCHLTDDYRPGVDPALSDPVLARRLRENRSLAMSRLDEVISKYAMLQDKSEEGERKKRRARLQGTSSHSADTPEASLDSGEGPSGMASQGCPSASRAETDDEDDEESDEEEEEEEEEEEEEATDSEEEEDLEQMQEGQEDDEEEDEEEEAAAGKDGDKSPMSSLQISNEKNLEPGKQISRSSGEQQNKGRIVSPSLLSEEPLAPSSIDAESNGEQPEELTLEEESPVSQLFELEIEALPLDTPSSVETDISSSRKQSEEPFTTVLENGAGMVSSTSFNGGVSPHNWGDSGPPCKKSRKEKKQTGSGPLGNSYVERQRSVHEKNGKKICTLPSPPSPLASLAPVADSSTRVDSPSHGLVTSSLCIPSPARLSQTPHSQPPRPGTCKTSVATQCDPEEIIVLSDSD

SEQ ID NO: 48936 - protein, 258 aa, Homo sapiens [sequence omitted]

SEQ ID NO: 48937 - protein, 1350 aa, Homo sapiens
MKTCEDPRPPNGQSPIALASGQSEYGFAEKVVEGMFIIVNSITIKIHSKAFHASFELWQLQGYSVNPNWQQSDLRLTRITDPCRGEVLTFKEITWQTLRIEADATDNGDQDPVTTPLRLITNQGRIQIALKRRTKDCNVISSKLMFLLDDLLWVLTDSQLKAMMKYAESLSEAMEKSAHQRKSLAPEPVQITPPAPSAQQSWAQAFGGSQGNSNSSSSRLSQYFEKFDVKESSYHLLISRLDLHICDDSQSREPGVSANRLMGGAMQLTFRKMAFDYYPFHWAGDSCKHWVRHCEAMETRGQWAQKLVMEFQSKMEKWHEETGLKPPWHLGVDSLFRRKADSLSSPRKNPLERSPSQGRQPAFQPPAWNRLRSSCMVVRVDDLDIHQVSTAGQPSKKPSTLLSCSRKLHNLPTQVSAIHIEFTEYYFPDNQELPVPCPNLYIQLNGLTFTMDPVSLLWGNLFCLDLYRSLEQFKAIYKLEDSSQKDEHLDIRLDAFWLKVSFPLEKRERAELHRPQALVFSASGMIATNTRHAPHCSCSDLQSLFRGFAAAEFFHSNYDHFPKVPGGFSLLHMLFLHHAFQMDSCLPQPNTLPPQRPKASWDLWSVHFTQISLDFEGTENFKGHTLNFVAPFPLSIWACLPLRWQQAQARKLLLASEGRLKPSASFGSPVQSEALAPDSMSHPRSKTEHDLKSLSGLTEVMEILKEGSSGMDNKGPLTELEDVADVHMLVHSPAHVRVRLDHYQYLALLRLKEVLQRLQEQLTKDTESMTGSPLQNQTACIGVLFPSAEVALLMHPAPGAVDADSAGSDSTSLVDSELSPSEDRELKSDASSDQGPASPEKVLEESSIENQDVSQERPHSNGELQDSGPLAQQLAGKGHEAVESLQAKKLSRTQASSSPAALKPPAGRETAVNGQGELIPLKNIEGELSSAIHMTKDATKEALHATMDLTKEAVSLTKDAFSLGRDRMTSTMHKMLSLPPAKEPMAKTDEGVAAPVSGGAARLRFFSMKRTVSQQSFDGVSLDSSGPEDRISVDSDGSDSFVMLLESESGPESVPPGSLSNVSDNAGVQGSPLVNNYGQGSPAANSSVSPSGEDLIFHPVSVLVLKVNEVSFGIEVRGEDLTVALQAEELTLQQLGTVGLWQFLHGQCPGTCFQESSTLKTGHIRPAVGLRFEVGPGAAVHSPLASQNGFLHLLLHGCDLELLTSVLSGLGPFLEDEEIPVVVPMQIELLNSSITLKDDIPPIYPTSPGPIPITLAMEHVVLKRSDDGVFHIGAAAQDKPSAEVLKSEKRQPPKEQVFLVPTGEVFEQQVKELPILQKELIETKQALANANQDKEKLLQEIRKYNPFFEL

SEQ ID NO: 48938 - protein, 863 aa, Homo sapiens
MGSYECHCREGFFLSDNQHTCIQRPEEGMNCMNKNHGCAHICRETPKGGIACECRPGFELTKNQRDCKLTCNYGNGGCQHTCDDTEQGPRCGCHIKFVLHTDGKTCIETCAVNNGGCDSKCHDAATGVHCTCPVGFMLQPDRKTCKDIDECRLNNGGCDHICRNTVGSFECSCKKGYKLLINERNCQDIDECSFDRTCDHICVNTPGSFQCLCHRGYLLYGITHCGDVDECSINRGGCRFGCINTPGSYQCTCPAGQGRLHWNGKDCTEPLKCQGSPGASKAMLSCNRSGKKDTCALTCPSRARFLPESENGFTVSCGTPSPRAAPARAGHNGNSTNSNHCHEAAVLSIKQRASFKIKDAKCRLHLRNKGKTEEAGRITGPGGAPCSECQVTFIHLKCDSSRKGKGRRARTPPGKEVTRLTLELEAEVRAEETTASCGLPCLRQRMERRLKGSLKMLRKSINQDRFLLRLAGLDYELAHKPGLVAGERAEPMESCRPGQHRAGTKCVSCPQGTYYHGQTEQCVPCPAGTFQEREGQLSCDLCPGSDAHGPLGATNVTTCAGQCPPGQHSVDGFKPCQPCPRGTYQPEAGRTLCFPCGGGLTTKHEGAISFQDCDTKVQCSPGHYYNTSIHRCIRCAMGSYQPDFRQNFCSRCPGNTSTDFDGSTSVAQCKNRQCGGELGEFTGYIESPNYPGNYPAGVECIWNINPPPKRKILIVVPEIFLPSEDECGDVLVMRKNSSPSSITTYETCQTYERPIAFTARSRKLWINFKTSEANSARGFQIPYVTYDEDYEQLVEDIVRDGRLYASENHQEILKDKKLIKAFFEVLAHPQNYFKYTEKHKEMLPKSFIKLLRSKVSSFLRPYK

SEQ ID NO: 48939 - protein, 338 aa, Homo sapiens [sequence omitted]

SEQ ID NO: 48940 - protein, 147 aa, Homo sapiens
MGIIVLELYWKHAPKTCKNFAELARRGYYNGTKFHRIIKDFMIQGGDPTGTGRGGASIYGKQFEDELHPDLKFTGAGILAMANAGPDTNGSQFFVTLAPTQWLDGKHTIFGRVCQGIGMVNRVGMVETNSQDRPVDDVKIIKAYPSG

SEQ ID NO: 48941 - protein, 308 aa, Homo sapiens [sequence omitted]

SEQ ID NO: 48942 - protein, 325 aa, Homo sapiens
MDGGSGGLGSGDNAPTTEALFVALGAGVTALSHPLLYVKLLIQVGHEPMPPTLGTNVLGRKVLYLPSFFTYAKYIVQVDGKIGLFRGLSPRLMSNALSTVTRGSMKKVFPPDEIEQVSNKDDMKTSLKKVVKETSYEMMMQCVSRMLAHPLHVISMRCMVQFVGREAKYSGVLSSIGKIFKEEGLLGFFVGLIPHLLGDVVFLWGCNLLAHFINAYLVDDSVSDTPGGLGNDQNPGSQFSQALAIRSYTKFVMGIAVSMLTYPFLLVGDLMAVNNCGLQAGLPPYSPVFKSWIHCWKYLSVQGQLFRGSSLLFRRVSSGSCFALE

SEQ ID NO: 48943 - protein, 188 aa, Homo sapiens
MAVDMYLIFEQKHLGNGSCTEITPKYRGASNIINNFIICWSFKIVLFLSFITILISCFLLYSVYAQIFRGLVIYIVWIFFYETANVVIQILTNNDFDIKEVRIMRWFGLVSRTVMHCFWMFFVINYAHITYKNRSQGNIISYKRRISTAEILHSRNKRLSISSGFSGSHLESQYFERQRRCSGKTSIK

SEQ ID NO: 48944 - protein, 738 aa, Homo sapiens
MGFREGEGLGKYSQGRKDIVEASSQKGRRGLGLTLRGFDQELNVDWRDEPEPSACEQVSWFPECTTEIPDTQEMSDWMVVGKRKMIIEDETEFCGEELLHSVLQCKSVFDVLDGEEMRRARTRANPYEMIRGVFFLNRAAMKMANMDFVFDRMFTNPRDSYGKPLVKDREAELLYFADVCAGPGGFSEYVLWRKKWHAKGFGMTLKGPNDFKLEDFYSASSELFEPYYGEGGIDGDGDITRPENISAFRNFVLDNTDRKGVHFLMADGGFSVEGQENLQEILSKQLLLCQFLMALSIVRTGGHFICKTFDLFTPFSVGLVYLLYCCFERVCLFKPITSRPANSERYVVCKGLKVGIDDVRDYLFAVNIKLNQLRNTDSDVNLVVPLEVIKGDHEFTDYMIRSNESHCSLQIKALAKIHAFVQDTTLSEPRQAEIRKECLRLWGIPDQARVAPSSSDPKSKFFELIQGTEIDIFSYKPTLLTSKTLEKIRPVFDYRCMVSGSEQKFLIGLGKSQIYTWDGRQSDRWIKLDLKTELPRDTLLSVEIVHELKGEGKAQRKISAIHILDVLVLNGTDVREQHFNQRIQLAEKFVKAVSKPSRPDMNPIRVKEVYRLEEMEKIFVRLEMKIIKGSSGTPKLSYTGRDDRHFVPMGLYIVRTVNEPWTMGFSKSFKKKFFYNKKTKDSTFDLPADSIAPFHICYYGRLFWEWGDGIRVHDSQKPQDQDKLSKEDVLSFIQMHRA

SEQ ID NO: 48945 - protein, 523 aa, Homo sapiens
MLLKYIYTGRATLTDEKEEVLLDFLSLAHKYGFPELEDSTSEYLCTILNIQNVCMTFDVASLYSLPKLTCMCCMFMDRNAQEVLSSEGFLSLSKTALLNIVLRDSFAAPEKDIFLALLNWCKHNSKENHAEIMQAVRLPLMSLTELLNVVRPSGLLSPDAILDAIKVRSESRDMDLNYRGMLIPEENIATMKYGAQVVKGELKSALLDGDTQNYDLDHGFSRHPIDDDCRSGIEIKLGQPSIINHIRILLWDRDSRSYSYFIEVSMDELDWVRVIDHSQYLCRSWQKLYFPARVCRYIRIVGTHNTVNKIFHIVAFECMFTNKTFTLEKGLIVPMENVATIADCASVIEGVSRSRNALLNGDTKNYDWDSGYTCHQLGSGAIVVQLAQPYMIGSIRLLLWDCDDRSYSYYVEVSTNQQQWTMVADRTKVSCKSWQSVTFERQPASFIRIVGTHNTANEVFHCVHFECPEQQSSQKEENSEESGTGDTSLAGQQLDSHALRAPSGSSLPSSPGSNSRSPNRQHQ

SEQ ID NO: 48946 - protein, 237 aa, Homo sapiens [sequence omitted]

SEQ ID NO: 48947 - protein, 1693 aa, Homo sapiens
MLAQHVLLGPMEWYLCGEDPAFGFPKLEQANKPSHLCGRVFKVGEPTYSCRDCAVDPTCVLCMECFLGSIHRDHRYRMTTSGGGGFCDCGDTEAWKEGPYCQKHELNTSEIEEEEDPLVHLSEDVIARTYNIFAITFRYAVEILTWEKESELPADLEMVEKSDTYYCMLFNDEVHTYEQVIYTLQKAVNCTQKEAIGFATTVDRDGRRSVRYGDFQYCEQAKSVIVRNTSRQTKPLKVQVMHSSIVAHQNFGLKLLSWLGSIIGYSDGLRRILCQVGLQEGPDGENSSLVDRLMLSDSKLWKGARSVYHQLFMSSLLMDLKYKKLFAVRFAKNYQQLQRDFMEDDHERAVSVTALSVQFFTAPTLARMLITEENLMSIIIKTFMDHLRHRDAQGRFQFERYTALQAFKFRRVQSLILDLKYVLISKPTEWSDELRQKFLEGFDAFLELLKCMQGMDPITRQVGQHIEMEPEWEAAFTLQMKLTHVISMMQDWCASDEKVLIEAYKKCLAVLMQCHGGYTDGEQPITLSICGHSVETIRYCVSQEKVSIHLPVSRLLAGLHVLLSKSEVAYKFPELLPLSELSPPMLIEHPLRCLVLCAQVHAGMWRRNGFSLVNQIYYYHNVKCRREMFDKDVVMLQTGVSMMDPNHFLMIMLSRFELYQIFSTPDYGKRFSSEITHKDVVQQNNTLIEEMLYLIIMLVGERFSPGVGQVNATDEIKREIIHQLSIKPMAHSELVKSLPEDENKETGMESVIEAVAHFKKPGLTGRGMYELKPECAKEFNLYFYHFSRAEQSKAEEAQRKLKRQNREDTALPPPVLPPFCPLFASLVNILQSDVMLCIMGTILQWAVEHNGYAWSESMLQRVLHLIGMALQEEKQHLENVTEEHVVTFTFTQKISKPGEAPKNSPSILAMLETLQNAPYLEVHKDMIRWILKTFNAVKKMRESSPTSPVAETEGTIMEESSRDKDKAERKRKAEIARLRREKIMAQMSEMQRHFIDENKELFQQTLELDASTSAVLDHSPVASDMTLTALGPAQTQVPEQRQFVTCILCQEEQEVKVESRAMVLAAFVQRSTVLSKNRSKFIQDPEKYDPLFMHPDLSCGTHTSSCGHIMHAHCWQRYFDSVQAKEQRRQQRLRLHTSYDVENGEFLCPLCECLSNTVIPLLLPPRNIFNNRLNFSDQPNLTQWIRTISQQIKALQFLRKEESTPNNASTKNSENVDELQLPEGFRPDFRPKIPYSESIKEMLTTFGTATYKVGLKVHPNEEDPRVPIMCWGSCAYTIQSIERILSDEDKPLFGPLPCRLDDCLRSLTRFAAAHWTVASVSVVQGHFCKLFASLVPNDSHEELPCILDIDMFHLLVGLVLAFPALQCQDFSGISLGTGDLHIFHLVTMAHIIQILLTSCTEENGMDQENPPCEEESAVLALYKTLHQYTGSALKEIPSGWHLWRSVRAGIMPFLKCSALFFHYLNGVPSPPDIQVPGTSHFEHLCSYLSLPNNLICLFQENSEIMNSLIESWCRNSEVKRYLEGERDAIRYPRESNKLINLPEDYSSLINQASNFSCPKSGGDKSRAPTLCLVCGSLLCSQSYCCQTELEGEDVGACTAHTYSCGSGVGIFLRVRECQVLFLAGKTKGCFYSPPYLDDYGETDQGLRRGNPLHLCKERFKKIQKLWHQHSVTEEIGHAQEANQTLVGIDWQHL

SEQ ID NO: 48948 - protein, 1693 aa, Homo sapiens
MLAQHVLLGPMEWYLCGEDPAFGFPKLEQANKPSHLCGRVFKVGEPTYSCRDCAVDPTCVLCMECFLGSIHRDHRYRMTTSGGGGFCDCGDTEAWKEGPYCQKHELNTSEIEEEEDPLVHLSEDVIARTYNIFAITFRYAVEILTWEKESELPADLEMVEKSDTYYCMLFNDEVHTYEQVIYTLQKAVNCTQKEAIGFATTVDRDGRRSVRYGDFQYCEQAKSVIVRNTSRQTKPLKVQVMHSSIVAHQNFGLKLLSWLGSIIGYSDGLRRILCQVGLQEGPDGENSSLVDRLMLSDSKLWKGARSVYHQLFMSSLLMDLKYKKLFAVRFAKNYERLQSDYVTDDHDREFSVADLSVQIFTVPSLARMLITEENLMSIIIKTFMDHLRHRDAQGRFQFERYTALQAFKFRRVQSLILDLKYVLISKPTEWSDELRQKFLEGFDAFLELLKCMQGMDPITRQVGQHIEMEPEWEAAFTLQMKLTHVISMMQDWCASDEKVLIEAYKKCLAVLMQCHGGYTDGEQPITLSICGHSVETIRYCVSQEKVSIHLPVSRLLAGLHVLLSKSEVAYKFPELLPLSELSPPMLIEHPLRCLVLCAQVHAGMWRRNGFSLVNQIYYYHNVKCRREMFDKDVVMLQTGVSMMDPNHFLMIMLSRFELYQIFSTPDYGKRFSSEITHKDVVQQNNTLIEEMLYLIIMLVGERFSPGVGQVNATDEIKREIIHQLSIKPMAHSELVKSLPEDENKETGMESVIEAVAHFKKPGLTGRGMYELKPECAKEFNLYFYHFSRAEQSKAEEAQRKLKRQNREDTALPPPVLPPFCPLFASLVNILQSDVMLCIMGTILQWAVEHNGYAWSESMLQRVLHLIGMALQEEKQHLENVTEEHVVTFTFTQKISKPGEAPKNSPSILAMLETLQNAPYLEVHKDMIRWILKTFNAVKKMRESSPTSPVAETEGTIMEESSRDKDKAERKRKAEIARLRREKIMAQMSEMQRHFIDENKELFQQTLELDASTSAVLDHSPVASDMTLTALGPAQTQVPEQRQFVTCILCQEEQEVKVESRAMVLAAFVQRSTVLSKNRSKFIQDPEKYDPLFMHPDLSCGTHTSSCGHIMHAHCWQRYFDSVQAKEQRRQQRLRLHTSYDVENGEFLCPLCECLSNTVIPLLLPPRNIFNNRLNFSDQPNLTQWIRTISQQIKALQFLRKEESTPNNASTKNSENVDELQLPEGFRPDFRPKIPYSESIKEMLTTFGTATYKVGLKVHPNEEDPRVPIMCWGSCAYTIQSIERILSDEDKPLFGPLPCRLDDCLRSLTRFAAAHWTVASVSVVQGHFCKLFASLVPNDSHEELPCILDIDMFHLLVGLVLAFPALQCQDFSGISLGTGDLHIFHLVTMAHIIQILLTSCTEENGMDQENPPCEEESAVLALYKTLHQYTGSALKEIPSGWHLWRSVRAGIMPFLKCSALFFHYLNGVPSPPDIQVPGTSHFEHLCSYLSLPNNLICLFQENSEIMNSLIESWCRNSEVKRYLEGERDAIRYPRESNKLINLPEDYSSLINQASNFSCPKSGGDKSRAPTLCLVCGSLLCSQSYCCQTELEGEDVGACTAHTYSCGSGVGIFLRVRECQVLFLAGKTKGCFYSPPYLDDYGETDQGLRRGNPLHLCKERFKKIQKLWHQHSVTEEIGHAQEANQTLVGIDWQHL

SEQ ID NO: 48949 - protein, 891 aa, Homo sapiens
MQHVGISVPSQHLSNSSQISGSGQIQLIGSFGNHPSMMTINNLDGSQIILKGSGQQAPSNVSGGLLVHRQTPNGNSLFGNSSSSPVAQPVTVPFNSTNFQTSLPVHNIIIQRGLAPNSNKVPINIQPKPIQMGQQNTYNVNNLGIQQHHVQQGISFASASSPQGSVVGPHMSVNIVNQQNTRKPVTSQAVSSTGGSIVIHSPMGQPHAPQSQFLIPTSLSVSSNSVHHVQTINGQLLQTQPSQLISGQVASEHVMLNRNSSNMLRTNQPYTGPMLNNQNTAVHLVSGQTFAASGSPVIANHASPQLVGGQMPLQQASPTVLHLSPGQSSVSQGRPGFATMPSVTSMSGPSRFPAVSSASTAHPSLGSAVQSGSSGSNFTGDQLTQPNRTPVPVSVSHRLPVSSSKSTSTFSNTPGTGTQQQFFCQAQKKCLNQTSPISAPKTTDGLRQAQIPGLLSTTLPGQDSGSKVISASLGTAQPQQEKVVGSSPGHPAVQVESHSGGQKRPAAKQLTKGAFILQQLQRDQAHTVTPDKSHFRSLSDAVQRLLSYHVCQGSMPTEEDLRKVDNEFETVATQLLKRTQAMLNKYRCLLLEDAMRINPSAEMVMIDRMFNQEERASLSRDKRLALVDPEGFQADFCCSFKLDKAAHETQFGRSDQHGSKASSSLQPPAKAQGRDRAKTGVTEPMNHDQFHLVPNHIVVSAEGNISKKTECLGRALKFDKVGLVQYQSTSEEKASRREPLKASQCSPGPEGHRKTSSRSDHGTESKLSSILADSHLEMTCNNSFQDKSLRNSPKNEVLHTDIMKGSGEPQPDLQLTKSLETTFKNILELKKAGRQPQSDPTVSGSVELDFPNFSPMASQENCLEKFIPDHSEGVVETDSILEAAVNSILEC

SEQ ID NO: 48950 - protein, 429 aa, Homo sapiens
MFSVNLFRTLPPSSNPTGAEFDPEEDEPTLEAAWPHLQLVYEFFLRFLESPDFQPNIAKKYIDQKFVLALLDLFDSEDPRERDFLKTILHRIYGKFLGLRAYIRRQINHIFYRFIYETEHHNGIAELLEILGSIINGFALPLKEEHKMFLIRVLLPLHKVKSLSVYHPQLAYCVVQFLEKESSLTEPVIVGLLKFWPKTHSPKEVMFLNELEEILDVIEPSEFSKVMEPLFRQLAKCVSSPHFQVAERALYYWNNEYIMSLISDNAARVLPIMFPALYRNSKSHWNKTIHGLIYNALKLFMEMNQKLFDDCTQQYKAEKQKGRFRMKEREEMWQKIEELARLNPQYPMFRAPPPLPPVYSMETETPTAEDIQLLKRTVETEAVQMLKDIKKEKVLLRRKSELPQDVYTIKALEAHKRAEEFLTASQEAL

SEQ ID NO: 48951 - protein, 307 aa, Homo sapiens [sequence omitted]

SEQ ID NO: 48952 - protein, 335 aa, Homo sapiens
MLALASHLSTVESEKQKLRAQVRRLCQENQWLRDELAGTQQRLQRSEQAVAQLEEEKKHLEFLGQLRQYDEDGHTSEEKEGDATKDSLDDLFPNEEEEDPSNGLSRGQGATAAQQGGYEIPARLRTLHNLVIQYAAQGRYEVAVPLCKQALEDLERTSGRGHPDVATMLNILALVYRDQNKYKEAAHLLNDALSIRESTLGPDHPAVAATLNNLAVLYGKRGKYKEAEPLCQRALEIREKVLGTNHPDVAKQLNNLALLCQNQGKYEAVERYYQRALAIYEGQLGPDNPNVARTKNNLASCYLKQGKYAEAETLYKEILTRAHVQEFGSVDEPAP

SEQ ID NO: 48953 - protein, 2403 aa, Homo sapiens
MEADVQALVRRAARQLAESGTPSLTAAVLHTIHVLSAYASIGPLTGVFRETGALDLLMHMLCNPEPQIRRSAGKMLQALAAHDAGSRAHVLLSLSQQDGIEQHMDFDSRYTLLELFAETTSSEEHCMAFEGIHLPQIPGKLLFSLVKRYLCVTSLLDQLNSSPELGAGDQSSPCATREKSRGQRELEFSMAVGNLISELVRSMGWARNLSEQGMSPPRPTRSIFQPYISGPSLLLPTIVTTPRRQGWVFRQRSEFSSRSGYGEYVQQTLQPGMRVRMLDDYEEISAGDEGEFRQSNNGIPPVQVFWQSTGRTYWVHWHMLEILGPEEATEDKASAAVEKGAGATVLGTAFPSWDWNPMDGLYPLPYLQPEPQKNERVGYLTQAEWWELLFFIKKLDLCEQQPIFQNLWKNLDETLGEKALGEISVSVEMAESLLQVLSSRFEGSTLNDLLNSQIYTKYGLLSNEPSSSSTSRNHSCTPDPEEESKSEASFSEEETESLKAKAEAPKTEAEPTKTRTETPMAQSDSQLFNQLLVTEGMTLPTEMKEAASEMARALRGPGPRSSLDQHVAAVVATVQISSLDTNLQLSGLSALSQAVEEVTERDHPLVRPDRSLREKLVKMLVELLTNQVGEKMVVVQALRLLYLLMTKHEWRPLFAREGGIYAVLVCMQEYKTSVLVQQAGLAALKMLAVASSSEIPTFVTGRDSIHSLFDAQMTREIFASIDSATRPGSESLLLTVPAAVILMLNTEGCSSAARNGLLLLNLLLCNHHTLGDQIITQELRDTLFRHSGIAPRTEPMPTTRTILMMLLNRYSEPPGSPERAALETPIIQGQDGSPELLIRSLVGGPSAELLLDLERVLCREGSPGGAVRPLLKRLQQETQPFLLLLRTLDAPGPNKTLLLSVLRVITRLLDFPEAMVLPWHEVLEPCLNCLSGPSSDSEIVQELTCFLHRLASMHKDYAVVLCCLGAKEILSKVLDKHSAQLLLGCELRDLVTECEKYAQLYSNLTSSILAGCIQMVLGQIEDHRRTHQPINIPFFDVFLRHLCQGSSVEVKEDKCWEKVEVSSNPHRASKLTDHNPKTYWESNGSTGSHYITLHMHRGVLVRQLTLLVASEDSSYMPARVVVFGGDSTSCIGTELNTVNVMPSASRVILLENLNRFWPIIQIRIKRCQQGGIDTRVRGVEVLGPKPTFWPLFREQLCRRTCLFYTIRAQAWSRDIAEDHRRLLQLCPRLNRVLRHEQNFADRFLPDDEAAQALGKTCWEALVSPLVQNITSPDAEGVSALGWLLDQYLEQRETSRNPLSRAASFASRVRRLCHLLVHVEPPPGPSPEPSTRPFSKNSKGRDRSPAPSPVLPSSSLRNITQCWLSVVQEQVSRFLAAAWRAPDFVPRYCKLYEHLQRAGSELFGPRAAFMLALRSGFSGALLQQSFLTAAHMSEQFARYIDQQIQGGLIGGAPGVEMLGQLQRHLEPIMVLSGLELATTFEHFYQHYMADRLLSFGSSWLEGAVLEQIGLCFPNRLPQLMLQSLSTSEELQRQFHLFQLQRLDKLFLEQEDEEEKRLEEEEEEEEEEEAEKELFIEDPSPAISILVLSPRCWPVSPLCYLYHPRKCLPTEFCDALDRFSSFYSQSQNHPVLDMGPHRRLQWTWLGRAELQFGKQILHVSTVQMWLLLKFNQTEEVSVETLLKDSDLSPELLLQALVPLTSGNGPLTLHEGQDFPHGGVLRLHEPGPQRSGEALWLIPPQAYLNVEKDEGRTLEQKRNLLSCLLVRILKAHGEKGLHIDQLVCLVLEAWQKGPNPPGTLGHTVAGGVACTSTDVLSCILHLLGQGYVKRRDDRPQILMYAAPEPMGPCRGQADVPFCGSQSETSKPSPEAVATLASLQLPAGRTMSPQEVEGLMKQTVRQVQETLNLEPDVAQHLLAHSHWGAEQLLQSYSEDPEPLLLAAGLCVHQAQAVPVRPDHCPVCVSPLGCDDDLPSLCCMHYCCKSCWNEYLTTRIEQNLVLNCTCPIADCPAQPTGAFIRAIVSSPEVISKYEKALLRGYVESCSNLTWCTNPQGCDRILCRQGLGCGTTCSKCGWASCFNCSFPEAHYPASCGHMSQWVDDGGYYDGMSVEAQSKHLAKLISKRCPSCQAPIEKNEGCLHMTCAKCNHGFCWRCLKSWKPNHKDYYNCSAMVSKAARQEKRFQDYNERCTFHHQAREFAVNLRNRVSAIHEVPPPRSFTFLNDACQGLEQARKVLAYACVYSFYSQDAEYMDVVEQQTENLELHTNALQILLEETLLRCRDLASSLRLLRADCLSTGMELLRRIQERLLAILQHSAQDFRVGLQSPSVEAWEAKGPNMPGSQPQASSGPEAEEEEEDDEDDVPEWQQDEFDEELDNDSFSYDESENLDQETFFFGDEEEDEDEAYD

SEQ ID NO: 48954 - protein, 2099 aa, Homo sapiens
MDRDDLTDDSVFTRSSQCSRGLERYISQEEGPLSPFLGQLDEDYRTKETFLHRSDYSPHISCHDELLRGTERNREKLKGYSIRSEERSREAKRPRYDDTVKINSMGGDHPSFTSGTRNYRQRRRSPSPRFLDPEFRELDLARRKREEEEERSRSLSQELVGVDGGGTGCSIPGLSGVLTASEPGYSLHRPEEVSVMPKKSILKKRIEVDIMEPSMQLESFSSSTSSSQDHPLYSGHPSLPLSGAIAAFASEIENKGTMVETALKEPQGNLYQWGPLPGIPKDNSPLREKFGSFLCHKDNLDLKAEGPERHTDFLLPHERASQDGSGFSRILSMLADSTSTQEKRRRSFPDIEDEEKFLYGDEEEDLKAESVPKPLGSSESEVMRQKASSLPSSAPAVKLESLEETNPEYAKIHDLLKTIGLDIGVAEISQLAARTQERLHGKKPSLRSSADRRSSVDRYFSADHCSSVDHRFSADRCSSVDHCFSADRRSSDPHRLESREAHHSNTHSPEVSHPHPPSPVDPYLLTKNSPPFLKSDHPVGHISGPEVVGSGFQSSVAVRCMLPSAPSAPIRLPHTAALSQFHMPRASQFAAARIPPNYQGPAIPPASFDAYRHYMAYAASRWPMYPTSQPSNHPVPEPHRIMPITKQATRSRPNLRVIPTVTPDKPKQKESLRGSIPAAQVPVQVSIPSLIRYNPEKISDEKNRASQKQKVIEEREKLKNDREARQKKMYYLRTELERLHKQQGEMLRKKRREKDGHKDPLLVEVSRLQDNIMKDIAELRQEAEEAEKKQSELDKVAQILGINIFDKSQKSLSDSREPTEKPGKAEKSKSPEKVSSFSNSSSNKESKVNNEKFRTKSPKPAESPQSATKQLDQPTAAYEYYDAGNHWCKDCNTICGTMFDFFTHMHNKKHTQTLDPYNRPWASKTQSEAKQDAIKRTDKITVPAKGSEFLVPISGFYCQLCEEFLGDPISGEQHVKGHQHNEKYKKYVDENPLYEERRNLDRQAGLAVVLETERRRQSELKRKLSEKPKEEKKEKKAKAVKEVKEDDKVSEKLEDQLSEGRNSPEKAENKRNTGIKLQLKEEVKKESPTSSSFGKFSWKKPEKEEEKSSLVTPSISKEEILESSKDKEDGKTEAGKAKPIKIKLSGKTVVAHTSPWMPVVTTSTQTKIRPNLPIPSTVLRKSCSATMSKPAPLNTFLSIKSSGTTAKPLPVVKESSADLLLPPDIISKAFGGEEVILKGSPEEKVVLAEKSEPSHLPEQILPPPPPPPPPPPPPPPVIPHPAAPSAAQANAILAPVKSNPVVSQTLSPGFVGPNILNPVLPVAIMASAQPAAIPSDETAPGVSESDRDQTLFSVLVRPPPPLSSVFSEQAKKLEKRNSCLATANAKDLYDIFYSSGGKGAPETKGAPETKLSGGPLANGENSNLSRTKSSDTSSTSPLNSSASQEELHQDEGLVAAPIVSNSEKPIAKTLVALGKWSVVEHVGPKSTGSTYGFLQPLTRLCQSRPYETITPKTDTLAIWTSSSFQSDTSRDISPEKSELDLGEPGPPGVEPPPQLLDIQCKESQKLVEIHLRESVNQDKESQELRKSEDCRESEIETNTELKERVKELSEGIVDEGVSTSIGPHSIDDSNLNHGNRYMWEGEVKQPNLLMIDKEAEQSNKLMTGSETPSKVVIKLSPQACSFTKAKLDSFLSEARSLLNPQDTPVKISAPELLLHSPARSAMCLTGSPQEQGVSVVSEEGLENSAPESASRTSRYRSLKLKRERSKDFQVKKIYELAVWDENKKRPETWESPEKPKTEALELQDVHPELTVTIESKALEDFEATDLKVEELTALGNLGDMPVDFCTTRVSPAHRSPTVLCQKVCEENSVSPIGCNSSDPADFEPIPSFSGFPLDSPKTLVLDFETEGERNSPNPRSVRIPSPNILKTGLTENVDRGLGGLEGTHQALDLLAGGMMPEEVKESSQLDKQESLGLELKTINSAGLGPSPCLPDLVDFVTRTSGVQKDKLCSPLSEPGDPSKCSSLELGPLQLEISNASTTEVAILQVDDDSGDPLNLVKAPVSRSPPREQVIEDNMVPQGMPEQETTVGAIQDHTESSVHN

SEQ ID NO: 48955 - protein, 337 aa, Homo sapiens [sequence omitted]

SEQ ID NO: 48956 - protein, 1184 aa, Homo sapiens
MDPNSTQRYRLEALKFCEEFKEKCPICVPCGLRLAEKTQVAIVRHFGLQILEHVVKFRWNGMSRLEKVYLKNSVMELIANGTLNILEEENHIKDALSRIVVEMIKREWPQHWPDMLIELDTLSKQGETQTELVMFILLRLAEDVVTFQTLPPQRRRDIQQTLTQNMERIFSFLLNTLQENVNKYQQVKTDTSQESKAQANCRVGVAALNTLAGYIDWVSMSHITAENCKLLEILCLLLNEQELQLGAAECLLIAVSRKGKLEDRKPLMVLFGDVAMHYILSAAQTADGGGLVEKHYVFLKRLCQVLCALGNQLCALLGADSDVETPSNFGKYLESFLAFTTHPSQFLRSSTQMTWGALFRHEILSRDPLLLAIIPKYLRASMTNLVKMGFPSKTDSPSCEYSRFDFDSDEDFNAFFNSSRAQQGEVMRLACRLDPKTSFQMAGEWLKYQLSTFLDAGSVNSCSAVGTGEGSLCSVFSPSFVQWEAMTLFLESVITQMFRTLNREEIPVNDGIELLQMVLNFDTKDPLILSCVLTNVSALFPFVTYRPEFLPQVFSKLFSSVTFETVEESKAPRTRAVRNVRRHACSSIIKMCRDYPQLVLPNFDMLYNHVKQLLSNELLLTQMEKCALMEALVLISNQFKNYERQKVFLEELMAPVASIWLSQDMHRVLSDVDAFIAYVGTDQKSCDPGLEDPCGLNRARMSFCVYSILGVVKRTCWPTDLEEAKAGGFVVGYTSSGNPIFRNPCTEQILKLLDNLLALIRTHNTLYAPEMLAKMAEPFTKALDMLDAEKSAILGLPQPLLELNDSPVFKTVLERMQRFFSTLYENCFHILGKAGPSMQQDFYTVEDLATQLLSSAFVNLNNIPDYRLRPMLRVFVKPLVLFCPPEHYEALVSPILGPLFTYLHMRLSQKWQVINQRSLLCGEDEAADENPESQEMLEEQLVRMLTREVMDLITVCCVSKKGADHSSAPPADGDDEEMMATEVTPSAMAELTDLGKCLMKHEDVCTALLITAFNSLAWKDTLSCQRTTSQLCWPLLKQVLSGTLLADAVTWLFTSVLKGLQMHGQHDGCMASLVHLAFQIYEALRPRYLEIRAVMEQIPEIQKDSLDQFDCKLLNPSLQKVADKRRKDQFKRLIAGCIGKPLGEQFRKEVHIKNLPSLFKKTKPMLETEVLDNDGGGLATIFEP

SEQ ID NO: 48957 - protein, 220 aa, Homo sapiens [sequence omitted]

SEQ ID NO: 48958 - protein, 111 aa, Homo sapiens
MTRVRVVDNSALGNSPYHRAPRCIHVYKKNGVGKVGDQILLAIKGQKKKALIVGHCMPGPRMTPRFDSNNVVLIEDNGNPVGTRIKTPIPTSLRKREGEYSKVLAIAQNFV

SEQ ID NO: 48959 - protein, 853 aa, Homo sapiens
MLGNWAFGGEYFKEEACNMAWELLTQVYGIPEERLWISYFDGDPKAGLDPDLETRDIWLSLGVPASRVLSFGPQENFWEMGDTGPCGPCTEIHYDLAGGVGAPQLVELWNLVFMQHNREADGSLQPLPQRHVDTGMGLERLVAVLQGKHSTYDTDLFSPLLNAIQQGCRAPPYLGRVGVADEGRTDTAYRVVADHIRTLSVCISDGIFPGMSGPPLVLRRILRRAVRFSMEILKAPPGFLGSLVPVVVETLGDAYPELQRNSAQIANLVSEDEAAFLASLERGRRIIDRTLRTLGPSDMFPAEVAWSLSLCGDLGLPLDMVELMLEEKGVQLDSAGLERLAQEEAQHRARQAEPVQKQGLWLDVHALGELQRQGVPPTDDSPKYNYSLRPSGSYEFGTCEAQVLQLYTEDGTAVASVGKGQRCGLLLDRTNFYAEQGGQASDRGYLVRAGQEDVLFPVARAQVCGGFILHEAVAPECLRLGDQVQLHVDEAWRLGCMAKHTATHLLNWALRQTLGPGTEQQGSHLNPEQLRLDVTTQTPLTPEQLRAVENTVQEAVGQDEAVYMEEVPLALTAQVPGLRSLDEVYPDPVRVVSVGVPVAHALDPASQAALQTSVELCCGTHLLRTGAVGDLVIIGDRQLSKGTTRLLAVTGEQAQQARELGQSLAQEVKAATERLSLGSRDVAEALRLSKDIGRLIEAVETAVMPQWQRRELLATVKMLQRRANTAIRKLQMGQAAKKTQELLERHSKGPLIVDTVSAESLSVLVKVVRQLCEQAPSTSVLLLSPQPMGKVLCACQVAQGAMPTFTAEAWALAVCSHMGGKAWGSRVVAQGTGSTTDLEAALSIAQTYALSQL

SEQ ID NO: 48960 - protein, 798 aa, Homo sapiens [sequence omitted]

SEQ ID NO: 48961 - protein, 272 aa, Homo sapiens
MVSAAFMKKYIHVAKIIKPVLTQESATYIAEEYSRLRSQDSMSSDTARTSPVTARTLETLIRLATAHAKARMSKTVDLQDAEEAVELVQYAYFKKVLEKEKKRKKRSEDESETEDEEEKSQEDQEQKRKRRKTRQPDAKDGDSYDPYDFSDTEEEMPQVHTPKTADSQETKESQKVELSESRDGISPCCPGWSWTPGLKQSFYLSLPKGWDYRHKPLCLFDLILFNDCRVSMVEGIQGGPLGCVPGSSCAVNRHESPHRIHQPGQRRALLFS

SEQ ID NO: 48962 - protein, 434 aa, Homo sapiens
MALDPYTELRKQPLRKYVTPSDFDQLKQFLTFDKQVLRFYAIWDDTDSMYGECRTYIIHYYLMDDTVEIREVHERNDGRDPFPLLMNRQRVPKVLVENAKNFPQCVLEISDQEVLEWYTAKDFIVGKSLTILGRTFFIYDCDPFTRRYYKEKFGITDLPRIDVSKREPPPVKQELPPYNGFGLVEDSAQNCFALIPKAPKKDVIKMLVNDNKVLRYLAVLESPIPEDKDRRFVFSYFLATDMISIFEPPVRNSGIIGGKYLGRTKVVKPYSTVDNPVYYGPSDFFIGAVIEVFGHRFIILDTDEYVLKYMESNAAQYSPEALASIQNHVRKREAPAPEAESKQTEKDPGVQELEALIDTIQKQLKDHSCKDNIREAFQIYDKEASGYVDRDMFFKICESLNVPVDDSLVKELIRMCSHGEGKINYYNFVRAFSN

SEQ ID NO: 48963 - protein, 425 aa, Homo sapiens
MALDPYTELRKQPLRKYVTPSDFDQLKQFLTFDKQVLRFYAIWDDTDSMYGECRTYIIHYYLMDDTVEIREVHERNDGRDPFPLLMNRQRVPKVLVENAKNFPQCVLEISDQEVLEWYTAKDFIVGKSLTILGRTFFIYDCDPFTRRYYKEKFGITDLPRIDVSKREPPPVKQELPPYNGFGLVEDSAQNCFALIPKAPKKDVIKMLVNDNKVLRYLAVLESPIPEDKDRRFVFSYFLATDMISIFEPPVRNSGIIGGKYLGRTKVVKPYSTVDNPVYYGPSDFFIGAVIEVFGHRFIILDTDEYVLKYMESNAAQYSPEALASIQNHVRKREAPAPEAESKQTEKDPGVQELEALIDTIQKQLKDHSCKDNIREAFQIYDKEASGYVDRDMFFKICESLNVPVDDSLVKERQGLTLLPDWNAVV

SEQ ID NO: 48964 - protein, 435 aa, Homo sapiens
MALDPYTELRKQPLRKYVTPSDFDQLKQFLTFDKQVLRFYAIWDDTDSMYGECRTYIIHYYLMDDTVEIREVHERNDGRDPFPLLMNRQRVPKVLVENAKNFPQCVLEISDQEVLEWYTAKDFIVGKSLTILGRTFFIYDCDPFTRRYYKEKFGITDLPRIDVSKREPPPVKQELPPYNGFGLVEDSAQNCFALIPKAPKKDVIKMLVNDNKVLRYLAVLESPIPEDKDRRFVFSYFLATDMISIFEPPVRNSGIIGGKYLGRTKVVKPYSTVDNPVYYGPSDFFIGAVIEVFGHRFIILDTDEYVLKYMESNAAQYSPEALASIQNHVRKREAPAPEAESKQTEKDPGVQELEALIDTIQKQLKDHSCKDNIREAFQIYDKEASGYVDRDMFFKICESLNVPVDDSLVKEVTCKRLLLPAFTFPSPVWIPLCGL

SEQ ID NO: 48965 - protein, 481 aa, Homo sapiens
MCSSCNVPLPIGDSSSFSGSCSSSPERIVSQTSSVENPLENQKNDQNNSDTKISETETLKSSQNFQTLPSSPLLVPQESLASSEVKENLRIDSSSASQHGRDAILYLQTQVAEMSRVIRDLQSRSCFRFHHSRPSENSSVPWDISTSKEENLSTVEEETDYKSPSADDKGQPSDPSQSSFTGLLKRMEQRGVIKRVTLQSEAESCEGKPDCVTSKKRLVPPLHPLLRIATTEVFKDPADCHPSSFMGHRVYPVAKDTSPFQPNPPAEGPIVEALEHSKRGNTTSPLDSTSKEMEVMGCRFYHAASIAARAASYMAYMTQYQRKLWEDMEDLVHDPEFDRGKARCIISDGMDAGLWQLCTTRDIMDSVVRVMAMAIDYRRQAWLRLTSLTKKTQEKISHLPFDGTSLFGQDVKAVVAEDNNIKENDYKDHKYYNQHRYFYSHDQKAHYHNRGYSKGDWYKPRNHPYRYRKKGDSPERHGYKN

SEQ ID NO: 48966 - protein, 922 aa, Homo sapiens
MPGLKTGTINCGTKSSFRRGGHTWVSGKPILCPIMHCNKEFDNGHLLLGHLKRFDHSPCDPTITLHGPFFSSFACVVCYKKFVTQQQYRDHLFDKEATDDGHNNNLLPQIIQCFACPNCFLLFSRKEECSKHMSGKNHFHQSFKLGDNKGIAHPISFPSFAKKLLISLCKDVPFQVKCVACHKTLRSHMELTAHFRVHCRNAGPVAVAEKSITQVAEKFILRGYCPDCNQVFVDETSTQNHKQNSGHKVRVINSVEESVLLYCHSSEGNKDPSSDLHLLLDQSKFSSLKRTMSIKESSSLECIAIPKKKMNLKDKSHEGVACVQKEKSVVKTWFCECNQRFPSEDAVEKHVFSANTMGYKCVVCGKVCDDSGVIRLHMSRIHGGAHLNNFLFWCRTCKKELTRKDTIMAHVTEFHNGHRYFYEMDEVEGETLPSSSTTLDNLTANKPSSAITVIDHSPANSSPRGKWQCRICEDMFDSQEYVKQHCMSLASHKFHRYSCAHCRKPFHKIETLYRHCQDEHDNEIKIKYFCGLCDLIFNVEEAFLSHYEEHHSIDYVFVSEKTETSIKTEDDFPVIETSNQLTCGCRESYICKVNRKEDYSRCLQIMLDKGKLWFRCSLCSATAQNLTDMNTHIHQVHKEKSDEEEQQYVIKCGTCTKAFHDPESAQQHFHRKHCFLQKPSVAHFGSEKSNLYKFTASASHTERKLKQAINYSKSLDMEKGVENDLSYQNIEEEIVELPDLDYLRTMTHIVFVDFDNWSNFFGHLPGHLNQGTFIWGFQGGNTNWKPPLNCKIYNYLNRIGCFFLHPRCSKRKDAADFAICMHAGRLDEQLPKQIPFTILSGDQGFLELENQFKKTQRPAHILNPHHLEGDMMCALLNSISDTTKECDSDDNMGAKNTSIGEEFISTEDVELEEAIRRSLEEM

SEQ ID NO: 48967 - protein, 33 aa, Homo sapiens
MEQFCGVLGHTFMEFLKGSGDYCQAQHDLYADK

SEQ ID NO: 48968 - protein, 1985 aa, Homo sapiens
MLGSASNQFCLPVLDSNDPNFQMPCSTVVGLDDIMDEGVVKESGNDTIDEEELILPNRNLRDKVEENSVRSPRKSPRLMAQEQVRSLRQSTIAKRSNAAPLSNTKKASGKTVSTAKAGVKQPERSQVKEEVCMSLKPEYHKENRRCSRNSGQIEVVPEVSVSSSHSSVSSCLEMKDEDGLDSKHKCNNPGEIDVPSHELNCSLLSETCVTIGEKKNEALMECKAKPVGSPLFKFSDKEEHEQNDSISGKTGETVVEEMIATRKVEQDSKETVKLSHEDDHILEDAGSSDISSDAACTNPNKTENSLVGLPSCVDEVTECNLELKDTMGIADKTENTLERNKIEPLGYCEDAESNRQLESTEFNKSNLEVVDTSTFGPESNILENAICDVPDQNSKQLNAIESTKIESHETANLQDDRNSQSSSVSYLESKSVKSKHTKPVIHSKQNMTTDAPKKIVAAKYEVIHSKTKVNVKSVKRNTDVPESQQNFHRPVKVRKKQIDKEPKIQSCNSGVKSVKNQAHSVLKKTLQDQTLVQIFKPLTHSLSDKSHAHPGCLKEPHHPAQTGHVSHSSQKQCHKPQQQAPAMKTNSHVKEELEHPGVEHFKEEDKLKLKKPEKNLQPRQRRSSKSFSLDEPPLFIPDNIATIRREGSDHSSSFESKYMWTPSKQCGFCKKPHGNRFMVGCGRCDDWFHGDCVGLSLSQAQQMGEEDKEYVCVKCCAEEDKKTEILDPDTLENQATVEFHSGDKTMECEKLGLSKHTTNDRTKYIDDTVKHKVKILKRESGEGRNSSDCRDNEIKKWQLAPLRKMGQPVLPRRSSEEKSEKIPKESTTVTCTGEKASKPGTHEKQEMKKKKVEKGVLNVHPAASASKPSADQIRQSVRHSLKDILMKRLTDSNLKVPEEKAAKVATKIEKELFSFFRDTDAKYKNKYRSLMFNLKDPKNNILFKKVLKGEVTPDHLIRMSPEELASKELAAWRRRENRHTIEMIEKEQREVERRPITKITHKGEIEIESDAPMKEQEAAMEIQEPAANKSLEKPEGSEKQKEEVDSMSKDTTSQHRQHLFDLNCKICIGRMAPPVDDLSPKKVKVVVGVARKHSDNEAESIADALSSTSNILASEFFEEEKQESPKSTFSPAPRPEMPGTVEVESTFLARLNFIWKGFINMPSVAKFVTKAYPVSGSPEYLTEDLPDSIQVGGRISPQTVWDYVEKIKASGTKEICVVRFTPVTEEDQISYTLLFAYFSSRKRYGVAANNMKQVKDMYLIPLGATDKIPHPLVPFDGPGLELHRPNLLLGLIIRQKLKRQHSACASTSHIAETPESAPPIALPPDKKSKIEVSTEEAPEEENDFFNSFTTVLHKQRNKPQQNLQEDLPTAVEPLMEVTKQEPPKPLRFLPGVLIGWENQPTTLELANKPLPVDDILQSLLGTTGQVYDQAQSVMEQNTVKEIPFLNEQTNSKIEKTDNVEVTDGENKEIKVKVDNISESTDKSAEIETSVVGSSSISAGSLTSLSLRGKPPDVSTEAFLTNLSIQSKQEETVESKEKTLKRQLQEDQENNLQDNQTSNSSPCRSNVGKGNIDGNVSCSENLVANTARSPQFINLKRDPRQAAGRSQPVTTSESKDGDSCRNGEKHMLPGLSHNKEHLTEQINVEEKLCSAEKNSCVQQSDNLKVAQNSPSVENIQTSQAEQAKPLQEDILMQNIETVHPFRRGSAVATSHFEVGNTCPSEFPSKSITFTSRSTSPRTSTNFSPMRPQQPNLQHLKSSPPGFPFPGPPNFPPQSMFGFPPHLPPPLLPPPGFGFAQNPMVPWPPVVHLPGQPQRMMGPLSQASRYIGPQNFYQVKDIRRPERRHSDPWGRQDQQQLDRPFNRGKGDRQRFYSDSHHLKRERHEKEWEQESERHRRRDRSQDKDRDRKSREEGHKDKERARLSHGDRGTDGKASRDSRNVDKKPDKPKSEDYEKDKEREKSKHREGEKDRDRYHKDRDHTDRTKSKR

SEQ ID NO: 48969 - protein, 1239 aa, Homo sapiens
MNFLLSLDLHFTDGDYSADDLNALQLISSRTLKLHFSPHRGLHHHVNVMFDYFHLSVVSVTVHASLVALHQPLISFPRPVKTTWLNRNAPAQNKDSVIPTLESVVFGINYTKQLSPDGCSFIIADSFLHHAYRFHYTLCATLLLAFKGLHSYFITVTEEIPSCQKLELAKANMQLLYERLLRRKQLRTQKDNHLEEMDVEARLTELCEEVKKIENPDELAELINMNLAQLCSLLMALWGQFLEVITLHEELRILLAQEHHTLRVRRFSEAFFCFEHPREAAIAYQELHAQSHLQMCTAIKNTSFCSSLPPLPIECSELDGDLNSLPIIFEDRYLDSVTEGKLDISQDDSEITQMEHNLASRRSSDDCHDHQTTPSLGVRTIEIKPSNKDPFSGENITVKLGPWTELRQEEILVDNLLPNFESLESNGKSKSIEITFEKEALQEAKCLSIGESLTKLRSNLPAPSTKEYHVVVSGDTIKLPDISATYASSRFSDSGVESEPSSFATHPNTDLVFETVQGQGPCNSERLFPQLLMKPDYNVKFSLGNHCTESTSAISEIQSSLTSINSLPSDDELSPDENSKKSVVPECHLNDSKTVLNLGTTDLPKCDDTKKSSITLQQQSVVFSGNLDNETVAIHSLNSSIKDPLQFVFSDEETSSDVKSSCSSKPNLDTMCKGFQSPDKSNNSTGTAITLNSKLICLGTPCVISGSISSNTDVSEDRTMKKNSDVLNLTQMYSEIPTVESETHLGTSDPFSASTDIVKQGLVENYFGSQSSTDISDTCAVSYSNALSPQKETSEKEISNLQQEQDKEDEEEEQDQQMVQNGYYEETDYSALDGTINAHYTSRDELMEERLTKSEKINSDYLRDGINMPTVCTSGCLSFPSAPRESPCNVKYSSKSKFDAITKQPSSTSYNFTSSISWYESSPKPQIQAFLQAKEELKLLKLPGFMYSEVPLLASSVPYFSVEEEDGSEDGVHLIVCVHGLDGNSADLRLVKTYIELGLPGGRIDFLMSERNQNDTFADFDSMTDRLLDEIIQYIQIYSLTVSKISFIGHSLGNLIIRSVLTRPRFKYYLNKLHTFLSLSGPHLGTLYNSSALVNTGLWFMQKWKKSGSLLQLTCRDHSDPRQTFLYKLSNKAGLHYFKNVVLVGSLQDRYVPYHSARIEMCKTALKDKQSGQIYSEMIHNLLRPVLQSKDCNLVRYNVINALPNTADSLIGRAAHIAVLDSEIFLEKFFLVAALKYFQ

SEQ ID NO: 48970 - protein, 888 aa, Homo sapiens
MKDVESGRGRVLLNSAAARGDGLLLLGTRAATLGGGGGGLRESRRGKQGARMSLLGKPLSYTSSQSCRRNVKYRRVQNYLYNVLERPRGWAFIYHAFVFLPVFGCLILSVFSTIPEHTKLASSCLLILEFVMIVVFGLEFIIRIWSAGCCCRYRGWQGRLRFARKPFCVIDTIVLIASIAVVSAKTQGNIFATSALRSLRFLQILRMVRMDRRGGTWKLLGSVVYAHSKELITAWYIGFLVLIFSSFLVYLVEKDANKEFSTYADALWWGTITLTTIGYGDKTPLTWLGRLLSAGFALLGISFFALPAGILGSGFALKVQEQHRQKHFEKRRNPAANLIQCVWRSYAADEKSVSIATWKPHLKALHTCSPTNQKLSFKERVRMASPRGQSIKSRQASVGDRRSPSTDITAEGSPTKVQKSWSFNDRTRFRPSLRLKSSQPKPVIDADTALGTDDVYDEKGCQCDVSVEDLTPPLKTVIRAIRIMKFHVAKRKFKETLRPYDVKDVIEQYSAGHLDMLCRIKSLQTRVDQILGKGQITSDKKSREKITAEHETTDDLSMLGRVVKVEKQVQSIESKLDCLLDIYQQVLRKGSASALALASFQIPPFECEQTSDYQSPVDSKDLSGSAQNSGCLSRSTSANISRGLQFILTPNEFSAQTFYALSPTMHSQATQVPISQSDGSAVAATNTIANQINTAPKPAAPTTLQIPPPLPAIKHLPRPETLHPNPAGLQESISDVTTCLVASKENVQVAQSNLTKDRSMRKSFDMGGETLLSVCPMVPKDLGKSLSVQNLIRSTEELNIQLSGSESSGSRGSQDFYPKWRESKLFITDEEVGPEETETDTFDAAPQPAREAAFASDSLRTGRSRSSQSICKAGESTDALSLPHVKLK

SEQ ID NO: 48971 - protein, 514 aa, Homo sapiens [sequence omitted]

SEQ ID NO: 48972 - protein, 698 aa, Homo sapiens
MRKNVPKVLVVVTDGRSQDEVKKAALVIQQSGFSVFVVGVADVDYNELANIASKPSERHVFIVDDFESFEKIEDNLITFVCETATSSCPLIYLDGYTSPGFKMLEAYNLTEKNFASVQGVSLESGSFPSYSAYRIQKNAFVNQPTADLHPNGLPPSYTIILLFRLLPETPSDPFAIWQITDRDYKPQVGVIADPSSKTLSFFNKDTRGEVQTVTFDTEEVKTLFYGSFHKVHIVVTSKSVKIYIDCYEIIEKDIKEAGNITTDGYEILGKLLKGERKSAAFQIQSFDIVCSPVWTSRDRCCDIPSRRDEGKCPAFPNSCTCTQDSVGPPGPPGPAGGPGAKGPRGERGISGAIGPPGPRGDIGPPGPQGPPGPQGPNGLSIPGEQGRQGMKGDAGEPGLPGRTGTPGLPGPPGPMGPPGDRGFTGKDGAMGPRGPPGPPGSPGSPGVTGPSGKPGKPGDHGRPGPSGLKGEKGDRGDIASQNMMRAVARQVCEQLISGQMNRFNQMLNQIPNDYQSSRNQPGPPGPPGPPGSAGARGEPGPGGRPGFPGTPGMQGPPGERGLPGEKGERGTGSSGPRGLPGPPGPQGESRTGPPGSTGSRGPPGPPGRPGNSGIRGPPGPPGYCDSSQCASIPYNGQGYPEPYVPEGGAYLPEREPFIVPVEPERTAEYEDYGADEPAEEPPEPHRRWRRALPHGPGQ

SEQ ID NO: 48973 - protein, 3021 aa, Homo sapiens [sequence omitted]

SEQ ID NO: 48974 - protein, 1236 aa, Homo sapiens
MGNIVDIGPDSLTIEPLNQKGKTFLALINQVFPAEEDSKKDVEDNCSLMYLNEATLLHNIKVRYSKDRIYTYVANILIAVNPYFDIPKIYSSEAIKSYQGKSLGTRPPHVFAIADKAFRDMKVLKMSQSIIVSGESGAGKTENTKFVLRYLTESYGTGQDIDDRIVEANPLLEAFGNAKTVRNNNSSRFGKFVEIHFNEKSSVVGGFVSHYLLEKSRICVQGKEERNYHIFYRLCAGASEDIREKLHLSSPDNFRYLNRGCTRYFANKETDKQILQNRKSPEYLKAGSMKDPLLDDHGDFIRMCTAMKKIGLDDEEKLDLFRVVAGVLHLGNIDFEEAGSTSGGCNLKNKSAQSLEYCAELLGLDQDDLRVSLTTRVMLTTAGGTKGTVIKVPLKVEQANNARDALAKTVYSHLFDHVVNRVNQCFPFETSSYFIGVLDIAGFEYFEHNSFEQFCINYCNEKLQQFFNERILKEEQELYQKEGLGVNEVHYVDNQDCIDLIEAKLVGILDILDEENRLPQPSDQHFTSAVHQKHKDHFRLTIPRKSKLAVHRNIRDDEGFIIRHFAGAVCYETTQFVEKNNDALHMSLESLICESRDKFIRELFESSTNNNKDTKQKAGKLSFISVGNKFKTQLNLLLDKLRSTGASFIRCIKPNLKMTSHHFEGAQILSQLQCSGMVSVLDLMQGGYPSRASFHELYNMYKKYMPDKLARLDPRLFCKALFKALGLNENDYKFGLTKVFFRPGKFAEFDQIMKSDPDHLAELVKRVNHWLTCSRWKKVQWCSLSVIKLKNKIKYRAEACIKMQKTIRMWLCKRRHKPRIDGLVKVGTLKKRLDKFNEVVSVLKDGKPEMNKQIKNLEISIDTLMAKIKSTMMTQEQIQKEYDALVKSSEELLSALQKKKQQEEEAERLRRIQEEMEKERKRREEDEKRRRKEEEERRMKLEMEAKRKQEEEERKKREDDEKRIQAEVEAQLARQKEEESQQQAVLEQERRDRELALRIAQSEAELISDEAQADLALRRGPAVLATKAAAGTKKYDLSKWKYAELRDTINTSCDIELLAACREEFHRRLKVYHAWKSKNKKRNTETEQRAPKSVTDYAQQNPAAQIPARQREIEMNRQQRFFRIPFIRPADQYKDPQSKKKGWWYAHFDGPWIARQMELHPDKPPILLVAGKDDMEMCELNLEETGLTRKRGAEILPRQFEEIWERCGGIQYLQNAIESRQARPTYATAMLQSLLK

SEQ ID NO: 48975 - protein, 1591 aa, Homo sapiens
MAVNYENTMIAAGSCDKMIRVWCLRTCAPLAVLQGHSASITSLQFSPLCSGSKRYLSSTGADGTICFWLWDAGTLKINPRPAKFTERPRPGVQMICSSFSAGGMFLATGSTDHIIRVYFFGSGQPEKISELEFHTDKVDSIQFSNTSNRFVSGSRDGTARIWQFKRREWKSILLDMATRPAGQNLQGIEDKITKMKVTMVAWDRHDNTVITAVNNMTLKVWNSYTGQLIHVLMGHEDEVFVLEPHPFDPRVLFSAGHDGNVIVWDLARGVKIRSYFNMIEGQGHGAVFDCKCSPDGQHFACTDSHGHLLIFGFGSSSKYDKIADQMFFHSDYRPLIRDANNFVLDEQTQQAPHLMPPPFLVDVDGNPHPSRYQRLVPGRENCREEQLIPQMGVTSSGLNQVLSQQANQEISPLDSMIQRLQQEQDLRRSGEAVISNTSRLSRGSISSTSEVHSPPNVGLRRSGQIEGVRQMHSNAPRSEIATERDLVAWSRRVVVPELSAGVASRQEEWRTAKGEEEIKTYRSEEKRKHLTVPKENKIPTVSKNHAHEHFLDLGESKKQQTNQHNYRTRSALEETPRPSEEIENGSSSSDEGEVVAVSGGTSEEEERAWHSDGSSSDYSSDYSDWTADAGINLQPPKKVPKNKTKKAESSSDEEEESEKQKQKQIKKEKKKVNEEKDGPISPKKKKPKERKQKRLAVGELTENGLTLEEWLPSTWITDTIPRRCPFVPQMGDEVYYFRQGHEAYVEMARKNKIYSINPKKQPWHKMELREQELMKIVGIKYEVGLPTLCCLKLAFLDPDTGKLTGGSFTMKYHDMPDVIDFLVLRQQFDDAKYRRWNIGDRFRSVIDDAWWFGTIESQEPLQLEYPDSLFQCYNVCWDNGDTEKMSPWDMELIPNNAVFPEELGTSVPLTDGECRSLIYKPLDGEWGTNPRDEECERIVAGINQLMTLDIASAFVAPVDLQAYPMYCTVVAYPTDLSTIKQRLENRFYRRVSSLMWEVRYIEHNTRTFNEPGSPIVKSAKFVTDLLLHFIKDQTCYNIIPLYNSMKKKVLSDSEDEEKDADVPGTSTRKRKDHQPRRRLRNRAQSYDIQAWKKQCEELLNLIFQCEDSEPFRQPVDLLEYPDYRDIIDTPMDFATVRETLEAGNYESPMELCKDVRLIFSNSKAYTPSKRSRIYSMSLRLSAFFEEHISSVLSDYKSALRFHKRNTITKRRKKRNRSSSVSSSAASSPERKKRILKPQLKSESSTSAFSTPTRSIPPRHNAAQINGKTESSSVVRTRSNRVVVDPVVTEQPSTSSAAKTFITKANASAIPGKTILENSVKHSKALNTLSSPGQSSFSHGTRNNSAKENMEKEKPVKRKMKSSVLPKASTLSKSSAVIEQGDCKNNALVPGTIQVNGHGGQPSKLVKRGPGRKPKVEVNTNSGEIIHKKRGRKPKKLQYAKPEDLEQNNVHPIRDEVLPSSTCNFLSETNNVKEDLLQKKNRGGRKPKRKMKTQKLDADLLVPASVKVLRRSNRKKIDDPIDEEEEFEELKGSEPHMRTRNQGRRTAFYNEDDSEEEQRQLLFEDTSLTFGTSSRGRVRKLTEKAKANLIGW

SEQ ID NO: 48976 - protein, 402 aa, Homo sapiens
MLKECLVGRMAIKPAVLKDYREEEKKVLNGMLPKSQVTDTLAKEGPSYPSYDWFQTDSLVTIAIYTKQKDINLDSIIVDHQNDSFRAETIIKDCLYLIHIGLSHEVQEDFSVRVVESVGKIEIVLQKKENTSWDFLGHPLKNHNSLIPRKDTGLYYRKCQLISKEDVTHDTRLFCLMLPPSTHLQVPIGQHVYLKLPITGTEIVKPYTPVSGSLLSEFKEPVLPNNKYIYFLIKIYPTGLFTPELDRLQIGDFVSVSSPEGNFKISKFQELEDLFLLAAGTGFTPMVKILNYALTDIPSLRKVKLMFFNKTEDDIIWRSQLEKLAFKDKRLDVEFVLSAPISEWNGKQGHISPALLSEFLKRNLDKSKVLVCICGPVPFTEQGVRLLHDLNFSKNEIHSFTA

SEQ ID NO: 48977 - protein, 596 aa, Homo sapiens
MLSLKAHAFSVEALIGAEKQQQLQKKRRKLGAEEAAGAVDDGGCSRGGGAGEKGSSEGDEGAALPPPAGATSGPARSGADLERGAAGGCEDGFQQGASPLASPGGSPKGSPARSLARPGTPLPSPQAPRVDLQGAELWKRFHEIGTEMIITKAGRRMFPAMRVKISGLDPHQQYYIAMDIVPVDNKRYRYVYHSSKWMVAGNADSPVPPRVYIHPDSPASGETWMRQVISFDKLKLTNNELDDQGHIILHSMHKYQPRVHVIRKDCGDDLSPIKPVPSGEGVKAFSFPETVFTTVTAYQNQQITRLKIDRNPFAKGFRDSGRNRMGLEALVESYAFWRPSLRTLTFEDIPGIPKQGNASSSTLLQGTGNGVPATHPHLLSGSSCSSPAFHLGPNTSQLCSLAPADYSACARSGLTLNRYSTSLAETYNRLTNQAGETFAPPRTPSYVGVSSSTSVNMSMGGTDGDTFSCPQTSLSMQISGMSPQLQYIMPSPSSNAFATNQTHQGSYNTFRLHSPCALYGYNFSTSPKLAASPEKIVSSQGSFLGSSPSGTMTDRQMLPPVEGVHLLSSGGQQSFFDSRTLGSLTLSSSQVSAHMV

SEQ ID NO: 48978 - protein, 525 aa, Homo sapiens
MKTYRQREKQGTKVADSSKGPDEAKIKALLERTGYTLDVTTGQRKYGGPPPDSVYSGQQPSVGTEIFVGKIPRDLFEDELVPLFEKAGPIWDLRLMMDPLTGLNRGYAFVTFCTKEAAQEAVKLYNNHEIRSGKHIGVCISVANNRLFVGSIPKSKTKEQILEEFSKVTEGLTDVILYHQPDDKKKNRGFCFLEYEDHKTAAQARRRLMSGKVKVWGNVGTVEWADPIEDPDPEVMAKVKVLFVRNLANTVTEEILEKAFSQFGKLERVKKLKDYAFIHFDERDGAVKAMEEMNGKDLEGENIEIVFAKPPDQKRKERKAQRQAAKNQMYDDYYYYGPPHMPPPTRGRGRGGRGGYGYPPDYYGYEDYYDYYGYDYHNYRGGYEDPYYGYEDFQVGARGRGGRGARGAAPSRGRGAAPPRGRAGYSQRGGPGSARGVRGARGGAQQQRGRGVRGARGGRGGNVGGKRKADGYNQPDSKRRQTNNQNWGSQPIAQQPLQGGDHSGNYGYKSENQEFYQDTFGQQWK

SEQ ID NO: 48979 - protein, 403 aa, Homo sapiens
MQFGLLGTGFQLFGYEEKLQSNPLQHLFEVYVQVNKEAADDKSVAKAAQEFFQRLELGDVQALSLWQKFRDLSIEEYIRVYKRLGVYFDEYSGESFYREKSQEVLKLLESKGLLLKTIKGTAVVDLSGNGDPSSICTVMRSDGTSLYATRDLAAAIDRMDKYNFDTMIYVTDKGQKKHFQQVFQMLKIMGYDWAERCQHVPFGVVQGMKTRRGDVTFLEDVLNEIQLRMLQNMASIKTTKELKNPQETAERVGLAALIIQDFKGLLLSDYKFSWDRVFQSRGDTGVFLQYTHARLHSLEETFGCGYLNDFNTACLQEPQSVSILQHLLRFDEVLYKSSQDFQPRHIVSYLLTLSHLAAVAHKTLQIKDSPPEVAGARLHLFKAVRSVLANGMKLLGITPVCRM

SEQ ID NO: 48980 - protein, 707 aa, Homo sapiens [sequence omitted]

SEQ ID NO: 48981 - protein, 706 aa, Homo sapiens
MSKGCFVFKPNSKKRKISLPIEDYFNKGKNEPEDSKLRFETYQLIWQQMKSENERLQEELNKNLFDNLIEFLQKSHSGFQKNSRDLGGQIKLREIPTAALVLGVNVTDHDLTFGSLTEALQNNVTPYVVSLQAKDCPDMKHFLQKLISQLMDCCVDIKSKEEESVHVTQRKTHYSMDSLSSWYMTVTQKTDPKMLSKKRTTSSQWQSPPVVVILKDMESFATKVLQDFIIISSQHLHEFPLILIFGIATSPIIIHRLLPHAVSSLLCIELFQSLSCKEHLTTVLDKLLLTTQFPFKINEKVLQVLTNIFLYHDFSVQNFIKGLQLSLLEHFYSQPLSVLCCNLPEAKRRINFLSNNQCENIRRLPSFRRYVEKQASEKQVALLTNERYLKEETQLLLENLHVYHMNYFLVLRCLHKFTSSLPKYPLGRQIRELYCTCLEKNIWDSEEYASVLQLLRMLAKDELMTILEKCFKVFKSYCENHLGSTAKRIEEFLAQFQSLDETKEEEDASGSQPKGLQKTDLYHLQKSLLEMKELRRSKKQTKFEVLRENVVNFIDCLVREYLLPPETQPLHEVVYFSAAHALREHLNAAPRIALHTALNNPYYYLKNEALKSEEGCIPNIAPDICIAYKLHLECSRLINLVDWSEAFATVVTAAEKMDANSATSEEMNEIIHARFIRAVSELELLGFIKPTKQKTDHVARLTWGGC

SEQ ID NO: 48982 - protein, 140 aa, Homo sapiens
MEPSPFGDVSSRLTTEQILYNIKQEYKRMQKRRHLETSFQQTDPCCTSDAQPHAFLLSGPASPGTSSAASSPLKKEQPLFTLRQVGMICERLLKEREEKVREEYEEILNTKLAEQYDAFVKFTHDQIMRRYGEQPASYVS

SEQ ID NO: 48983 - protein, 294 aa, Homo sapiens
MVTTAPPPLPRIPDPRALPPTLFLPHFLGGDGPCLTPQPRAPAALPNRSLAVAGGTPRAAPKKRRKKKVRASPAGQLPSRFHQYQQHRPSLEGGRSPATGPSGAQEVPGPAAALAPSPAAAAGTEGASPDLAPLRPAAPGQTPLRKEVLKSKMGKSEKIALPHGQLVHGIHLYEQPKINRQKSKYNLPLTKITSAKRNENNFWQDSVSSDRIQKQEKKPFKNTENIKNSHLKKSAFLTEVSQKENYAGAKFSDPPSPSVLPKPPSHWMGSTVENSNQNRELMAVHLKTLLKVQT

SEQ ID NO: 48984 - protein, 5499 aa, Homo sapiens
MSKLIGNHPDVLPFALRYFKDTSPVFQRLFLESSDANPVRYGRRRMKLRDLMEAAFKFLQQEQSVFRELWDWSVCVPLLRSHDTLVRWYTANCLALVTCMNEEHKLSFLKKIFNSDELIHFRLRLLEEAQLQDLEKALVLANPEVSLWRKQKELQYLQGHLVSSDLSPRVTAVCGVVLPGQLPAPGELGGNRSSSREQELALRSYVLVESVCKSLQTLAMAVASQNAVLLEGPIGCGKTSLVEYLAAVTGRTKPPQLLKVQLGDQTDSKMLLGMYRCTDVPGEFVWQPGTLTQAATMGHWILLEDIDYAPLDVVSVLIPLLENGELLIPGRGDCLKVAPGFQFFATRRLLSCGGNWYRPLNSHATLLDKYWTKIHLDNLDKRELNEVLQSRYPSLLAVVDHLLDIYIQLTGEKHHSWSDSSVGCEQAPEEVSEARRENKRPTLEGRELSLRDLLNWCNRIAHSFDSSSLSASLNIFQEALDCFTAMLSEHTSKLKMAEVIGSKLNISRKKAEFFCQLYKPEIVINELDLQVGRVRLLRKQSEAVHLQREKFTFAATRPSSVLIEQLAVCVSKGEPVLLVGETGTGKTSTIQYLAHITGHRLRVVNMNQQSDTADLLGGYKPVDHKLIWLPLREAFEELFAQTFSKKQNFTFLGHIQTCYRQKRWHDLLRLMQHVHKSAVNKDGKDSETGLLIKEKWEAFGLRLNHAQQQMKMTENTLLFAFVEGTLAQAVKKGEWILLDEINLAAPEILECLSGLLEGSSGSLVLLDRGDTEPLVRHPDFRLFACMNPATDVGKRNLPPGIRNRFTELYVEELESKEDLQVLIVDYLKGLSVNKNTVQGIINFYTALRKESGTKLVDGTGHRPHYSLRTLCRALRFAASNPCGNIQRSLYEGFCLGFLTQLDRASHPIVQKLICQHIVPGNVKSLLKQPIPEPKGGRLIQVEGYWIAVGDKEPTIDETYILTSSVKLNLRDIVRVVSAGTYPVLIQGETSVGKTSLIQWLAAATGNHCVRINNHEHTDIQEYIGCYTSDSSGKLVFKEGVLIDAMRKGYWIILDELNLAPTDVLEALNRLLDDNRELLVTETQEVVKAHPRFMLFATQNPPGLYGGRKVLSRAFRNRFVELHFDELPSSELETILHKRCSLPPSYCSKLVKVMLDLQSYRRSSSVFAGKQGFITLRDLFRWAERYRLAEPTEKEYDWLQHLANDGYMLLAGRVRKQEEIDVIQEVLEKHFKKKLCPQSLFSKENVLKLLGKLSTQISTLECNFGHIVWTEGMRRLAMLVGRALEFGEPVLLVGDTGCGKTTICQVFAALANQKLYSVSCHLHMETSDFLGGLRPVRQKPNDKEEIDTSRLFEWHDGPLVQAMKEDGFFLLDEISLADDSVLERLNSVLEVEKSLVLAEKGSPEDKDSEIELLTAGKKFRILATMNPGGDFGKKELSPALRNRFTEIWCPQSTSREDLIQIISHNLRPGLCLGRIDPKGSDIPEVMLDFIDWLTHQEFGRKCVVSIRDILSWVNFMNKMGEEAALKRPEIISTVTSFVHAACLVYIDGIGSGVTSSGFGTALLARKECLKFLIKRLAKIVRLTEYQKNELKIYDRMKAKEFTGIDNLWGIHPFFIPRGPVLHRNNIADYALSAGTTAMNAQRLLRATKLKKPILLEGSPGVGKTSLVGALAKASGNTLVRINLSEQTDITDLFGADLPVEGGKGGEFAWRDGPLLAALKAGHWVVLDELNLASQSVLEGLNACFDHRGEIYVPELGMSFQVQHEKTKIFGCQNPFRQGGGRKGLPRSFLNRFTQVFVDPLTVIDMEFIASTLFPAIEKNIVKKMVAFNNQIDHEVTVEKKWGQKGGPWEFNLRDLFRWCQLMLVDQSPGCYDPGQHVFLVYGERMRTEEDKKKVIAVFKDVFGSNSNPYMGTRLFRITPYDVQLGYSVLSRGSCVPHPSRHPLLLLHQSFQPLESIMKCVQMSWMVILVGPASVGKTSLVQLLAHLTGHTLKIMAMNSAMDTTELLGGFEQVDLIRPWRRLLEKVEGTVRALLRDSLLISADDAEVVLRAWSHFLLTYKPKCLGEGGKAITMEIVNKLEAVLLLMQRLNNKINSYCKAEFAKLVEEFRSFGVKLTQLASGHSHGTFEWVDSMLVQALKSGDWLLMDNVNFCNPSVLDRLNALLEPGGVLTISERGMIDGSTPTITPNPNFRLFLSMDPVHGDISRAMRNRGLEIYISGEGDASTPDNLDLKVLLHSLGLVGNSVCDILLALHTETRSTVVGSPTSSVSTLIQTAILIVQYLQRGLSLDRAFSEACWEVYVCSQHSPANRKLVQALLEKHVSSLRAHETWGDSILGMGLWPDSVPSALFATEDSHLSTVRRDGQILVYCLNRMSMKTSSWTRSQPFTLQDLEKIMQSPSPENLKFNAVEVNTYWIDEPDVLVMAVKLLIERATNQDWMLRVKWLYHLAKNIPQGLESIQIHLEASAASLRNFYSHSLSGAVSNVFKILQPNTTDEFVIPLDPRWNMQALDMIRNLMDFDPQTDQPDQLFALLESAANKTIIYLDREKRVFTEANLVSVGSKKLRESVLRMSFEFHQDPESYHTLPHEIVVNLAAFFELCDALVLLWVQSSQGMVSDASANEILGSLRWRDRFWTVADTVKVDAPGLALLALHWHWVLKHLVHQIPRLLMNYEDKYYKEVQTVSEHIQNCLGSQTGGFAGIKKLQKFLGRPFPFKDKLVVECFSQLKVLNKVLAIREQMSALGESGWQEDINRLQVVASQWTLKKSLLQAWGLILRANILEDVSLDELKNFVHAQCLELKAKGLSLGFLEKKHDEASSLSHPDLTSVIHLTRSVQLWPAMEYLAMLWRYKVTADFMAQACLRRCSKNQQPQINEEISHLISFCLYHTPVTPQELRDLWSLLHHQKVSPEEITSLWSELFNSMFMSFWSSTVTTNPEYWLMWNPLPGMQQREAPKSVLDSTLKGPGNLNRPIFSKCCFEVLTSSWRASPWDVSGLPILSSSHVTLGEWVERTQQLQDISSMLWTNMAISSVAEFRRTDSQLQGQVLFRHLAGLAELLPESRRQEYMQNCEQLLLGSSQAFQHVGQTLGDMAGQEVLPKELLCQLLTSLHHFVGEGESKRSLPEPAQRGSLWVSLGLLQIQTWLPQARFDPAVKREYKLNYVKEELHQLQCEWKTRNLSSQLQTGRDLEDEVVVSYSHPHVRLLRQRMDRLDNLTCHLLKKQAFRPQLPAYESLVQEIHHYVTSIAKAPAVQDLLTRLLQALHIDGPRSAQVAQSLLKEEASWQQSHHQFRKRLSEEYTFYPDAVSPLQASILQLQHGMRLVASELHTSLHSSMVGADRLGTLATALLAFPSVGPTFPTYYAHADTLCSVKSEEVLRGLGKLILKRSGGKELEGKGQKACPTREQLLMNALLYLRSHVLCKGELDQRALQLFRHVCQEIISEWDEQERIAQEKAEQESGLYRYRSRNSRTALSEEEEEEREFRKQFPLHEKDFADILVQPTLEENKGTSDGQEEEAGTNPALLSQNSMQAVMLIHQQLCLNFARSLWYQQTLPPHEAKHYLSLFLSCYQTGASLVTHFYPLMGVELNDRLLGSQLLACTLSHNTLFGEAPSDLMVKPDGPYDFYQHPNVPEARQCQPVLQGFSEAVSHLLQDWPEHPALEQLLVVMDRIRSFPLSSPISKFLNGLEILLAKAQDWEENASRALSLRKHLDLISQMIIRWRKLELNCWSMSLDNTMKRHTEKSTKHWFSIYQMLEKHMQEQTEEQEDDKQMTLMLLVSTLQAFIEGSSLGEFHVRLQMLLVFHCHVLLMPQVEGKDSLCSVLWNLYHYYKQFFDRVQAKIVELRSPLEKELKEFVKISKWNDVSFWSIKQSVEKTHRTLFKFMKKFEAVLSEPCRSSLVESDKEEQPDFLPRPTDGAASELSSIQNLNRALRETLLAQPAAGQATIPEWCQGAAPSGLEGELLRRLPKLRKRMRKMCLTFMKESPLPRLVEGLDQFTGEVISSVSELQSLKVEPSAEKEKQRSEAKHILMQKQRALSDLFKHLAKIGLSYRKGLAWARSKNPQEMLHLHPLDLQSALSIVSSTQEADSRLLTEISSSWDGCQKYFYRSLARHARLNAALATPAKEMGMGNVERCRGFSAHLMKMLVRQRRSLTTLSEQWIILRNLLSCVQEIHSRLMGPQAYPVAFPPQDGVQQWTERLQHLAMQCQILLEQLSWLLQCCPSVGPAPGHGNVQVLGQPPGPCLEGPELSKGQLCGVVLDLIPSNLSYPSPIPGSQLPSGCRMRKQDHLWQQSTTRLTEMLKTIKTVKADVDKIRQQSCETLFHSWKDFEVCSSALSCLSQVSVHLQGLESLFILPGMEVEQRDSQMALVESLEYVRGEISKAMADFTTWKTHLLTSDSQGGNQMLDEGFVEDFSEQMEIAIRAILCAIQNLEERKNEKAEENTDQASPQEDYAGFERLQSGHLTKLLEDDFWADVSTLHVQKIISAISELLERLKSYGEDGTAAKHLFFSQSCSLLVRLVPVLSSYSDLVLFFLTMSLATHRSTAKLLSVLAQVFTELAQKGFCLPKEFMEDSAGEGATEFHDYEGGGIGEGEGMKDVSDQIGNEEQVEDTFQKGQEKDKEDPDSKSDIKGEDNAIEMSEDFDGKMHDGELEEQEEDDEKSDSEGGDLDKHMGDLNGEEADKLDERLWGDDDEEEDEEEEDNKTEETGPGMDEEDSELVAKDDNLDSGNSNKDKSQQDKKEEKEEAEADDGGQGEDKINEQIDERDYDENEVDPYHGNQEKVPEPEALDLPDDLNLDSEDKNGGEDTDNEEGEEENPLEIKEKPEEAGHEAEERGETETDQNESQSPQEPEEGPSEDDKAEGEEEMDTGADDQDGDAAQHPEEHSEEQQQSVEEKDKEADEEGGENGPADQGFQPQEEEEREDSDTEEQVPEALERKEHASCGQTGVENMQNTQAMELAGAAPEKEQGKEEHGSGAADANQAEGHESNFIAQLASQKHTRKNTQSFKRKPGQADNERSMGDHNERVHKRLRTVDTDSHAEQGPAQQPQAQVEDADAFEHIKQGSDAYDAQTYDVASKEQQQSAKDSGKDQEEEEIEDTLMDTEEQEEFKAADVEQLKPEEIKSGTTAPLGFDEMEVEIQTVKTEEDQDPRTDKAHKETENEKPERSRESTIHTAHQFLMDTIFQPFLKDVNELRQELERQLEMWQPRESGNPEEEKVAAEMWQSYLILTAPLSQRLCEELRLILEPTQAAKLKGDYRTGKRLNIRKVIPYIASQFRKDKIWLRRTKPSKRQYQICLAIDDSSSMVDNHTKQLAFESLAVIGNALTLLEVGQIAVCSFGESVKLLHPFHEQFSDYSGSQILRLCKFQQKKTKIAQFLESVANMFAAAQQLSQNISSETAQLLLVVSDGRGLFLEGKERVLAAVQAARNANIFVIFVVLDNPSSRDSILDIKVPIFKGPGEMPEIRSYMEEFPFPYYIILRDVNALPETLSDALRQWFELVTASDHP

SEQ ID NO: 48985 - protein, 36 aa, Homo sapiens
MKAHWTYTLGWTVLFLTALPNPVYHQEIVWTYMKRS

SEQ ID NO: 48986 - protein, 1514 aa, Homo sapiens
MHQWENTPLKAERHRTEDKRKREQESKEENRHIRNEKRVPTEHLQKTNKETKKTTTDLKKQNEPKTDKGEVLDNGVSEGADNKELAMKAESGPNETKNKDLKLSFMKKLNLTLSPAKKQPVSQDNQHKITDIPKSSGVCDSESSMQVKTVAYVPSISEHILGEAAVSEHTMGETKSTLLEPKVALLAVTEPRIGISETNKEDENSLLVRSVDNTMHCEEPICGTETSFPSPMEIQQTESLFPSTGMKQTINNGRAAAPVVMDVLQTDVSQNFGLELDTKRNDNSDYCGISEGMEMKVALSTTVSETTESILQPSIEEADILPIMLSEDNNPKFEPSVIVTPLVESKSCHLEPCLPKETLDSSLQQTELMDHRMATGETNSVYHDDDNSVLSIDLNHLRPIPEAISPLNSPVRPVAKVLRNESPPQVPVYNNSHKDVFLPNSAHSTSKSQSDLNKENQKPIYKSDKCTEADTCKNSPLDELEEGEIRSDSETSKPQESFEKNSKRRVSADVRKSKTIPRRGKSTVCLDKDSRKTHVRIHQTNNKWNKRPDKSSRSSKTEKKDKVMSTSSLEKIVPIIAVPSSEQEIMHMLRMIRKHVRKNYMKFKAKFSLIQFHRIIESAILSFTSLIKHLNLHKISKSVTTLQKNLCDIIESKLKQVKKNGIVDRLFEQQLPDMKKKLWKFVDDQLDYLFAKLKKILVCDSKSFGRDSDEGKLEKTSKQNAQYSNSQKRSVDNSNRELLKEKLSKSEDPVHYKSLVGCKKSEENYQDQNNSSINTVKHDIKKNFNICFDNIKNSQSEERSLEVHCPSTPKSEKNEGSSIEDAQTSQHATLKPERSFEILTEQQASSLTFNLVSDAQMGEIFKSLLQGSDLLDSSVNCTEKSEWELKTPEKQLLETLKCESIPACTTEELVSGVASPCPKMISDDNWSLLSSEKGPSLSSGLSLPVHPDVLDESCMFEVSTNLPLSKDNVCSVEKSKPCVSSILLEDLAVSLTVPSPLKSDGHLSFLKPDMSSSSTPEEVISAHFSEDALLEEEDASEQDIHLALESDNSSSKSSCSSSWTSRSVAPGFQYHPNLPMHAVIMEKSNDHFIVKIRRATPSTSSGLKQSMMPDELLTSLPRHGKEADEGPEKEYISCQNTVFKSVEELENSNKNVDGSKSTHEEQSSMIQTQVPDIYEFLKDASDKMGHSDEVADECFKLHQVWETKVPESIEELPSMEEISHSVGEHLPNTYVDLTKDPVTETKNLGEFIEVTVLHIDQLGCSGGNLNQSAQILDNSLQADTVGAFIDLTQDASSEAKSEGNHPALAVEDLGCGVIQVDEDNCKEEKAQVANRPLKCIVEETYIDLTTESPSSCEVKKDELKSEPGSNCDNSELPGTLHNSHKKRRNISDLNHPHKKQRKETDLTNKEKTKKPTQDSCENTEAHQKKASKKKAPPVTKDPSSLKATPGIKDSSAALATSTSLSAKNVIKKKGEIIILWTRNDDREILLECQKRGPSFKTFAYLAAKLDKNPNQISC

SEQ ID NO: 48987 - protein, 460 aa, Homo sapiens
MQPKALIHRDLKPPNLLLVAGGTVLKICDFGTACDIQTHMTNNKGSAAWMAPEVFEGSNYSEKCDVFSWGIILWEVITRRKPFDEIGGPAFRIMWAVHNGTRPPLIKNLPKPIESLMTRCWSKDPSQRPSMEEIVKIMTHLMRYFPGADEPLQYPCQYSDEGQSNSATSTGSFMDIASTNTSNKSDTNMEQVPATNDTIKRLESKLLKNQAKQQSESGRLSLGASRGSSVESLPPTSEGKRMSADMSEIEARIAATTAYSKPKRGHRKTASFGNILDVPEIVISGNGQPRRRSIQDLTVTGTEPGQVSSRSSSPSVRMITTSGPTSEKPTRSHPWTPDDSTDTNGSDNSIPMAYLTLDHQLQPLAPCPNSKESMAVFEQHCKMAQEYMKVQTEIALLLQRKQELVAELDQDEKDQQNTSRLVQEHKKLLDENKSLSTYYQQCKKQLEVIRSQQQKRQGTS

SEQ ID NO: 48988 - protein, 433 aa, Homo sapiens
MQPKALIHRDLKPPNLLLVAGGTVLKICDFGTACDIQTHMTNNKGSAAWMAPEVFEGSNYSEKCDVFSWGIILWEVITRRKPFDEIGGPAFRIMWAVHNGTRPPLIKNLPKPIESLMTRCWSKDPSQRPSMEEIVKIMTHLMRYFPGADEPLQYPCQYSDEGQSNSATSTGSFMDIASTNTSNKSDTNMEQVPATNDTIKRLESKLLKNQAKQQSESGRLSLGASRGSSVESLPPTSEGKRMSADMSEIEARIAATTGNGQPRRRSIQDLTVTGTEPGQVSSRSSSPSVRMITTSGPTSEKPTRSHPWTPDDSTDTNGSDNSIPMAYLTLDHQLQPLAPCPNSKESMAVFEQHCKMAQEYMKVQTEIALLLQRKQELVAELDQDEKDQQNTSRLVQEHKKLLDENKSLSTYYQQCKKQLEVIRSQQQKRQGTS

SEQ ID NO: 48989 - protein, 372 aa, Homo sapiens
MQPKALIHRDLKPPNLLLVAGGTVLKICDFGTACDIQTHMTNNKGSAAWMAPEVFEGSNYSEKCDVFSWGIILWEVITRRKPFDEIGGPAFRIMWAVHNGTRPPLIKNLPKPIESLMTRCWSKDPSQRPSMEEIVKIMTHLMRYFPGADEPLQYPCQYSDEGQSNSATSTGSFMDIASTNTSNKSDTNMEQVPATNDTIKRLESKLLKNQAKQQSESGRLSLGASRGSSVESLPPTSEGKRMSADMSEIEARIAATTAYSKPKRGHRKTASFGNILDVPEIVISGNGQPRRRSIQDLTVTGTEPGQVSSRSSSPSVRMITTSGPTSEKPTRSHPWTPDDSTDTNGSDNSIPMAYLTLDHQLQARTSCRTGPG

SEQ ID NO: 48990 - protein, 345 aa, Homo sapiens
MQPKALIHRDLKPPNLLLVAGGTVLKICDFGTACDIQTHMTNNKGSAAWMAPEVFEGSNYSEKCDVFSWGIILWEVITRRKPFDEIGGPAFRIMWAVHNGTRPPLIKNLPKPIESLMTRCWSKDPSQRPSMEEIVKIMTHLMRYFPGADEPLQYPCQYSDEGQSNSATSTGSFMDIASTNTSNKSDTNMEQVPATNDTIKRLESKLLKNQAKQQSESGRLSLGASRGSSVESLPPTSEGKRMSADMSEIEARIAATTGNGQPRRRSIQDLTVTGTEPGQVSSRSSSPSVRMITTSGPTSEKPTRSHPWTPDDSTDTNGSDNSIPMAYLTLDHQLQARTSCRTGPG

SEQ ID NO: 48991 - protein, 435 aa, Homo sapiens
MLRPNTATFGAPFGLDLLPELHQRTIHLGKNFDFQKSDRINSETNTKNLKSVEITMKPSKASELNLDELPPLNNYLHVFYYSWYGNPQFDGKYIHWNHPVLEHWDPRIAKNYPQGRHNPPDDIGSSFYPELGSYSSRDPSVIETHMRQMRSASIGVLALSWYPPDVNDENGEPTDNLVPTILDKAHKYNLKVTFHIEPYSNRDDQNMYKNVKYIIDKYGNHPAFYRYKTKTGNALPMFYVYDSYITKPEKWANLLTTSGSRSIRNSPYDGLFIALLVEEKHKYDILQSGFDGIYTYFATNGFTYGSSHQNWASLKLFCDKYNLIFIPSVGPGYIDTSIRPWNTQNTRNRINGKYYEIGLSAALQTRPSLISITSFNEWHEGTQIEKAVPKRTSNTVYLDYRPHKPGLYLELTRKWSEKYSKERATYALDRQLPVS

SEQ ID NO: 48992 - protein, 960 aa, Homo sapiens
MSDQCPCLCIKELWVLLIHLLDHRSKWFVSESFWNWLNKLLKTLLEKSSDRRRSSMPVIQSRDPLGFSWWIITHVASFYKFDRHGVPDEMRKVESNWNFVEELLKKSISVQGVILEEQLRMYLHCCLTLCDFWEPNIAIVTILWEYYSKNLNSSFSISWLPFKGLANTMKSPLSMLEMVKTCCCDKQDQELYKSSSSYTIFLCILAKVVKKAMKSNGPHPWKQVKGRIYSKFHQKRMEELTEVGLQNFFSLFLLLAAVAEVEDVASHVLDLLNFLKPAFVTSQRALIWKGHMAFLLMYAQKNLDIGVLAEKFSCAFREKAKEFLVSKNEEMVQRQTIWTLLSIYIDGVQEVFETSYCLYPSHEKLLNDGFSMLLRACRESELRTVLSFLQAVLARIRSMHQQLCQELQRDNVDLFVQSSLSAKERHLAAVASALWRHFFSFLKSQRMSQVVPFSQLADAAADFTLLAMDMPSTAPSDFQPQPVISIIQLFGWDDIICPQVVARYLSHVLQNSTLCEALSHSGYVSFQALTVRSWIRCVLQMYIKNLSGPDDLLIDKNLEEAVEKEYMKQLVKLTRLLFNLSEVKSIFSKAQVEYLSISEDPKKALVRFFEAVGVTYGNVQTLSDKSAMVTKSLEYLGEVLKYIKPYLGKKVFSAGLQLTYGMMGILVKSWAQIFATSKAQKLLFRIIDCLLLPHAVLQQEKELPAPMLSAIQKSLPLYLQGMCIVCCQSQNPNAYLNQLLGNVIEQYIGRFLPASPYVSDLGQHPVLLALRNTATIPPISSLKKCIVQVIRKSYLEYKGSSPPPRLASILAFILQLFKETNTDIYEVELLLPGILKCLVLVSEPQVKRLATENLQYMVKACQVGSEEEPSSQLTSVFRQFIQDYGMRYYYQVYSILETVATLDQQVVIHLISTLTQSLKDSEQKWGLGRNIAQREAYSKLLSHLGQMGQDEMQRLENDNT

SEQ ID NO: 48993 - protein, 197 aa, Homo sapiens
MAPTCVFLASKVEEFGVVSNTRLIAAATSVLKTRFSYAFPKEFPYRMNHILECEFYLLELMDCCLIVYHPYRPLLQYVQDMGQEDMLLPLAWRIVNDTYRTDLCLLYPPFMIALACLHVACVVQQKDARQWFAELSVDMEKILEIIRVILKLYEQWKNFDERKEMATILSKMPKPKPPPNRNSLSDSPLVAGPEAAR

SEQ ID NO: 48994 - protein, 715 aa, Homo sapiens
MRVVFPEGLGEAWGHSSRTSPLDNVGRELGSHLLQTLDGFIFVVAPDGKIMYISETASVHLGLSQVELTGNSIYEYIHPADHDEMTAVLTAHQPYHSHFVQEYEIERSFFLRMKCVLAKRNAGLTCGGYKVIHCSGYLKIRQYSLDMSPFDGCYQNVGLVAVGHSLPPSAVTEIKLHSNMFMFRASLDMKLIFLDSRVAELTGYEPQDLIEKTLYHHVHGCDTFHLRCAHHLLLVKGQVTTKYYRFLAKHGGWVWVQSYATIVHNSRSSRPHCIVSVNYVLTDTEYKGLQLSLDQISASKPAFSYTSSSTPTMTDNRKGAKSRLSSSKSKSRTSPYPQYSGFHTERSESDHDSQWGGSPLTDTASPQLLDPADRPGSQHDASCAYRQFSDRSSLCYGFALDHSRLVEERHFHTQACEGGRCEAGRYFLGTPQAGREPWWGSRAALPLTKASPESREAYENSMPHIASVHRIHGRGHWDEDSVVSSPDPGSASESGDRYRTEQYQSSPHEPSKIETLIRATQQMIKEEENRLQLRKAPSDQLASINGAGKKHSLCFANYQQPPPTGEVCHGSALANTSPCDHIQQREGKMLSPHENDYDNSPTALSRISSPNSDRISKSSLILAKDYLHSDISPHQTAGDHPTVSPNCFGSHRQYFDKHAYTLTGYALEHLYDSETIRNYSLGCNGSHFDVTSHLRMQPDPAQGHKGTSVIITNGS

SEQ ID NO: 48995 - protein, 12 aa, Homo sapiens
MGLGSGDSFLSL

SEQ ID NO: 48996 - protein, 174 aa, Homo sapiens
MRQEDISEIWFEYEGTPLKWHYPIGLLFDLLASSSALPWNITVHFKSFPEKDLLHCPSKDAIEAHFMSCMKEADALKHKSQVINEMQKKDHKQLWMGLQNDRFDQFWAINRKLMEYPAEENGFRYIPFRIYQVTAVWVGIQRFQASEEESEDEEFLATLTGGERSGKARKQWTQ

SEQ ID NO: 48997 - protein, 103 aa, Homo sapiens
MLSPNDKMLGKLDPFYQPSVSKQKTSAEIISEARNALRTVRTQRPFTPQEAQRKLFGPASSRTSENRPPSSFRNRKFQHLPPERRIPAFPFLSPQWTLRRLEE

SEQ ID NO: 48998 - protein, 246 aa, Homo sapiens [sequence omitted]

SEQ ID NO: 48999 - protein, 633 aa, Homo sapiens
MFAEEGEIGQSIYMLEGMVADTFGILLEFIYTGYLHASEKSTEQILATAQFLKVYDLVKAYTDFQNNHSSPKPTTLNTAGAPVVVISNKKNDPPKRKRGRPKKVNTLQEEKSELAAEEEIQLRVNNSVQNRQNFVVKGDSGVLNEQIAAKEKEESEPTCEPSREEEMPVEKDENYDPKTEDGQASQSRYSKRRIWRSVKLKDYKLVGDQEDHGSAKRICGRRKRPGGPEARCKDCGKVFKYNHFLAIHQRSHTGERPFKCNECGKGFAQKHSLQVHTRMHTGERPYTCTVCSKALTTKHSLLEHMSLHSGQKSFTCDQCGKYFSQNRQLKSHYRVHTGHSLPECKDCHRKFMDVSQLKKHLRTHTGEKPFTCEICGKSFTAKSSLQTHIRIHRGEKPYSCGICGKSFSDSSAKRRHCILHTGKKPFSCPECNLQFARLDNLKAHLKIHSKEKHASDASSISGSSNTEEVRNILQLQPYQLSTSGEQEIQLLVTDSVHNINFMPGPSQGISIVTAESSQNMTADQAANLTLLTQQPEQLQNLILSAQQEQTEHIQSLNMIESQMGPSQTEPVHVITLSKETLEHLHAHQEQTEELHLATSTSDPAQHLQLTQEPGPPPPTHHVPQPTPLGQEQS

SEQ ID NO: 49000 - protein, 542 aa, Homo sapiens [sequence omitted]

SEQ ID NO: 49001 - protein, 451 aa, Homo sapiens
MTHNLLLNYGLYRKMEIYRPHKATAEEMTKYHSDEYIKFLRSIRPDNMSEYSKQMQRFNVGEDCPVFDGLFEFCQLSTGGSVAGAVKLNRQQTDMAVNWAGGLHHAKKSEASGFCYVNDIVLAILELLKYHQRVLYIDIDIHHGDGVEEAFYTTDRVMTVSFHKYGEYFPGTGDLRDIGAGKGKYYAVNFPMRDGIDDESYGQIFKPIISKVMEMYQPSAVVLQCGADSLSGDRLGCFNLTVKGHAKCVEVVKTFNLPLLMLGGGGYTIRNVARCWTYETAVALDCEIPNELPYNDYFEYFGPDFKLHISPSNMTNQNTPEYMEKIKQRLFENLRMLPHAPGVQMQAIPEDAVHEDSGDEDGEDPDKRISIRASDKRIACDEEFSDSEDEGEGGRRNVADHKKGAKKARIEEDKKETEDKKTDVKEEDKSKDNSGEKTDTKGTKSEQLSNP

SEQ ID NO: 49002 - protein, 535 aa, Homo sapiens
MCFHIETAHFEQNTLERNFERINTVQYGTSDNKKDNTLQCGMEVNSSILSGCASNHPKNSAQNLTKDSTLKHEGFYSENLTESRKFLKSREKQSSLTEIKGSVYETTYSPPECPFCGKIEEHSEDMETHVKTKHANLLDIPLEDCDQPLYDCPMCGLICTNYHILQEHVDLHLEENSFQQGMDRVQCSGDLQLAHQLQQEEDRKRRSEESRQEIEEFQKLQRQYGLDNSGGYKQQQLRNMEIEVNRGRMPPSEFHRRKADMMESLALGFDDGKTKTSGIIEALHRYYQNAATDVRRVWLSSVVDHFHSSLGDKGWGCGYRNFQMLLSSLLQNDAYNDCLKGMLIPCIPKIQSMIEDAWKEGFDPQGASQLNNRLQGTKAWIGACEVYILLTSLRVKCHIVDFHKSTGPLGTHPRLFEWILNYYSSEGEGSPKVVCTSKPPIYLQHQGHSRTVIGIEEKKNRTLCLLILDPGCPSREMQKLLKQDIEASSLKQLRKSMGNLKHKQYQILAVEGALSLEEKLARRQASQVFTAEKIP

SEQ ID NO: 49003 - protein, 385 aa, Homo sapiens
MTSLSSCFAQLCHKAQSVSQINHKLEAQLVDLKSELTETQAEKVVLEKEVHDQLLQLHSIQLQLHAKTGQSADSGTIKAKLERELEANKKEKMKEAQLEAEVKLLRKENEALRRHIAVLQAEVYGARLAAKYLDKELAGRVQQIQLLGRDMKGPAHDKLWNQLEAEIHLHRHKTVIRACRGRNDLKRPMQAPPGHDQDSLKKSQGVGPIRKVLLLKEDHEGLGISITGGKEHGVPILISEIHPGQPADRCGGLHVGDAILAVNGVNLRDTKHKEAVTILSQQRGEIEFEVVYVAPEVDSDDENVEYEDESGHRYRLYLDELEGGGNPGASCKDTSGEIKVLQGFNKKAVTDTHENGDLGTASETPLDDGASKLDDLHTLYHKKSY

SEQ ID NO: 49004 - protein, 393 aa, Homo sapiens
MTSLSSCFAQLCHKAQSVSQINHKLEAQLVDLKSELTETQAEKVVLEKEVHDQLLQLHSIQLQLHAKTGQSADSGTIKAKLSGPSVEELERELEANKKEKMKEAQLEAEVKLLRKENEALRRHIAVLQAEVYGARLAAKYLDKELAGRVQQIQLLGRDMKGPAHDKLWNQLEAEIHLHRHKTVIRACRGRNDLKRPMQAPPGHDQDSLKKSQGVGPIRKVLLLKEDHEGLGISITGGKEHGVPILISEIHPGQPADRCGGLHVGDAILAVNGVNLRDTKHKEAVTILSQQRGEIEFEVVYVAPEVDSDDENVEYEDESGHRYRLYLDELEGGGNPGASCKDTSGEIKVLQGFNKKAVTDTHENGDLGTASETPLDDGASKLDDLHTLYHKKSY

SEQ ID NO: 49005 - protein, 596 aa, Homo sapiens
MLRLEDKEINKKRSSTLDCKYKFESCSKEDFRASSSTLRRQPVDMTYSALPESKPIMTSSEAFEPPKYLMLGQQAVGGVPIQPSVRTQMWLTEQLRTNPLEGRNTEDSYSLAPWQQQQIEDFRQGSETPMQVLTGSSRQSYSPGYQDFSKWESMLKIKEGLLRQKEIVIDRQKQQITHLHERIRDNELRAQHAMLGHYVNCEDSYVASLQPQYENTSLQTPFSEESVSHSQQGEFEQKLASTEKEVLQLNEFLKQRLSLFSEEKKKLEEKLKTRDRYISSLKKKCQKESEQNKEKQRRIETLEKYLADLPTLDDVQSQSLQLQILEEKNKNLQEALIDTEKKLEEIKKQCQDKETQLICQKKKEKELVTTVQSLQQKVERCLEDGIRLPMLDAKQLQNENDNLRQQNETASKIIDSQQDEIDRMILEIQSMQGKLSKEKLTTQKMMEELEKKERNVQRLTKALLENQRQTDETCSLLDQGQEPDQSRQQTVLSKRPLFDLTVIDQLFKEMSCCLFDLKALCSILNQRAQGKEPNLSLLLGIRSMNCSAEETENDHSTETLTKKLSDVCQLRRDIDELRTTISDRYAQDMGDNCITQ

SEQ ID NO: 49006 - protein, 1084 aa, Homo sapiens
MFPSEVLTIFDSALRRSALTILQSLSQPEAVSMKQNLHARISGLPVCPELVREHIPKTKDVGHFLSVTGTVIRTSLVKVLEFERDYMCNKCKHVFVIKADFEQYYTFCRPSSCPSLESCDSSKFTCLSGLSSSPTRCRDYQEIKIQEQVQRLSVGSIPRSMKVILEDDLVDSCKSGDDLTIYGIVMQRWKPFQQDVRCEVEIVLKANYIQVNNEQSSGIIMDEEVQKEFEDFWEYYKSDPFAGRNVILASLCPQVFGMYLVKLAVAMVLAGGIQRTDATGTRVRGESHLLLVGDPGTGKSQFLKYAAKITPRSVLTTGIGSTSAGLTVTAVKDSGEWNLEAGALVLADAGLCCIDEFNSLKEHDRTSIHEAMEQQTISVAKAGLVCKLNTRTTILAATNPKGQYDPQESVSVNIALGSPLLSRFDLILVLLDTKNEDWDRIISSFILENKGYPSKSEKLWSMEKMKTYFCLIRNLQPTLSDVGNQVLLRYYQMQRQSDCRNAARTTIRLLESLIRLAEAHARLMFRDTVTLEDAITVVSVMESSMQGGALLGGVNALHTSFPENPGEQYQRQCELILEKLELQSLLSEELRRLERLQNQSVHQSQPRVLEVETTPGSLRNGPGEESNFRTSSQQEINYSTHIFSPGGSPEGSPVLDPPPHLEPNRSTSRKHSAQHKNNRDDSLDWFDFMATHQSEPKNTVVVSPHPKTSGENMASKISNSTSQGKEKSEPGQRSKVDIGLLPSPGETGVPWRADNVESNKKKRLALDSEAAVSADKPDSVLTHHVPRNLQKLCKERAQKLCRNSTRVPAQCTVPSHPQSTPVHSPDRMLDSPKRKRPKSLAQVEEPAIENVKPPGSPVAKLAKFTFKQKSKLIHSFEDHSHVSPGATKIAVHSPKISQRRTRRDAALPVKRPGKLTSTPGNQISSQPQGETKEVSQQPPEKHGPREKVMCAPEKRIIQPELELGNETGCAHLTCEGDKKEEVSGSNKSGKVHACTLARLANFCFTPPSESKSKSPPPERKNRGERGPSSPPTTTAPMRVSKRKSFQLRGSTEKLIVSKESLFTLPELGDEAFDCDWDEEMRKKS

SEQ ID NO: 49007 - protein, 1224 aa, Homo sapiens
MEKCTSDRNQGEECGYDTVVQQVTKRTQESKEYKEMMHYLKNIMIAVVESMINKFEEDETRNQERQKKIQKEKSHSYRTDNCSDSDSSLNQSYKFCQGKLQLILDQLDPGQPKEVRYEALQTLCSAPPSDVLNCENWTTLCEKLTVSLSDPDPVFSDRILKFCAQTFLLSPLHMTKEIYTSLAKYLESYFLSRENHIPTLSAGVDITNPNMTRLLKKVRLLNEYQKEAPSFWIRHPEKYMEEIVESTLSLLTVKHNQSHVVSQKILDPIYFFALVDTKAVWFKKWMHAHYSRTTVLRLLETKYKSLVTTAIQQCVQYFEMCKTRKADETLGHSKHCRNKQKTFYYLGQELQYIYFIHSLCLLGRLLIYKQGRKLFPIKLKNKKGLVSLIDLLVLFTQLIYYSPSCPKMTSAAHSENYSPASMVTEVLWILSDQKECAVECLYNNIVIETLLQPIHNLMKGNEASPNCSETALIHIAGILARIASVEEGLILLLYGANMNSSEESPTGAHIIAQFSKKLLDEDISIFSGSEMLPVVKGAFISVCRHIYSTCEGLQVLITYNLHESIAKAWKKTSLLSERIPTPVEGSDSVSSVSQESQNIMAWEDNLLDDLLHFAATPKGLLLLQRTGAINECVTFIFNRYAKKLQVSRHKKFGYGVLVTRVASTAAGGIALKKSGFINELITELWSNLEYGRDDVRVTHPRTTPVDPIDRSCQKSFLALVNLLSYPAIYELVRNQDLPNKTEYSLREVPTCVIDIIDRLIILNSEAKIRSLFNYEQSHIFGLRLLSVICCDLDTLLLLEAQYQVSEMLLNAQEENILEISESHRDFIIDGLSVERNHVLVRINLVGGPLERILPPRLLEKSDNPYPWPMFSSYPLPNCYLSDITRNAGIKQDNDLDKLLLCLKISDKQTEWIENCQRQFCKMMKAKPDIISGEALIELLEKFVLHLTESPSECYFPSVEYTATDANVKNESLSSVQQLGIKMTVRYGKFLSLLKDGAENDLTWVLKHCERFLKQQQTSIKSSLLCLQGNYAGHDWFVSSLFMIMLGDKEKTFQFLHQFSRLLTSAFLWLPRLHISSYLPNDTVESGIHPVYFCSTHYIEMLLKAELPLVFSAFHMSGFAPSQICLQWITQCFWNYLDWIEICHYIATCVFLGPDYQVYICIAVFKHLQQDILQHTQTQDLQVFLKEEALHGFRVSDYFEYMEILEQNYRTVLLRDMRNIRLQST

SEQ ID NO: 49008 - protein, 137 aa, Homo sapiens
MLSEEEKEELKAELVQLEDEITTLRQVLSAKERHLVEIKQKLGMNLMNELKQNFSKSWHDMQTTTAYKKTHETLSHAGQKATAAFSNVGTAISKKFGDMSYSIRHSISMPAMRNSPTFKSFEERVETTVTSLKVQMK

SEQ ID NO: 49009 - protein, 1368 aa, Homo sapiens
MPQGSYMIVDSSDHDPGEKARLQLPTMKENDTHCIDFSYLLYSQKGLNPGTLNILVRVNKGPLANPIWNVTGFTGRDWLRAELAVSTFWPNEYQVIFEAEVSGGRSGYIAIDDIQVLSYPCDKSPHFLRLGDVEVNAGQNATFQCIATGRDAVHNKLWLQRRNGEDIPVAQTKNINHRRFAASFRLQEVTKTDQDLYRCVTQSERGSGVSNFAQLIVREPPRPIAPPQLLGVGPTYLLIQLNANSIIGDGPIILKEVEYRMTSGSWTETHAVNAPTYKLWHLDPDTEYEIRVLLTRPGEGGTGLPGPPLITRTKCAEPMRTPKTLKIAEIQARRIAVDWESLGYNITRCHTFNVTICYHYFRGHNESKADCLDMDPKAPQHVVNHLPPYTNVSLKMILTNPEGRKESEETIIQTDEDVPGPVPVKSLQGTSFENKIFLNWKEPLDPNGIITQYEISYSSIRSFDPAVPVAGPPQTVSNLWNSTHHVFMHLHPGTTYQFFIRASTVKGFGPATAINVTTNISAPTLPDYEGVDASLNETATTITVLLRPAQAKGAPISAYQIVVEELHPHRTKREAGAMECYQVPVTYQNAMSGGAPYYFAAELPPGNLPEPAPFTVGDNRTYQGFWNPPLAPRKGYNIYFQAMSSVEKETKTQCVRIATKAATEEPEVIPDPAKQTDRVVKIAGISAGILVFILLLLVVILIVKKSKLAKKRKDAMGNTRQEMTHMVNAMDRSYADQSTLHAEDPLSITFMDQHNFSPRYENHSATAESSRLLDVPRYLCEGTESPYQTGQLHPAIRVADLLQHINLMKTSDSYGFKEEYESFFEGQSASWDVAKKDQNRAKNRYGNIIAYDHSRVILQPVEDDPSSDYINANYIDGYQRPSHYIATQGPVHETVYDFWRMIWQEQSACIVMVTNLVEVGRVKCYKYWPDDTEVYGDFKVTCVEMEPLAEYVVRTFTLERRGYNEIREVKQFHFTGWPDHGVPYHATGLLSFIRRVKLSNPPSAGPIVVHCSAGAGRTGCYIVIDIMLDMAEREGVVDIYNCVKALRSRRINMVQTEEQYIFIHDAILEACLCGETAIPVCEFKAAYFDMIRIDSQTNSSHLKDEFQTLNSVTPRLQAEDCSIACLPRNHDKNRFMDMLPPDRCLPFLITIDGESSNYINAALMDSYRQPAAFIVTQYPLPNTVKDFWRLVYDYGCTSIVMLNEVDLSQGCPQYWPEEGMLRYGPIQVECMSCSMDCDVINRIFRICNLTRPQEGYLMVQQFQYLGWASHREVPGSKRSFLKLILQVEKWQEECEEGEGRTIIHCLNGGGRSGMFCAIGIVVEMVKRQNVVDVFHAVKTLRNSKPNMVEAPEQYRFCYDVALEYLESS

SEQ ID NO: 49010 - protein, 1369 aa, Homo sapiens
MPQGSYMIVDSSDHDPGEKARLQLPTMKENDTHCIDFSYLLYSQKGLNPGTLNILVRVNKGPLANPIWNVTGFTGRDWLRAELAVSTFWPNEYQVIFEAEVSGGRSGYIAIDDIQVLSYPCDKSPHFLRLGDVEVNAGQNATFQCIATGRDAVHNKLWLQRRNGEDIPVAQTKNINHRRFAASFRLQEVTKTDQDLYRCVTQSERGSGVSNFAQLIVREPPRPIAPPQLLGVGPTYLLIQLNANSIIGDGPIILKEVEYRMTSGSWTETHAVNAPTYKLWHLDPDTEYEIRVLLTRPGEGGTGLPGPPLITRTKCAEPMRTPKTLKIAEIQARRIAVDWESLGYNITRCHTFNVTICYHYFRGHNESKADCLDMDPKAPQHVVNHLPPYTNVSLKMILTNPEGRKESEETIIQTDEDVPGPVPVKSLQGTSFENKIFLNWKEPLDPNGIITQYEISYSSIRSFDPAVPVAGPPQTVSNLWNSTHHVFMHLHPGTTYQFFIRASTVKGFGPATAINVTTNISAPTLPDYEGVDASLNETATTITVLLRPAQAKGAPISAYQIVVEELHPHRTKREAGAMECYQVPVTYQNAMSGGAPYYFAAELPPGNLPEPAPFTVGDNRTYQGFWNPPLAPRKGYNIYFQAMSSVEKETKTQCVRIATKAAATEEPEVIPDPAKQTDRVVKIAGISAGILVFILLLLVVILIVKKSKLAKKRKDAMGNTRQEMTHMVNAMDRSYADQSTLHAEDPLSITFMDQHNFSPRYENHSATAESSRLLDVPRYLCEGTESPYQTGQLHPAIRVADLLQHINLMKTSDSYGFKEEYESFFEGQSASWDVAKKDQNRAKNRYGNIIAYDHSRVILQPVEDDPSSDYINANYIDGYQRPSHYIATQGPVHETVYDFWRMIWQEQSACIVMVTNLVEVGRVKCYKYWPDDTEVYGDFKVTCVEMEPLAEYVVRTFTLERRGYNEIREVKQFHFTGWPDHGVPYHATGLLSFIRRVKLSNPPSAGPIVVHCSAGAGRTGCYIVIDIMLDMAEREGVVDIYNCVKALRSRRINMVQTEEQYIFIHDAILEACLCGETAIPVCEFKAAYFDMIRIDSQTNSSHLKDEFQTLNSVTPRLQAEDCSIACLPRNHDKNRFMDMLPPDRCLPFLITIDGESSNYINAALMDSYRQPAAFIVTQYPLPNTVKDFWRLVYDYGCTSIVMLNEVDLSQGCPQYWPEEGMLRYGPIQVECMSCSMDCDVINRIFRICNLTRPQEGYLMVQQFQYLGWASHREVPGSKRSFLKLILQVEKWQEECEEGEGRTIIHCLNGGGRSGMFCAIGIVVEMVKRQNVVDVFHAVKTLRNSKPNMVEAPEQYRFCYDVALEYLESS

SEQ ID NO: 49011 - protein, 177 aa, Homo sapiens
MPQGSYMIVDSSDHDPGEKARLQLPTMKENDTHCIDFSYLLYSQKGLNPGTLNILVRVNKGPLANPIWNVTGFTGRDWLRAELAVSTFWPNEYQVIICTFLVYVLMSSVLTICVIHRCKYASHGNERLPSCLPHPHYWGSVIHRYTYASHGNERLPLFLPHPVDEEVFGDIGTKPSN

SEQ ID NO: 49012 - protein, 1284 aa, Homo sapiens
MAVETGLLPPRLVCESLINSDTLEWERTQLWALTFKLVRKIIGGVDYKGVRDLLKVILEKILTIPNTVSSAVVQQLLAAREVIAYILERNACLLPAYFAVTEIRKLYPEGKLPHWLLGNLVSDFVDTFRPTARINSICGRCSLLPVVNNSGAICNSWKLDPATLRFPLKGLLPYDKDLFEPQTALLRYVLEQPYSRDMVCNMLGLNKQHKQRCPVLEDQLVDLVVYAMERSETEEKFDDGGTSQLLWQHLSSQLIFFVLFQFASFPHMVLSLHQKLAGRGLIKGRDHLMWVLLQFISGSIQKNALADFLPVMKLFDLLYPEKEYIPVPDINKPQSTHAFAMTCIWIHLNRKAQNDNSKLQIPIPHSLRLHHEFLQQSLRNKSLQMNDYKIALLCNAYSTNSECFTLPMGALVETIYGNGIMRIPLPGTNCMASGSITPLPMNLLDSLTVHAKMSLIHSIATRVIKLAHAKSSVALAPALVETYSRLLVYMEIESLGIKGFISQLLPTVFKSHAWGILHTLLEMFSYRMHHIQPHYRVQLLSHLHTLAAVAQTNQNQLHLCVESTALRLITALGSSEVQPQFTRFLSDPKTVLSAESEELNRALILTLARATHVTDFFTGSDSIQGTWCKDILQTIMSFTPHNWASHTLSCFPGPLQAFFKQNNVPQESRFNLKKNVEEEYRKWKSMSNENDIITHFSMQGSPPLFLCLLWKMLLETDHINQIGYRVLERIGARALVAHVRTFADFLVYEFSTSAGGQQLNKCIEILNDMVWKYNIVTLDRLILCLAMRSHEGNEAQVCYFIIQLLLLKPNDFRNRVSDFVKENSPEHWLQNDWHTKHMNYHKKYPEKLYFEGLAEQVDPPVQIQSPYLPIYFGNVCLRFLPVFDIVIHRFLELLPVSKSLETLLDHLGGLYKFHDRPVTYLYNTLHYYEMHLRDRAFLKRKLVHAIIGSLKDNRPQGWCLSDTYLKCAMNAREENPWVPDDTYYCRLIGRLVDTMAGKSPGPFPNCDWRFNEFPNPAAHALHVTCVELMALAVSGKEVGNALLNVVLKSQPLVPRENITAWMNAIGLIITALPEPYWIVLHDRIVSVISSPSLTSETEWVGYPFRLFDFTACHQSYSEMSCSYTLALAHAVWHHSSIGQLSLIPKFLTEVLLPIVKTEFQLLYVYHLVGPFLQRFQQERTRCMIEIGVAFYDMLLNVDQCSTHLNYMDPICDFLYHMKYMFTGDSVKEQVEKIICNLKPALKLRLRFITHISKMEPAAVPPQAMNSGSPAPQSNQVPVSLPVTQ

SEQ ID NO: 49013 - protein, 408 aa, Homo sapiens [sequence omitted]

SEQ ID NO: 49014 - protein, 121 aa, Homo sapiens
MDVNTALQEVLKTALIHDGLARGIREAAKALDKRQAHLCVLASNCDEPMYVKLVEALCAEHQINLIKVDDNKKLGEWVGLCKIDREGKPRKVVGCSCVVVKDYGKESQAKDVIEEYFKCKK

SEQ ID NO: 49015 - protein, 66 aa, Homo sapiens [sequence omitted]

SEQ ID NO: 49016 - protein, 1170 aa, Homo sapiens
MREKKKLKKKLVRSEENISPDTIRSNLHYMKETTSDDPDTIRSNLPHIKETTSDDVSAANTNNLKKSTRVTKNKLRNTQLATENPNGDASVEEDKQGKPNKKVIKTVPQLTTQDLKPETPENKVDSTHQKTHTKPQPGVDHQKSEKANEGREETDLEEDEELMQAYQCHVTEEMAKEIKRKIRKKLKEQLTYFPSDTLFHDDKLSSEKRKKKKEVPVFSKAETSTLTISGDTVEGEQKKESSVRSVSSDSHQDDEISSMEQSTEDSMQDDTKPKPKKTKKKTKAVADNNEDVDGDGVHEITSRDSPVYPKCLLDDDLVLGVYIHRTDRLKSDFMISHPMVKIHVVDEHTGQYVKKDDSGRPVSSYYEKENVDYILPIMTQPYDFKQLKSRLPEWEEQIVFNENFPYLLRGSDESPKVILFFEILDFLSVDEIKNNSEVQNQECGFRKIAWAFLKLLGANGNANINSKLRLQLYYPPTKPRSPLSVVEAFEWWSKCPRNHYPSTLYVTVRGLKVPDCIKPSYRSMMALQEEKGKPVHCERHHESSSVDTEPGLEESKEVIKWKRLPGQACRIPNKHLFSLNAGERGCFCLDFSHNGRILAAACASRDGYPIILYEIPSGRFMRELCGHLNIIYDLSWSKDDHYILTSSSDGTARIWKNEINNTNTFRVLPHPSFVYTAKFHPAVRELVVTGCYDSMIRIWKVEMREDSAILVRQFDVHKSFINSLCFDTEGHHMYSGDCTGVIVVWNTYVKINDLEHSVHHWTINKEIKETEFKGIPISYLEIHPNGKRLLIHTKDSTLRIMDLRILVARKFVGAANYREKIHSTLTPCGTFLFAGSEDGIVYVWNPETGEQVAMYSDLPFKSPIRDISYHPFENMVAFCAFGQNEPILLYIYDFHVAQQEAEMFKRYNGTFPLPGIHQSQDALCTCPKLPHQGSFQIDEFVHTESSSTKMQLVKQRLETVTEVIRSCAAKVNKNLSFTSPPAVSSQQSKLKQSNMLTAQEILHQFGFTQTGIISIERKPCNHQVDTAPTVVALYDYTANRSDELTIHRGDIIRVFFKDNEDWWYGSIGKGQEGYFPANHVASETLYQELPPEIKERSPPLSPEEKTKIEKSPAPQKQSINKNKSQDFRLGSESMTHSEMRKEQSHEDQGHIMDTRMRKNKQAGRKVTLIE

SEQ ID NO: 49017 - protein, 454 aa, Homo sapiens
MVKLVWKSKSELQATKQRGILDNEDALRSFPGDIRLRGQTGVRAERRGSYPFIDFRLLNSTTYSGEIGTKKKVKRLLSFQRYFHASRLLRGIIPQAPLHLLDEDYLGQARHMLSKVGMWDFDIFLFDRLTNGNSLVTLLCHLFNTHGLIHHFKLDMVTLHRFLVMVQEDYHSQNPYHNAVHAADVTQAMHCYLKEPKLASFLTPLDIMLGLLAAAAHDVDHPGVNQPFLIKTNHHLANLYQNMSVLENHHWRSTIGMLRESRLLAHLPKEMTQDIEQQLGSLILATDINRQNEFLTRLKAHLHNKDLRLEDAQDRHFMLQIALKCADICNPCRIWEMSKQWSERVCEEFYRQGELEQKFELEISPLCNQQKDSIPSIQIGFMSYIVEPLFREWAHFTGNSTLSENMLGHLAHNKAQWKSLLPRQHRSRGSSGSGPDHDHAGQGTESEEQEGDSP

SEQ ID NO: 49018 - protein, 130 aa, Homo sapiens [sequence omitted]

SEQ ID NO: 49019 - protein, 743 aa, Homo sapiens
MELCGATRLGYFGRSQFYIALKLVAVAQSGFPLRVESINTVKDLPLPRFVASKNEQESRHAASYSSDSENQGSYSGVIPPPPGRGQVKKGSVSHDTVQPRTSADAQEPASPVVSPQQSPPTSPHTWRKHSRHPSGGNSERPLAGPGPFWSPFGEAQSGSSAGDAVWSGHSPPPPQENWVSFADTPPTSTLLTMHPASVQDQTTVRTVASATTAIEIRRQSSSYDDPWKITDEQRQYYVNQFKTIQPDLNGFIPGSAAKEFFTKSKLPILELSHIWELSDFDKDGALTLDEFCAAFHLVVARKNGYDLPEKLPESLMPKLIDLEDSADVGDQPGEVGYSGSPAEAPPSKSPSMPSLNQTWPELNQSSEQWETFSERSSSSQTLTQFDSNIAPADPDTAIVHPVPIRMTPSKIHMQEMELKRTGSDHTNPTSPLLVKPSDLLEENKINSSVKFASGNTVDGYSSSDSFTSDPEQIGSNVTRQRSHSGTSPDNTAPPPPPPRPQPSHSRSSSLDMNRTFTVTTGQQQAGVVAHPPAVPPRPQPSQAPGPAVHRPVDADGLITHTSTSPQQIPEQPNFADFSQFEVFAASNVNDEQDDEAEKHPEVLPAEKASDPASSLRVAKTDSKTEEKTAASAPANVSKGTTPLAPPPKPVRRRLKSEDELRPEVDEHTQKTGVLAAVLASQPSIPRSVGKDKKAIQASIRRNKETNTVLARLNSELQQQLKDVLEERISLEVQLEQLRPFSHL

SEQ ID NO: 49020 - protein, 744 aa, Homo sapiens
MELCGATRLGYFGRSQFYIALKLVAVAQSGFPLRVESINTVKDLPLPRFVASKNEQESRHAASYSSDSENQGSYSGVIPPPPGRGQVKKGSVSHDTVQPRTSADAQEPASPVVSPQQSPPTSPHTWRKHSRHPSGGNSERPLAGPGPFWSPFGEAQSGSSAGDAVWSGHSPPPPQENWVSFADTPPTSTLLTMHPASVQDQTTVRTVASATTAIEIRRQSSSYDDPWKITDEQRQYYVNQFKTIQPDLNGFIPGSAAKEFFTKSKLPILELSHIWELSDFDKDGALTLDEFCAAFHLVVARKNGYDLPEKLPESLMPKLIDLEDSADVGDQPGEVGYSGSPAEAPPSKSPSMPSLNQTWPELNQSSEQWETFSERSSSSQTLTQFDSNIAPADPDTAIVHPVPIRMTPSKIHMQEMELKRTGSDHTNPTSPLLVKPSDLLEENKINSSVKFASGNTVADGYSSSDSFTSDPEQIGSNVTRQRSHSGTSPDNTAPPPPPPRPQPSHSRSSSLDMNRTFTVTTGQQQAGVVAHPPAVPPRPQPSQAPGPAVHRPVDADGLITHTSTSPQQIPEQPNFADFSQFEVFAASNVNDEQDDEAEKHPEVLPAEKASDPASSLRVAKTDSKTEEKTAASAPANVSKGTTPLAPPPKPVRRRLKSEDELRPEVDEHTQKTGVLAAVLASQPSIPRSVGKDKKAIQASIRRNKETNTVLARLNSELQQQLKDVLEERISLEVQLEQLRPFSHL

SEQ ID NO: 49021 - protein, 162 aa, Homo sapiens
MGQTSVSTLSPQPGSVDGLDKASIANSDGPTAGSQTPPFKRKGKLSTIGKIFKPWKWRKKKTSDKFRETSAVLERKISTRQSREELIRRGVLKELPDQDGDVTVNFENSNGHMIPIGEESTREENVVKSEEGNGSVSEKTPPLEEQAEDKKGKIKTNPYYLL

SEQ ID NO: 49022 - protein, 1659 aa, Homo sapiens
MHEDRRNEPIIISDDDEQPCPGSDTSSAHYIILSDSLKEEVAHRDKKRCSKVVSFSKPIEKEETVGIFSPLSVKLNIVISPYHFDNSWKAFLGELTLQLLPAQSLIENFSERSITLMSSESSNQFLIYVHSKGEDVEKQKKEPMSICDKGILVESSFSGEMLEDLGWLQKKRRIKLYQKPEGNHIIKVGIYLLEAGLAKLDFLSDANSRMKKFNQLMKKVMEKLHNSIIPDVLEEDEDDPESEPEGQDIDELYHFVKQTHQQETQSIQVDVQHPALIPVLRPYQREAVNWMLQQECFRSSPATESALHFLWREIVTSEGLKLYYNPYTGCIIREYPNSGPQLLGGILADEMGLGKTVEVLALILTHTRQDVKQDALTLPEGKVVNYFIPSHYFGGKLKKTEIQNIEFEPKEKVQCPPTRVMILTAVKEMNGKKGVSILSIYKYVSSIYRYDVQRNRSLLKRMLKCLIFEGLVKQIKGHGFSGTFTLGKNYKEEDICDKTKKQAVGSPRKIQKETRKSGNKDTDSEYLPSDTSDDDDDPYYYYYKSRRNRSKLRKKLVPSTKKGKSQPFINPDSQGHCPATSDSGITDVAMSKSTCISEFNQEHETEDCAESLNHADSDVPPSNTMSPFNTSDYRFECICGELDQIDRKPRVQCLKCHLWQHAKCVNYDEKNLKIKPFYCPHCLVAMEPVSTRATLIISPSSICHQWVDEINRHVRSSSLRVLVYQGVKKDGFLQPHFLAEQDIVIITYDVLRSELNYVDIPHSNSEDGRRLRNQKRYMAIPSPLVAVEWWRICLDEAQMVECPTVKAAEMAQRLSGINRWCISGTPVQRGLEDLFGLVVFLGIEPYCVKHWWVRLLYRPYCKKNPQHLYSFIAKILWRSAKKDVIDQIQIPPQTEEIHWLHFSPVERHFYHRQHEVCCQDVVVKLRKISDWALKLSSLDRRTVTSILYPLLRLRQACCHPQAVRGEFLPLQKSTMTMEELLTSLQKKCGTECEEAHRQLVCALNGLAGIHIIKGEYALAAELYREVLRSSEEHKGKLKTDSLQRLHATHNLMELLIARHPGIPPTLRDGRLEEEAKQLREHYMSKCNTEVAEAQQALYPVQQTIHELQRKIHSNSPWWLNVIHRAIEFTIDEELVQRVRNEITSNYKQQTGKLSMSEKFRDCRGLQFLLTTQMEELNKCQKLVREAVKNLEGPPSRNVIESATVCHLRPARLPLNCCVFCKADELFTEYESKLFSNTVKGQTAIFEEMIEDEEGLVDDRAPTTTRGLWAISETERSMKAILSFAKSHRFDVEFVDEGSTSMDLFEAWKKEYKLLHEYWMALRNRVSAVDELAMATERLRVRDPREPKPNPPVLHIIEPHEVEQNRIKLLNDKAVATSQLQKKLGQLLYLTNLEKSQDKTSGGVNPEPCPICARQLGKQWAVLTCGHCFCNECISIIIEQYSVGSHRSSIKCAICRQTTSHKEISYVFTSEKANQEEDIPVKGSHSTKVEAVVRTLMKIQLRDPGAKALVFSTWQDVLDIISKALTDNNMEFAQISRVKTFQENLSAFKRDPQINILLLPLHTGSNGLTIIEATHVLLVEPILNPAHELQAIGRVHRIGQTKPTIVHRFLIKATIEERMQAMLKTAERSHTNSSAKHSEASVLTVADLADLFTKETEELE

SEQ ID NO: 49023 - protein, 84 aa, Homo sapiens
MEEQDCRDGSLGNIDDLAQQYADYYNTCFSDVCERMEELRKRRVSQDLEVEKPDASPTSLQLRSQIEESLGFCSAVSTPEVERK

SEQ ID NO: 49024 - protein, 193 aa, Homo sapiens [sequence omitted]

SEQ ID NO: 49025 - protein, 397 aa, Homo sapiens [sequence omitted]

SEQ ID NO: 49026 - protein, 487 aa, Homo sapiens [sequence omitted]

SEQ ID NO: 49027 - protein, 1013 aa, Homo sapiens
MVIQALQKTNNRSIEAAIEFISKMSYQDPRREQMAAAAARPINASMKPGNVQQSVNRKQSWKGSKESLVPQRHGPPLGESVAYHSESPNSQTDVGRPLSGSGISAFVQAHPSNGQRVNPPPPPQVRSVTPPPPPRGQTPPPRGTTPPPPSWEPNSQTKRYSGNMEYVISRISPVPPGAWQEGYPPPPLNTSPMNPPNQGQRGISSVPVGRQPIIMQSSSKFNFPSGRPGMQNGTGQTDFMIHQNVVPAGTVNRQPPPPYPLTAANGQSPSALQTGGSAAPSSYTNGSIPQSMMVPNRNSHNMELYNISVPGLQTNWPQSSSAPAQSSPSSGHEIPTWQPNIPVRSNSFNNPLGNRASHSANSQPSATTVTAITPAPIQQPVKSMRVLKPELQTALAPTHPSWIPQPIQTVQPSPFPEGTASNVTVMPPVAEAPNYQGPPPPYPKHLLHQNPSVPPYESISKPSKEDQPSLPKEDESEKSYENVDSGDKEKKQITTSPITVRKNKKDEERRESRIQSYSPQAFKFFMEQHVENVLKSHQQRLHRKKQLENEMMRVGLSQDAQDQMRKMLCQKESNYIRLKRAKMDKSMFVKIKTLGIGAFGEVCLARKVDTKALYATKTLRKKDVLLRNQVAHVKAERDILAEADNEWVVRLYYSFQDKDNLYFVMDYIPGGDMMSLLIRMGIFPESLARFYIAELTCAVESVHKMGFIHRDIKPDNILIDRDGHIKLTDFGLCTGFRWTHDSKYYQSGDHPRQDSMDFSNEWGDPSSCRCGDRLKPLERRAARQHQRCLAHSLVGTPNYIAPEVLLRTGYTQLCDWWSVGVILFEMLVGQPPFLAQTPLETQMKVINWQTSLHIPPQAKLSPEASDLIIKLCRGPEDRLGKNGADEIKAHPFFKTIDFSSDLRQQSASYIPKITHPTDTSNFDPVDPDKLWSDDNEEENVNDTLNGWYKNGKHPEHAFYEFTFRRFFDDNGYPYNYPKPIEYEYINSQGSEQQSDEDDQNTGSEIKNRDLVYV

SEQ ID NO: 49028 - protein, 8780 aa, Homo sapiens
MQRLQDEQEIVQKRTFTKWINSHLAKRKPPMVVDDLFEDMKDGVKLLALLEVLSGQKLPCEQGRRMKRIHAVANIGTALKFLEGRKIKLVNINSTDIADGRPSIVLGLMWTIILYFQIEELTSNLPQLQSLSSSASSVDSIVSSETPSPPSKRKVTTKIQGNAKKALLKWVQYTAGKQTGIEVKDFGKSWRSGVAFHSVIHAIRPELVDLETVKGRSNRENLEDAFTIAETELGIPRLLDPEDVDVDKPDEKSIMTYVAQFLKHYPDIHNASTDGQEDDEILPGFPSFANSVQNFKREDRVIFKEMKVWIEQFERDLTRAQMVESNLQDKYQSFKHFRVQYEMKRKQIEHLIQPLHRDGKLSLDQALVKQSWDRVTSRLFDWHIQLDKSLPAPLGTIGAWLYRAEVALREEITVQQVHEETANTIQRKLEQHKDLLQNTDAHKRAFHEIYRTRSVNGIPVPPDQLEDMAERFHFVSSTSELHLMKMEFLELKYRLLSLLVLAESKLKSWIIKYGRRESVEQLLQNYVSFIENSKFFEQYEVTYQILKQTAEMYVKADGSVEEAENVMKFMNETTAQWRNLSVEVRSVRSMLEEVISNWDRYGNTVASLQAWLEDAEKMLNQSENAKKDFFRNLPHWIQQHTAMNDAGNFLIETCDEMVSRDLKQQLLLLNGRWRELFMEVKQYAQADEMDRMKKEYTDCVVTLSAFATEAHKKLSEPLEVSFMNVKLLIQDLEDIEQRVPVMDAQYKIITKTAHLITKESPQEEGKEMFATMSKLKEQLTKVKECYSPLLYESQQLLIPLEELEKQMTSFYDSLGKINEIITVLEREAQSSALFKQKHQELLACQENCKKTLTLIEKGSQSVQKFVTLSNVLKHFDQTRLQRQIADIHVAFQSMVKKTGDWKKHVETNSRLMKKFEESRAELEKVLRIAQEGLEEKGDPEELLRRHTEFFSQLDQRVLNAFLKACDELTDILPEQEQQGLQEAVRKLHKQWKDLQGEAPYHLLHLKIDVEKNRFLASVEECRTELDRETKLMPQEGSEKIIKEHRVFFSDKGPHHLCEKRLQLIEELCVKLPVRDPVRDTPGTCHVTLKELRAAIDSTYRKLMEDPDKWKDYTSRFSEFSSWISTNETQLKGIKGEAIDTANHGEVKRAVEEIRNGVTKRGETLSWLKSRLKVLTEVSSENEAQKQGDELAKLSSSFKALVTLLSEVEKMLSNFGDCVQYKEIVKNSLEELISGSKEVQEQAEKILDTENLFEAQQLLLHHQQKTKRISAKKRDVQQQIAQAQQGEGGLPDRGHEELRKLESTLDGLERSRERQERRIQVTLRKWERFETNKETVVRYLFQTGSSHERFLSFSSLESLSSELEQTKEFSKRTESIAVQAENLVKEASEIPLGPQNKQLLQQQAKSIKEQVKKLEDTLEEDIKTMEMVKTKWDHFGSNFETLSVWITEKEKELNALETSSSAMDMQISQIKVTIQEIESKLSSIVGLEEEAQSFAQFVTTGESARIKAKLTQIRRYGEELREHAQCLEGTILGHLSQQQKFEENLRKIQQSVSEFEDKLAVPIKICSSATETYKVLQEHMDLCQALESLSSAITAFSASARKVVNRDSCVQEAAALQQQYEDILRRAKERQTALENLLAHWQRLEKELSSFLTWLERGEAKASSPEMDISADRVKVEGELQLIQALQNEVVSQASFYSKLLQLKESLFSVASKDDVKMMKLHLEQLDERWRDLPQIINKRINFLQSVVAEHQQFDELLLSFSVWIKLFLSELQTTSEISIMDHQVALTRHKDHAAEVESKKGELQSLQGHLAKLGSLGRAEDLHLLQGKAEDCFQLFEEASQVVERRQLALSHLAEFLQSHASLSGILRQLRQTVEATNSMNKNESDLIEKDLNDALQNAKALESAAVSLDGILSKAQYHLKIGSSEQRTSCRATADQLCGEVERIQNLLGTKQSEADALAVLKKAFQDQKEELLKSIEDIEERTDKERLKEPTRQALQQRLRVFNQLEDELNSHEHELCWLKDKAKQIAQKDVAFAPEVDREINRLEVTWDDTKRLIHENQGQCCGLIDLMREYQNLKSAVSKVLENASSVIVTRTTIKDQEDLKWAFSKHETAKNKMNYKQKDLDNFTSKGKHLLSELKKIHSSDFSLVKTDMESTVDKWLDVSEKLEENMDRLRVSLSIWDDVLSTRDEIEGWSNNCVPQMAENISNLDNHLRAEELLKEFESEVKNKALRLEELHSKVNDLKELTKNLETPPDLQFIEADLMQKLEHAKEITEVAKGTLKDFTAQSTQVEKFINDITTWFTKVEESLMNCAQNETCEALKKVKDIQKELQSQQSNISSTQENLNSLCRKYHSAELESLGRAMTGLIKKHEAVSQLCSKTQASLQESLEKHFSESMQEFQEWFLGAKAAAKESSDRTGDSKVLEAKLHDLQNILDSVSDGQSKLDAVTQEGQTLYAHLSKQIVSSIQEQITKANEEFQAFLKQCLKDKQALQDCASELGSFEDQHRKLNLWIHEMEERFNTENLGESKQHIPEKKNEVHKVEMFLGELLAARESLDKLSQRGQLLSEEGHGAGQEGRLCSQLLTSHQNLLRMTKEKLRSCQVALQEHEALEEALQSMWFWVKAIQDRLACAESTLGSKDTLEKRLSQIQDILLMKGEGEVKLNMAIGKGEQALRSSNKEGQRVIQTQLETLKEVWADIMSSSVHAQSTLESVISQWNDYVERKNQLEQWMESVDQKIEHPLQPQPGLKEKFVLLDHLQSILSEAEDHTRALHRLIAKSRELYEKTEDESFKDTAQEELKTQFNDIMTVAKEKMRKVEEIVKDHLMYLDAVHEFTDWLHSAKEELHRWSDMSGDSSATQKKLSKIKELIDSREIGASRLSRVESLAPEVKQNTTASGCELMHTEMQALRADWKQWEDSVFQTQSCLENLVSQMALSEQEFSGQVAQLEQALEQFSALLKTWAQQLTLLEGKNTDEEIVECWHKGQEILDALQKAEPRTEDLKSQLNELCRFSRDLSTYSGKVSGLIKEYNCLCLQASKGCQNKEQILQQRFRKAFRDFQQWLVNAKITTAKCFDIPQNISEVSTSLQKIQEFLSESENGQHKLNMMLSKGELLSTLLTKEKAKGIQAKVTAAKEDWKNFHSNLHQKESALENLKIQMKDFEVSAEPIQDWLSKTEKMVHESSNRLYDLPAKRREQQKLQSVLEEIHCYEPQLNRLKEKAQQLWEGQAASKSFRHRVSQLSSQYLALSNLTKEKVSRLDRIVAEHNQFSLGIKELQDWMTDAIHMLDSYCHPTSDKSVLDSRTLKLEALLSVKQEKEIQMKMIVTRGESVLQNTSPEGIPTIQQQLQSVKDMWASLLSAGIRCKSQLEGALSKWTSYQDGVRQFSGWMDSMEANLNESERQHAELRDKTTMLGKAKLLNEEVLSYSSLLETIEVKGAGMTEHYVTQLELQDLQERYRAIQERAKEAVTKSEKLVRLHQEYQRDLKAFEVWLGQEQEKLDQYSVLEGDAHTHETTLRDLQELQVHCAEGQALLNSVLHTREDVIPSGIPQAEDRALESLRQDWQAYQHRLSETRTQFNNVVNKLRLMEQKFQQVDEWLKTAEEKVSPRTRRQSNRATKEIQLHQMKKWHEEVTAYRDEVEEVGARAQEILDESHVNSRMGCQATQLTSRYQALLLQVLEQIKFLEEEIQSLEESESSLSSYSDWYGSTHKNFKNVATKIDKVDTVMMGKKLKTLEVLLKDMEKGHSLLKSAREKGERAVKYLEEGEAERLRKEIHDHMEQLKELTSTVRKEHMTLEKGLHLAKEFSDKCKALTQWIAEYQEILHVPEEPKMELYEKKAQLSKYKSLQQTVLSHEPSVKSVREKGEALLELVQDVTLKDKIDQLQSDYQDLCSIGKEHVFSLEAKVKDHEDYNSELQEVEKWLLQMSGRLVAPDLLETSSLETITQQLAHHKAMMEEIAGFEDRLNNLQMKGDTLIGQCADHLQAKLKQNVHAHLQGTKDSYSAICSTAQRMYQSLEHELQKHVSRQDTLQQCQAWLSAVQPDLEPSPQPPLSRAEAIKQVKHFRALQEQARTYLDLLCSMCDLSNASVKTTAKDIQQTEQTIEQKLVQAQNLTQGWEEIKHLKSELWIYLQDADQQLQNMKRRHSELELNIAQNMVSQVKDFVKKLQSKQASVNTIIEKVNKLTKKEESPEHKEINHLNDQWLDLCRQSNNLCLQREEDLQRTRDYHDCMNVVEVFLEKFTTEWDNLARSDAESTAVHLEALKKLALALQERKYAIEDLKDQKQKMIEHLNLDDKELVKEQTSHLEQRWFQLEDLIKRKIQVSVTNLEELNVVQSRFQELMEWAEEQQPNIAEALKQSPPPDMAQNLLMDHLAICSELEAKQMLLKSLIKDADRVMADLGLNERQVIQKALSDAQSHVNCLSDLVGQRRKYLNKALSEKTQFLMAVFQATSQIQQHERKIMFREHICLLPDDVSKQVKTCKSAQASLKTYQNEVTGLWAQGRELMKEVTEQEKSEVLGKLQELQSVYDSVLQKCSHRLQELEKNLVSRKHFKEDFDKACHWLKQADIVTFPEINLMNESSELHTQLAKYQNILEQSPEYENLLLTLQRTGQTILPSLNEVDHSYLSEKLNALPRQFNVIVALAKDKFYKVQEAILARKEYASLIELTTQSLSELEAQFLRMSKVPTDLAVEEALSLQDGCRAILDEVAGLGEAVDELNQKKEGFRSTGQPWQPDKMLHLVTLYHRLKRQTEQRVSLLEDTTSAYQEHEKMCQQLERQLKSVKEEQSKVNEETLPAEEKLKMYHSLAGSLQDSGIVLKRVTIHLEDLAPHLDPLAYEKARHQIQSWQGELKLLTSAIGETVTECESRMVQSIDFQTEMSRSLDWLRRVKAELSGPVYLDLNLQDIQEEIRKIQIHQEEVQSSLRIMNALSHKEKEKFTKAKELISADLEHSLAELSELDGDIQEALRTRQATLTEIYSQCQRYYQVFQAANDWLEDAQELLQLAGNGLDVESAEENLKSHMEFFSTEDQFHSNLEELHSLVATLDPLIKPTGKEDLEQKVASLELRSQRMSRDSGAQVDLLQRCTAQWHDYQKAREEVIELMNDTEKKLSEFSLLKTSSSHEAEEKLSEHKALVSVVNSFHEKIVALEEKASQLEKTGNDASKATLSRSMTTVWQRWTRLRAVAQDQEKILEDAVDEWTGFNNKVKKATEMIDQLQDKLPGSSAEKASKAELLTLLEYHDTFVLELEQQQSALGMLRQQTLSMLQDGAAPTPGEEPPLMQEITAMQDRCLNMQEKVKTNGKLVKQELKDREMVETQINSVKCWVQETKEYLGNPTIEIDAQLEELQILLTEATNHRQNIEKMAEEQKEKYLGLYTILPSELSLQLAEVALDLKIRDQIQDKIKEVEQSKATSQELSRQIQKLAKDLTTILTKLKAKTDNVVQAKTDQKVLGEELDGCNSKLMELDAAVQKFLEQNGQLGKPLAKKIGKLTELHQQTIRQAENRLSKLNQAASHLEEYNEMLELILKWIEKAKVLAHGTIAWNSASQLREQYILHQTLLEESKEIDSELEAMTEKLQYLTSVYCTEKMSQQVAELGRETEELRQMIKIRLQNLQDAAKDMKKFEAELKKLQAALEQAQATLTSPEVGRLSLKEQLSHRQHLLSEMESLKPKVQAVQLCQSALRIPEDVVASLPLCHAALRLQEEASRLQHTAIQQCNIMQEAVVQYEQYEQEMKHLQQLIEGAHREIEDKPVATSNIQELQAQISRHEELAQKIKGYQEQIASLNSKCKMLTMKAKHATMLLTVTEVEGLAEGTEDLDGELLPTPSAHPSVVMMTAGRCHTLLSPVTEESGEEGTNSEISSPPACRSPSPVANTDASVNQDIAYYQALSAERLQTDAAKIHPSTSASQEFYEPGLEPSATAKLGDLQRSWETLKNVISEKQRTLYEALERQQKYQDSLQSISTKMEAIELKLSESPEPGRSPESQMAEHQALMDEILMLQDEINELQSSLAEELVSESCEADPAEQLALQSTLTVLAERMSTIRMKASGKRQLLEEKLNDQLEEQRQEQALQRYRCEADELDSWLLSTKATLDTALSPPKEPMDMEAQLMDCQNMLVEIEQKVVALSELSVHNENLLLEGKAHTKDEAEQLAGKLRRLKGSLLELQRALHDKQLNMQGTAQEKEESDVDLTATQSPGVQEWLAQARTTWTQQRQSSLQQQKELEQELAEQKSLLRSVASRGEEILIQHSAAETSGDAGEKPDVLSQELGMEGEKSSAEDQMRMKWESLHQEFSTKQKLLQNVLEQEQEQVLYSRPNRLLSGVPLYKGDVPTQDKSAVTSLLDGLNQAFEEVSSQSGGAKRQSIHLEQKLYDGVSATSTWLDDVEERLFVATALLPEETETCLFNQEILAKDIKEMSEEMDKNKNLFSQAFPENGDNRDVIEDTLGCLLGRLSLLDSVVNQRCHQMKERLQQILNFQNDLKVLFTSLADNKYIILQKLANVFEQPVAEQIEAIQQAEDGLKEFDAGIIELKRRGDKLQVEQPSMQELSKLQDMYDELMMIIGSRRSGLNQNLTLKSQYERALQDLADLLETGQEKMAGDQKIIVSSKEEIQQLLDKHKEYFQGLESHMILTETLFRKIISFAVQKETQFHTELMAQASAVLKRAHKRGVELEYILETWSHLDEDQQELSRQLEVVESSIPSVGLVEENEDRLIDRITLYQHLKSSLNEYQPKLYQVLDDGKRLLISISCSDLESQLNQLGECWLSNTNKMSKELHRLETILKHWTRYQSESADLIHWLQSAKDRLEFWTQQSVTVPQELEMVRDHLNAFLEFSKEVDAQSSLKSSVLSTGNQLLRLKKVDTATLRSELSRIDSQWTDLLTNIPAVQEKLHQLQMDKLPSRHAISEVMSWISLMENVIQKDEDNIKNSIGYKAIHEYLQKYKGFKIDINCKQLTVDFVNQSVLQISSQDVESKRSDKTDFAEQLGAMNKSWQILQGLVTEKIQLLEGLLESWSEYENNVQCLKTWFETQEKRLKQQHRIGDQASVQNALKDCQDLEDLIKAKEKEVEKIEQNGLALIQNKKEDVSSIVMSTLRELGQTWANLDHMVGQLKILLKSVLDQWSSHKVAFDKINSYLMEARYSLSRFRLLTGSLEAVQVQVDNLQNLQDDLEKQERSLQKFGSITNQLLKECHPPVTETLTNTLKEVNMRWNNLLEEIAEQLQSSKALLQLWQRYKDYSKQCASTVQQQEDRTNELLKAATNKDIADDEVATWIQDCNDLLKGLGTVKDSLFFLHELGEQLKQQVDASAASAIQSDQLSLSQHLCALEQALCKQQTSLQAGVLDYETFAKSLEALEAWIVEAEEILQGQDPSHSSDLSTIQERMEELKGQMLKFSSMAPDLDRLNELGYRLPLNDKEIKRMQNLNRHWSLISSQTTERFSKLQSFLLQHQTFLEKCETWMEFLVQTEQKLAVEISGNYQHLLEQQRAHELFQAEMFSRQQILHSIIIDGQRLLEQGQVDDRDEFNLKLTLLSNQWQGVIRRAQQRRGIIDSQIRQWQRYREMAEKLRKWLVEVSYLPMSGLGSVPIPLQQARTLFDEVQFKEKVFLRQQGSYILTVEAGKQLLLSADSGAEAALQAELAEIQEKWKSASMRLEEQKKKLAFLLKDWEKCEKGIADSLEKLRTFKKKLSQSLPDHHEELHAEQMRCKELENAVGSWTDDLTQLSLLKDTLSAYISADDISILNERVELLQRQWEELCHQLSLRRQQIGERLNEWAVFSEKNKELCEWLTQMESKVSQNGDILIEEMIEKLKKDYQEEIAIAQENKIQLQQMGERLAKASHESKASEIEYKLGKVNDRWQHLLDLIAARVKKLKETLVAVQQLDKNMSSLRTWLAHIESELAKPIVYDSCNSEEIQRKLNEQQELQRDIEKHSTGVASVLNLCEVLLHDCDACATDAECDSIQQATRNLDRRWRNICAMSMERRLKIEETWRLWQKFLDDYSRFEDWLKSSERTAAFPSSSGVIYTVAKEELKKFEAFQRQVHECLTQLELINKQYRRLARENRTDSACSLKQMVHEGNQRWDNLQKRVTSILRRLKHFIGQREEFETARDSILVWLTEMDLQLTNIEHFSECDVQAKIKQLKAFQQEISLNHNKIEQIIAQGEQLIEKSEPLDAAIIEEELDELRRYCQEVFGRVERYHKKLIRLPLPDDEHDLSDRELELEDSAALSDLHWHDRSADSLLSPQPSSNLSLSLAQPLRSERSGRDTPASVDSIPLEWDHDYDLSRDLESAMSRALPSEDEEGQDDKDFYLRGAVGLSGDHSALESQIRQLGKALDDSRFQIQQTENIIRSKTPTGPELDTSYKGYMKLLGECSSSIDSVKRLEHKLKEEEESLPGFVNLHSTETQTAGVIDRWELLQAQALSKELRMKQNLQKWQQFNSDLNSIWAWLGDTEEELEQLQRLELSTDIQTIELQIKKLKELQKAVDHRKAIILSINLCSPEFTQADSKESRDLQDRLSQMNGRWDRVCSLLEEWRGLLQDALMQCQGFHEMSHGLLLMLENIDRRKNEIVPIDSNLDAEILQDHHKQLMQIKHELLESQLRVASLQDMSCQLLVNAEGTDCLEAKEKVHVIGNRLKLLLKEVSRHIKELEKLLDVSSSQQDLSSWSSADELDTSGSVSPTSGRSTPNRQKTPRGKCSLSQPGPSVSSPHSRSTKGGSDSSLSEPGPGRSGRGFLFRVLRAALPLQLLLLLLIGLACLVPMSEEDYSCALSNNFARSFHPMLRYTNGPPPL

SEQ ID NO: 49029 - protein, 8732 aa, Homo sapiens
MQRLQDEQEIVQKRTFTKWINSHLAKRKPPMVVDDLFEDMKDGVKLLALLEVLSGQKLPCEQGRRMKRIHAVANIGTALKFLEGRKSMHRGSPIKLVNINSTDIADGRPSIVLGLMWTIILYFQIEELTSNLPQLQSLSSSASSVDSIVSSETPSPPSKRKVTTKIQGNAKKALLKWVQYTAGKQTGIEVKDFGKSWRSGVAFHSVIHAIRPELVDLETVKGRSNRENLEDAFTIAETELGIPRLLDPEDVDVDKPDEKSIMTYVAQFLKHYPDIHNASTDGQEDDEILPGFPSFANSVQNFKREDRVIFKEMKVWIEQFERDLTRAQMVESNLQDKYQSFKHFRVQYEMKRKQIEHLIQPLHRDGKLSLDQALVKQSWDRVTSRLFDWHIQLDKSLPAPLGTIGAWLYRAEVALREEITVQQVHEETANTIQRKLEQHKDLLQNTDAHKRAFHEIYRTRSVNGIPVPPDQLEDMAERFHFVSSTSELHLMKMEFLELKYRLLSLLVLAESKLKSWIIKYGRRESVEQLLQNYVSFIENSKFFEQYEVTYQILKQTAEMYVKADGSVEEAENVMKFMNETTAQWRNLSVEVRSVRSMLEEVISNWDRYGNTVASLQAWLEDAEKMLNQSENAKKDFFRNLPHWIQQHTAMNDAGNFLIETCDEMVSRDLKQQLLLLNGRWRELFMEVKQYAQADEMDRMKKEYTDCVVTLSAFATEAHKKLSEPLEVSFMNVKLLIQDLEDIEQRVPVMDAQYKIITKTAHLITKESPQEEGKEMFATMSKLKEQLTKVKECYSPLLYESQQLLIPLEELEKQMTSFYDSLGKINEIITVLEREAQSSALFKQKHQELLACQENCKKTLTLIEKGSQSVQKFVTLSNVLKHFDQTRLQRQIADIHVAFQSMVKKTGDWKKHVETNSRLMKKFEESRAELEKVLRIAQEGLEEKGDPEELLRRHTEFFSQLDQRVLNAFLKACDELTDILPEQEQQGLQEAVRKLHKQWKDLQGEAPYHLLHLKIDVEKNRFLASVEECRTELDRETKLMPQEGSEKIIKEHRVFFSDKGPHHLCEKRLQLIEELCVKLPVRDPVRDTPGTCHVTLKELRAAIDSTYRKLMEDPDKWKDYTSRFSEFSSWISTNETQLKGIKGEAIDTANHGEVKRAVEEIRNGVTKRGETLSWLKSRLKVLTEVSSENEAQKQGDELAKLSSSFKALVTLLSEVEKMLSNFGDCVQYKEIVKNSLEELISGSKEVQEQAEKILDTENLFEAQQLLLHHQQKTKRISAKKRDVQQQIAQAQQGEGGLPDRGHEELRKLESTLDGLERSRERQERRIQVTLRKWERFETNKETVVRYLFQTGSSHERFLSFSSLESLSSELEQTKEFSKRTESIAVQAENLVKEASEIPLGPQNKQLLQQQAKSIKEQVKKLEDTLEEDIKTMEMVKTKWDHFGSNFETLSVWITEKEKELNALETSSSAMDMQISQIKVTIQEIESKLSSIVGLEEEAQSFAQFVTTGESARIKAKLTQIRRYGEELREHAQCLEGTILGHLSQQQKFEENLRKIQQSVSEFEDKLAVPIKICSSATETYKVLQEHMDLCQALESLSSAITAFSASARKVVNRDSCVQEAAALQQQYEDILRRAKERQTALENLLAHWQRLEKELSSFLTWLERGEAKASSPEMDISADRVKVEGELQLIQALQNEVVSQASFYSKLLQLKESLFSVASKDDVKMMKLHLEQLDERWRDLPQIINKRINFLQSVVAEHQQFDELLLSFSVWIKLFLSELQTTSEISIMDHQVALTRHKDHAAEVESKKGELQSLQGHLAKLGSLGRAEDLHLLQGKAEDCFQLFEEASQVVERRQLALSHLAEFLQSHASLSGILRQLRQTVEATNSMNKNESDLIEKDLNDALQNAKALESAAVSLDGILSKAQYHLKIGSSEQRTSCRATADQLCGEVERIQNLLGTKQSEADALAVLKKAFQDQKEELLKSIEDIEERTDKERLKEPTRQALQQRLRVFNQLEDELNSHEHELCWLKDKAKQIAQKDVAFAPEVDREINRLEVTWDDTKRLIHENQGQCCGLIDLMREYQNLKSAVSKVLENASSVIVTRTTIKDQEDLKWAFSKHETAKNKMNYKQKDLDNFTSKGKHLLSELKKIHSSDFSLVKTDMESTVDKWLDVSEKLEENMDRLRVSLSIWDDVLSTRDEIEGWSNNCVPQMAENISNLDNHLRAEELLKEFESEVKNKALRLEELHSKVNDLKELTKNLETPPDLQFIEADLMQKLEHAKEITEVAKGTLKDFTAQSTQVEKFINDITTWFTKVEESLMNCAQNETCEALKKVKDIQKELQSQQSNISSTQENLNSLCRKYHSAELESLGRAMTGLIKKHEAVSQLCSKTQASLQESLEKHFSESMQEFQEWFLGAKAAAKESSDRTGDSKVLEAKLHDLQNILDSVSDGQSKLDAVTQEGQTLYAHLSKQIVSSIQEQITKANEEFQAFLKQCLKDKQALQDCASELGSFEDQHRKLNLWIHEMEERFNTENLGESKQHIPEKKNEVHKVEMFLGELLAARESLDKLSQRGQLLSEEGHGAGQEGRLCSQLLTSHQNLLRMTKEKLRSCQVALQEHEALEEALQSMWFWVKAIQDRLACAESTLGSKDTLEKRLSQIQDILLMKGEGEVKLNMAIGKGEQALRSSNKEGQRVIQTQLETLKEVWADIMSSSVHAQSTLESVISQWNDYVERKNQLEQWMESVDQKIEHPLQPQPGLKEKFVLLDHLQSILSEAEDHTRALHRLIAKSRELYEKTEDESFKDTAQEELKTQFNDIMTVAKEKMRKVEEIVKDHLMYLDAVHEFTDWLHSAKEELHRWSDMSGDSSATQKKLSKIKELIDSREIGASRLSRVESLAPEVKQNTTASGCELMHTEMQALRADWKQWEDSVFQTQSCLENLVSQMALSEQEFSGQVAQLEQALEQFSALLKTWAQQLTLLEGKNTDEEIVECWHKGQEILDALQKAEPRTEDLKSQLNELCRFSRDLSTYSGKVSGLIKEYNCLCLQASKGCQNKEQILQQRFRKAFRDFQQWLVNAKITTAKCFDIPQNISEVSTSLQKIQEFLSESENGQHKLNMMLSKGELLSTLLTKEKAKGIQAKVTAAKEDWKNFHSNLHQKESALENLKIQMKDFEVSAEPIQDWLSKTEKMVHESSNRLYDLPAKRREQQKLQSVLEEIHCYEPQLNRLKEKAQQLWEGQAASKSFRHRVSQLSSQYLALSNLTKEKVSRLDRIVAEHNQFSLGIKELQDWMTDAIHMLDSYCHPTSDKSVLDSRTLKLEALLSVKQEKEIQMKMIVTRGESVLQNTSPEGIPTIQQQLQSVKDMWASLLSAGIRCKSQLEGALSKWTSYQDGVRQFSGWMDSMEANLNESERQHAELRDKTTMLGKAKLLNEEVLSYSSLLETIEVKGAGMTEHYVTQLELQDLQERYRAIQERAKEAVTKSEKLVRLHQEYQRDLKAFEVWLGQEQEKLDQYSVLEGDAHTHETTLRDLQELQVHCAEGQALLNSVLHTREDVIPSGIPQAEDRALESLRQDWQAYQHRLSETRTQFNNVVNKLRLMEQKFQQVDEWLKTAEEKKWHEEVTAYRDEVEEVGARAQEILDESHVNSRMGCQATQLTSRYQALLLQVLEQIKFLEEEIQSLEESESSLSSYSDWYGSTHKNFKNVATKIDKVDTVMMGKKLKTLEVLLKDMEKGHSLLKSAREKGERAVKYLEEGEAERLRKEIHDHMEQLKELTSTVRKEHMTLEKGLHLAKEFSDKCKALTQWIAEYQEILHVPEEPKMELYEKKAQLSKYKSLQQTVLSHEPSVKSVREKGEALLELVQDVTLKDKIDQLQSDYQDLCSIGKAMMEEIAGFEDRLNNLQMKGDTLIGQCADHLQAKLKQNVHAHLQGTKDSYSAICSTAQRMYQSLEHELQKHVSRQDTLQQCQAWLSAVQPDLEPSPQPPLSRAEAIKQVKHFRALQEQARTYLDLLCSMCDLSNASVKTTAKDIQQTEQTIEQKLVQAQNLTQGWEEIKHLKSELWIYLQDADQQLQNMKRRHSELELNIAQNMVSQVKDFVKKLQSKQASVNTIIEKVNKLTKKEESPEHKEINHLNDQWLDLCRQSNNLCLQREEDLQRTRDYHDCMNVVEVFLEKFTTEWDNLARSDAESTAVHLEALKKLALALQERKYAIEDLKDQKQKMIEHLNLDDKELVKEQTSHLEQRWFQLEDLIKRKIQVSVTNLEELNVVQSRFQELMEWAEEQQPNIAEALKQSPPPDMAQNLLMDHLAICSELEAKQMLLKSLIKDADRVMADLGLNERQVIQKALSDAQSHVNCLSDLVGQRRKYLNKALSEKTQFLMAVFQATSQIQQHERKIMFREHICLLPDDVSKQVKTCKSAQASLKTYQNEVTGLWAQGRELMKEVTEQEKSEVLGKLQELQSVYDSVLQKCSHRLQELEKNLVSRKHFKEDFDKACHWLKQADIVTFPEINLMNESSELHTQLAKYQNILEQSPEYENLLLTLQRTGQTILPSLNEVDHSYLSEKLNALPRQFNVIVALAKDKFYKVQEAILARKEYASLIELTTQSLSELEAQFLRMSKVPTDLAVEEALSLQDGCRAILDEVAGLGEAVDELNQKKEGFRSTGQPWQPDKMLHLVTLYHRLKRQTEQRVSLLEDTTSAYQEHEKMCQQLERQLKSVKEEQSKVNEETLPAEEKLKMYHSLAGSLQDSGIVLKRVTIHLEDLAPHLDPLAYEKARHQIQSWQGELKLLTSAIGETVTECESRMVQSIDFQTEMSRSLDWLRRVKAELSGPVYLDLNLQDIQEEIRKIQIHQEEVQSSLRIMNALSHKEKEKFTKAKELISADLEHSLAELSELDGDIQEALRTRQATLTEIYSQCQRYYQVFQAANDWLEDAQELLQLAGNGLDVESAEENLKSHMEFFSTEDQFHSNLEELHSLVATLDPLIKPTGKEDLEQKVASLELRSQRMSRDSGAQVDLLQRCTAQWHDYQKAREEVIELMNDTEKKLSEFSLLKTSSSHEAEEKLSEHKALVSVVNSFHEKIVALEEKASQLEKTGNDASKATLSRSMTTVWQRWTRLRAVAQDQEKILEDAVDEWTGFNNKVKKATEMIDQLQDKLPGSSAEKASKAELLTLLEYHDTFVLELEQQQSALGMLRQQTLSMLQDGAAPTPGEEPPLMQEITAMQDRCLNMQEKVKTNGKLVKQELKDREMVETQINSVKCWVQETKEYLGNPTIEIDAQLEELQILLTEATNHRQNIEKMAEEQKEKYLGLYTILPSELSLQLAEVALDLKIRDQIQDKIKEVEQSKATSQELSRQIQKLAKDLTTILTKLKAKTDNVVQAKTDQKVLGEELDGCNSKLMELDAAVQKFLEQNGQLGKPLAKKIGKLTELHQQTIRQAENRLSKLNQAASHLEEYNEMLELILKWIEKAKVLAHGTIAWNSASQLREQYILHQTLLEESKEIDSELEAMTEKLQYLTSVYCTEKMSQQVAELGRETEELRQMIKIRLQNLQDAAKDMKKFEAELKKLQAALEQAQATLTSPEVGRLSLKEQLSHRQHLLSEMESLKPKVQAVQLCQSALRIPEDVVASLPLCHAALRLQEEASRLQHTAIQQCNIMQAAVVQYEQYEQEMKHLQQLIEGAHREIEDKPVATSNIQELQAQISRHEELAQKIKGYQEQIASLNSKCKMLTMKAKHATMLLTVTEVEGLAEGTEDLDGELLPTPSAHPSVVMMTAGRCHTLLSPVTEESGEEGTNSEISSPPACRSPSPVANTDASVNQDIAYYQALSAERLQTDAAKIHPSTSASQEFYEPGLEPSATAKLGDLQRSWETLKNVISEKQRTLYEALERQQKYQDSLQSISTKMEAIELKLSESPEPGRSPESQMAEHQALMDEILMLQDEINELQSSLAEELVSESCEADPAEQLALQSTLTVLAERMSTIRMKASGKRQLLEEKLNDQLEEQRQEQALQRYRCEADELDSWLLSTKATLDTALSPPKEPMDMEAQLMDCQNMLVEIEQKVVALSELSVHNENLLLEGKAHTKDEAEQLAGKLRRLKGSLLELQRALHDKQLNMQGTAQEKEESDVDLTATQSPGVQEWLAQARTTWTQQRQSSLQQQKELEQELAEQKSLLRSVASRGEEILIQHSAAETSGDAGEKPDVLSQELGMEGEKSSAEDQMRMKWESLHQEFSTKQKLLQNVLEQEQEQVLYSRPNRLLSGVPLYKGDVPTQDKSAVTSLLDGLNQAFEEVSSQSGGAKRQSIHLEQKLYDGVSATSTWLDDVEERLFVATALLPEETETCLFNQEILAKDIKEMSEEMDKNKNLFSQAFPENGDNRDVIEDTLGCLLGRLSLLDSVVNQRCHQMKERLQQILNFQNDLKVLFTSLADNKYIILQKLANVFEQPVAEQIEAIQQAEDGLKEFDAGIIELKRRGDKLQVEQPSMQELSKLQDMYDELMMIIGSRRSGLNQNLTLKSQYERALQDLADLLETGQEKMAGDQKIIVSSKEEIQQLLDKHKEYFQGLESHMILTETLFRKIISFAVQKETQFHTELMAQASAVLKRAHKRGVELEYILETWSHLDEDQQELSRQLEVVESSIPSVGLVEENEDRLIDRITLYQHLKSSLNEYQPKLYQVLDDGKRLLISISCSDLESQLNQLGECWLSNTNKMSKELHRLETILKHWTRYQSESADLIHWLQSAKDRLEFWTQQSVTVPQELEMVRDHLNAFLEFSKEVDAQSSLKSSVLSTGNQLLRLKKVDTATLRSELSRIDSQWTDLLTNIPAVQEKLHQLQMDKLPSRHAISEVMSWISLMENVIQKDEDNIKNSIGYKAIHEYLQKYKGFKIDINCKQLTVDFVNQSVLQISSQDVESKRSDKTDFAEQLGAMNKSWQILQGLVTEKIQLLEGLLESWSEYENNVQCLKTWFETQEKRLKQQHRIGDQASVQNALKDCQDLEDLIKAKEKEVEKIEQNGLALIQNKKEDVSSIVMSTLRELGQTWANLDHMVGQLKILLKSVLDQWSSHKVAFDKINSYLMEARYSLSRFRLLTGSLEAVQVQVDNLQNLQDDLEKQERSLQKFGSITNQLLKECHPPVTETLTNTLKEVNMRWNNLLEEIAEQLQSSKALLQLWQRYKDYSKQCASTVQQQEDRTNELLKAATNKDIADDEVATWIQDCNDLLKGLGTVKDSLFFLHELGEQLKQQVDASAASAIQSDQLSLSQHLCALEQALCKQQTSLQAGVLDYETFAKSLEALEAWIVEAEEILQGQDPSHSSDLSTIQERMEELKGQMLKFSSMAPDLDRLNELGYRLPLNDKEIKRMQNLNRHWSLISSQTTERFSKLQSFLLQHQTFLEKCETWMEFLVQTEQKLAVEISGNYQHLLEQQRAHELFQAEMFSRQQILHSIIIDGQRLLEQGQVDDRDEFNLKLTLLSNQWQGVIRRAQQRRGIIDSQIRQWQRYREMAEKLRKWLVEVSYLPMSGLGSVPIPLQQARTLFDEVQFKEKVFLRQQGSYILTVEAGKQLLLSADSGAEAALQAELAEIQEKWKSASMRLEEQKKKLAFLLKDWEKCEKGIADSLEKLRTFKKKLSQSLPDHHEELHAEQMRCKELENAVGSWTDDLTQLSLLKDTLSAYISADDISILNERVELLQRQWEELCHQLSLRRQQIGERLNEWAVFSEKNKELCEWLTQMESKVSQNGDILIEEMIEKLKKDYQEEIAIAQENKIQLQQMGERLAKASHESKASEIEYKLGKVNDRWQHLLDLIAARVKKLKETLVAVQQLDKNMSSLRTWLAHIESELAKPIVYDSCNSEEIQRKLNEQQELQRDIEKHSTGVASVLNLCEVLLHDCDACATDAECDSIQQATRNLDRRWRNICAMSMERRLKIEETWRLWQKFLDDYSRFEDWLKSSERTAAFPSSSGVIYTVAKEELKKFEAFQRQVHECLTQLELINKQYRRLARENRTDSACSLKQMVHEGNQRWDNLQKRVTSILRRLKHFIGQREEFETARDSILVWLTEMDLQLTNIEHFSECDVQAKIKQLKAFQQEISLNHNKIEQIIAQGEQLIEKSEPLDAAIIEEELDELRRYCQEVFGRVERYHKKLIRLPLPDDEHDLSDRELELEDSAALSDLHWHDRSADSLLSPQPSSNLSLSLAQPLRSERSGRDTPASVDSIPLEWDHDYDLSRDLESAMSRALPSEDEEGQDDKDFYLRGAVGLSDVMIPESPEAYVKLTENAIKNTSGDHSALESQIRQLGKALDDSRFQIQQTENIIRSKTPTGPELDTSYKGYMKLLGECSSSIDSVKRLEHKLKEEEESLPGFVNLHSTETQTAGVIDRWELLQAQALSKELRMKQNLQKWQQFNSDLNSIWAWLGDTEEELEQLQRLELSTDIQTIELQIKKLKELQKAVDHRKAIILSINLCSPEFTQADSKESRDLQDRLSQMNGRWDRVCSLLEEWRGLLQDALMQCQGFHEMSHGLLLMLENIDRRKNEIVPIDSNLDAEILQDHHKQLMQIKHELLESQLRVASLQDMSCQLLVNAEGTDCLEAKEKVHVIGNRLKLLLKEVSRHIKELEKLLDVSSSQQDLSSWSSADELDTSGSVSPTSGRSTPNRQKTPRGKCSLSQPGPSVSSPHSRSTKGGSDSSLSEPGPGRSGRGFLFRVLRAALPLQLLLLLLIGLACLVPMSEEDYSCALSNNFARSFHPMLRYTNGPPPL

SEQ ID NO: 49030 - protein, 1416 aa, Homo sapiens
MQRLQDEQEIVQKRTFTKWINSHLAKRKPPMVVDDLFEDMKDGVKLLALLEVLSGQKLPCEQGRRMKRIHAVANIGTALKFLEGRKSMHRGSPIKLVNINSTDIADGRPSIVLGLMWTIILYFQIEELTSNLPQLQSLSSSASSVDSIVSSETPSPPSKRKVTTKIQGNAKKALLKWVQYTAGKQTGIEVKDFGKSWRSGVAFHSVIHAIRPELVDLETVKGRSNRENLEDAFTIAETELGIPRLLDPEDVDVDKPDEKSIMTYVAQFLKHYPDIHNASTDGQEDDREDRVIFKEMKVWIEQFERDLTRAQMVESNLQDKYQSFKHFRVQYEMKRKQIEHLIQPLHRDGKLSLDQALVKQSWDRVTSRLFDWHIQLDKSLPAPLGTIGAWLYRAEVALREEITVQQVHEETANTIQRKLEQHKDLLQNTDAHKRAFHEIYRTRSVNGIPVPPDQLEDMAERFHFVSSTSELHLMKMEFLELKYRLLSLLVLAESKLKSWIIKYGRRESVEQLLQNYVSFIENSKFFEQYEVTYQILKQTAEMYVKADGSVEEAENVMKFMNETTAQWRNLSVEVRSVRSMLEEVISNWDRYGNTVASLQAWLEDAEKMLNQSENAKKDFFRNLPHWIQQHTAMNDAGNFLIETCDEMVSRDLKQQLLLLNGRWRELFMEVKQYAQADEMDRMKKEYTDCVVTLSAFATEAHKKLSEPLEVSFMNVKLLIQDLEDIEQRVPVMDAQYKIITKTAHLITKESPQEEGKEMFATMSKLKEQLTKVKECYSPLLYESQQLLIPLEELEKQMTSFYDSLGKINEIITVLEREAQSSALFKQKHQELLACQENCKKTLTLIEKGSQSVQKFVTLSNVLKHFDQTRLQRQIADIHVAFQSMVKKTGDWKKHVETNSRLMKKFEESRAELEKVLRIAQEGLEEKGDPEELLRRHTEFFSQLDQRVLNAFLKACDELTDILPEQEQQGLQEAVRKLHKQWKDLQGEAPYHLLHLKIDVEKNRFLASVEECRTELDRETKLMPQEGSEKIIKEHRVFFSDKGPHHLCEKRLQLIEELCVKLPVRDPVRDTPGTCHVTLKELRAAIDSTYRKLMEDPDKWKDYTSRFSEFSSWISTNETQLKGIKGEAIDTANHGEVKRAVEEIRNGVTKRGETLSWLKSRLKVLTEVSSENEAQKQGDELAKLSSSFKALVTLLSEVEKMLSNFGDCVQYKEIVKNSLEELISGSKEVQEQAEKILDTENLFEAQQLLLHHQQKTKRISAKKRDVQQQIAQAQQGEGGLPDRGHEELRKLESTLDGLERSRERQERRIQVTLRKWERFETNKETVVRYLFQTGSSHERFLSFSSLESLSSELEQTKEFSKRTESIAVQAENLVKEASEIPLGPQNKQLLQQQAKSIKEQVKKLEDTLEEEYVIDKS

SEQ ID NO: 49031 - protein, 238 aa, Homo sapiens
MLFTSEIFDMYQQYAAFKRWHFETLEYFPSELGGLRHASASIGGSEAYRHMKFEGGVHRVQRVPKTEKQGRVHTSTMTVAILPQPTEINLVINPKDLRIDTKRASGAGGQHVNTTDSAVRIVHLPTGVVSECQQERSQLKNKELAMTKLRAKLYSMHLEEEINKRQNARKIQIGSKGRSEKIRTYNFPQNRVTDHRINKTLHDLETFMQGDYLLDELVQSLKEYADYESLVEIISQKV

SEQ ID NO: 49032 - protein, 2231 aa, Homo sapiens
METGLLPNHKLKTVGEAPAAPPHQQHHHHHHAHHHHHHAHHLHHHHALQQQLNQFQQQQQQQQQQQQQQQQQQHPISNNNSLGGAGGGAPQPGPDMEQPQHGGAKDSAAGGQADPPGPPLLSKPGDEDDAPPKMGEPAGGRYEHPGLGALGTQQPPVAVPGGGGGPAAVPEFNNYYGSAAPASGGPGGRAGPCFDQHGGQQSPGMGMMHSASAAAAGAPGSMDPLQNSHEGYPNSQCNHYPGYSRPGAGGGGGGGGGGGGGSGGGGGGGGAGAGGAGAGAVAAAAAAAAAAAGGGGGGGYGGSSAGYGVLSSPRQQGGGMMMGPGGGGAASLSKAAAGSAAGGFQRFAGQNQHPSGATPTLNQLLTSPSPMMRSYGGSYPEYSSPSAPPPPPSQPQSQAAAAGAAAGGQQAAAGMGLGKDMGAQYAAASPAWAAAQQRSHPAMSPGTPGPTMGRSQGSPMDPMVMKRPQLYGMGSNPHSQPQQSSPYPGGSYGPPGPQRYPIGIQGRTPGAMAGMQYPQQQMPPQYGQQGVSGYCQQGQQPYYSQQPQPPHLPPQAQYLPSQSQQRYQPQQDMSQEGYGTRSQPPLAPGKPNHEDLNLIQQERPSSLPDLSGSIDDLPTGTEATLSSAVSASGSTSSQGDQSNPAQSPFSPHASPHLSSIPGGPSPSPVGSPVGSNQSRSGPISPASIPGSQMPPQPPGSQSESSSHPALSQSPMPQERGFMAGTQRNPQMAQYGPQQTGPSMSPHPSPGGQMHAGISSFQQSNSSGTYGPQMSQYGPQGNYSRPPAYSGVPSASYSGPGPGMGISANNQMHGQGPSQPCGAVPLGRMPSAGMQNRPFPGNMSSMTPSSPGMSQQGGPGMGPPMPTVNRKAQEAAAAVMQAAANSAQSRQGSFPGMNQSGLMASSSPYSQPMNNSSSLMNTQAPPYSMAPAMVNSSAASVGLADMMSPGESKLPLPLKADGKEEGTPQPESKSKDSYSSQGISQPPTPGNLPVPSPMSPSSASISSFHGDESDSISSPGWPKTPSSPKSSSSTTTGEKITKVYELGNEPERKLWVDRYLTFMEERGSPVSSLPAVGKKPLDLFRLYVCVKEIGGLAQVNKNKKWRELATNLNVGTSSSAASSLKKQYIQYLFAFECKIERGEEPPPEVFSTGDTKKQPKLQPPSPANSGSLQGPQTPQSTGSNSMAEVPGDLKPPTPASTPHGQMTPMQGGRSSTISVHDPFSDVSDSSFPKRNSMTPNAPYQQGMSMPDVMGRMPYEPNKDPFGGMRKVPGSSEPFMTQGQMPNSSMQDMYNQSPSGAMSNLGMGQRQQFPYGASYDRRHEPYGQQYPGQGPPSGQPPYGGHQPGLYPQQPNYKRHMDGMYGPPAKRHEGDMYNMQYSSQQQEMYNQYGGSYSGPDRRPIQGQYPYPYSRERMQGPGQIQTHGIPPQMMGGPLQSSSSEGPQQNMWAARNDMPYPYQNRQGPGGPTQAPPYPGMNRTDDMMVPDQRINHESQWPSHVSQRQPYMSSSASMQPITRPPQPSYQTPPSLPNHISRAPSPASFQRSLENRMSPSKSPFLPSMKMQKVMPTVPTSQVTGPPPQPPPIRREITFPPGSVEASQPVLKQRRKITSKDIVTPEAWRVMMSLKSGLLAESTWALDTINILLYDDSTVATFNLSQLSGFLELLVEYFRKCLIDIFGILMEYEVGDPSQKALDHNAARKDDSQSLADDSGKEEEDAECIDDDEEDEEDEEEDSEKTESDEKSSIALTAPDAAADPKEKPKQASKFDKLPIKIVKKNNLFVVDRSDKLGRVQEFNSGLLHWQLGGGDTTEHIQTHFESKMEIPPRRRPPPPLSSAGRKKEQEGKGDSEEQQEKSIIATIDDVLSARPGALPEDANPGPQTESSKFPFGIQQAKSHRNIKLLEDEPRSRDETPLCTIAHWQDSLAKRCICVSNIVRSLSFVPGNDAEMSKHPGLVLILGKLILLHHEHPERKRAPQTYEKEEDEDKGVACSKDEWWWDCLEVLRDNTLVTLANISGQLDLSAYTESICLPILDGLLHWMVCPSAEAQDPFPTVGPNSVLSPQRLVLETLCKLSIQDNNVDLILATPPFSRQEKFYATLVRYVGDRKNPVCREMSMALLSNLAQGDALAARAIAVQKGSIGNLISFLEDGVTMAQYQQSQHNLMHMQPPPLEPPSVDMMCRAAKALLAMARVDENRSEFLLHEGRLLDISISAVLNSLVASVICDVLFQIGQL

SEQ ID NO: 49033 - protein, 1464 aa, Homo sapiens
MHGQGPSQPCGAVPLGRMPSAGMQNRPFPGNMSSMTPSSPGMSQQGGPGMGPPMPTVNRKAQEAAAAVMQAAANSAQSRPPYIRSPAYPSQSGAGGRPMFSSQHPNYGNSQAPMVHQPDQYGQGSFPGMNQSGLMASSSPYSQPMNNSSSLMNTQAPPYSMAPAMVNSSAASVGLADMMSPGESKLPLPLKADGKEEGTPQPESKSKDSYSSQGISQPPTPGNLPVPSPMSPSSASISSFHGDESDSISSPGWPKTPSSPKSSSSTTTGEKITKVYELGNEPERKLWVDRYLTFMEERGSPVSSLPAVGKKPLDLFRLYVCVKEIGGLAQVNKNKKWRELATNLNVGTSSSAASSLKKQYIQYLFAFECKIERGEEPPPEVFSTGDTKKQPKLQPPSPANSGSLQGPQTPQSTGSNSMAEVPGDLKPPTPASTPHGQMTPMQGGRSSTISVHDPFSDVSDSSFPKRNSMTPNAPYQQGMSMPDVMGRMPYEPNKDPFGGMRKVPGSSEPFMTQGQMPNSSMQDMYNQSPSGAMSNLGMGQRQQFPYGASYDRRHEPYGQQYPGQGPPSGQPPYGGHQPGLYPQQPNYKRHMDGMYGPPAKRHEGDMYNMQYSSQQQEMYNQYGGSYSGPDRRPIQGQYPYPYSRERMQGPGQIQTHGIPPQMMGGPLQSSSSEGPQQNMWAARNDMPYPYQNRQGPGGPTQAPPYPGMNRTDDMMVPDQRINHESQWPSHVSQRQPYMSSSASMQPITRPPQPSYQTPPSLPNHISRAPSPASFQRSLENRMSPSKSPFLPSMKMQKVMPTVPTSQVTGPPPQPPPIRREITFPPGSVEASQPVLKQRRKITSKDIVTPEAWRVMMSLKSGLLAESTWALDTINILLYDDSTVATFNLSQLSGFLELLVEYFRKCLIDIFGILMEYEVGDPSQKALDHNAARKDDSQSLADDSGKEEEDAECIDDDEEDEEDEEEDSEKTESDEKSSIALTAPDAAADPKEKPKQASKFDKLPIKIVKKNNLFVVDRSDKLGRVQEFNSGLLHWQLGGGDTTEHIQTHFESKMEIPPRRRPPPPLSSAGRKKEQEGKGDSEEQQEKSIIATIDDVLSARPGALPEDANPGPQTESSKFPFGIQQAKSHRNIKLLEDEPRSRDETPLCTIAHWQDSLAKRCICVSNIVRSLSFVPGNDAEMSKHPGLVLILGKLILLHHEHPERKRAPQTYEKEEDEDKGVACSKDEWWWDCLEVLRDNTLVTLANISGQLDLSAYTESICLPILDGLLHWMVCPSAEAQDPFPTVGPNSVLSPQRLVLETLCKLSIQDNNVDLILATPPFSRQEKFYATLVRYVGDRKNPVCREMSMALLSNLAQGDALAARAIAVQKGSIGNLISFLEDGVTMAQYQQSQHNLMHMQPPPLEPPSVDMMCRAAKALLAMARVDENRSEFLLHEGRLLDISISAVLNSLVASVICDVLFQIGQL

SEQ ID NO: 49034 - protein, 552 aa, Homo sapiens
MKSYIYVHTVSLDKGENHGIAWQARKELHKAVRKVLATSAKILRNPFADPFSTVDIEDHECAVWLLLRKSKSDDKTTRLEAVREMSETHHWHDYQYRIIAQACDPKTLIGLARSEESDLRFFLLPPPLPSLKEDSSTEEELRQLLASLPQTELDECIQYFTSLALSESSQSLAAQKGGLWCFGGNGLPYAESFGEVPSATVEMFCLEAIVKHSEISTHCDKIEANGGLQLLQRLYRLHKDCPKVQRNIMRVIGNMALNEHLHSSIVRSGWVSIMAEAMKSPHIMESSHAARILANLDRETVQEKYQDGVYVLHPQYRTSQPIKADVLFIHGLMGAAFKTWRQQDSEQAVIEKPMEDEDRYTTCWPKTWLAKDCPALRIISVEYDTSLSDWRARCPMERKSIAFRSNELLRKLRAAGVGDRPVVWISHSMGGLLVKKMLLEASTKPEMSTVINNTRGIIFYSVPHHGSRLAEYSVNIRYLLFPSLEVKELSKDSPALKTLQDDFLEFAKDKNFQVLNFVETLPTYIGSMIKLHVVPVESAGIHSFETCWLLDA

SEQ ID NO: 49035 - protein, 56 aa, Homo sapiens
MKQFLLYLDESNALGKKFIIQDIDDTHVFVIAELVNVLQERVGELMDQNAFSLTQK

SEQ ID NO: 49036 - protein, 376 aa, Homo sapiens [sequence omitted]

SEQ ID NO: 49037 - protein, 534 aa, Homo sapiens [sequence omitted]

SEQ ID NO: 49038 - protein, 1537 aa, Homo sapiens
MEEPPPPPPPPPPPPEPETESEPECCLAARQEGTLGDSACKSPESDLEDFSDETNTENLYGTSPPSTPRQMKRMSTKHQRNNVGRPASRSNLKEKMNAPNQPPHKDTGKTVENVEEYSYKQEKKIRAALRTTERDRKKNVQCSFMLDSVGGSLPKKSIPDVDLNKPYLSLGCSNAKLPVSVPMPIARPARQTSRTDCPADRLKFFETLRLLLKLTSVSKKKDREQRGQENTSGFWLNRSNELIWLELQAWHAGRTINDQDFFLYTARQAIPDIINEILTFKVDYGSFAFVRDRAGFNGTSVEGQCKATPGTKIVGYSTHHEHLQRQRVSFEQVKRIMELLEYIEALYPSLQALQKDYEKYAAKDFQDRVQALCLWLNITKDLNQKLRIMGTVLGIKNLSDIGWPVFEIPSPRPSKGNEPEYEGDDTEGELKELESSTDESEEEQISDPRVPEIRQPIDNSFDIQSRDCISKKLERLESEDDSLGWGAPDWSTEAGFSRHCLTSIYRPFVDKALKQMGLRKLILRLHKLMDGSLQRARIALVKNDRPVEFSEFPDPMWGSDYVQLSRTPPSSEEKCSAVSWEELKAMDLPSFEPAFLVLCRVLLNVIHECLKLRLEQRPAGEPSLLSIKQLVRECKEVLKGGLLMKQYYQFMLQEVLEDLEKPDCNIDAFEEDLHKMLMVYFDYMRSWIQMLQQLPQASHSLKNLLEEEWNFTKEITHYIRGGEAQAGKLFCDIAGMLLKSTGSFLEFGLQESCAEFWTSADDSSASDEIRRSVIEISRALKELFHEARERASKALGFAKMLRKDLEIAAEFRLSAPVRDLLDVLKSKQYVKVQIPGLENLQMFVPDTLAEEKSIILQLLNAAAGKDCSKDSDDVLIDAYLLLTKHGDRARDSEDSWGTWEAQPVKVVPQVETVDTLRSMQVDNLLLVVMQSAHLTIQRKAFQQSIEGLMTLCQEQTSSQPVIAKALQQLKNDALELCNRISNAIDRVDHMFTSEFDAEVDESESVTLQQYYREAMIQGYNFGFEYHKEVVRLMSGEFRQKIGDKYISFARKWMNYVLTKCESGRGTRPRWATQGFDFLQAIEPAFISALPEDDFLSLQALMNECIGHVIGKPHSPVTGLYLAIHRNSPRPMKVPRCHSDPPNPHLIIPTPEGFRGSSVPENDRLASIAAELQFRSLSRHSSPTEERDEPAYPRGDSSGSTRRSWELRTLISQSKDTASKLGPIEAIQKSVRLFEEKRYREMRRKNIIGQVCDTPKSYDNVMHVGLRKVTFKWQRGNKIGEGQYGKVYTCISVDTGELMAMKEIRFQPNDHKTIKETADELKIFEGIKHPNLVRYFGVELHREEMYIFMEYCDEGTLEEVSRLGLQEHVIRLYSKQITIAINVLHEHGIVHRDIKGANIFLTSSGLIKLGDFGCSVKLKNNAQTMPGEVNSTLGTAAYMAPEVITRAKGEGHGRAADIWSLGCVVIEMVTGKRPWHEYEHNFQIMYKVGMGHKPPIPERLSPEGKDFLSHCLESDPKMRWTASQLLDHSFVKVCTDEE

SEQ ID NO: 49039 - protein, 1421 aa, Homo sapiens
MEEPPPPPPPPPPPPEPETESEPECCLAARQEGTLGDSACKSPESDLEDFSDETNTENLYGTSPPSTPRQMKRMSTKHQRNNVGRPASRSNLKEKMNAPNQPPHKDTGKTVENVEEYSYKQEKKIRAALRTTERDRKKNVQCSFMLDSVGGSLPKKSIPDVDLNKPYLSLGCSNAKLPVSVPMPIARPARQTSRTDCPADRLKFFETLRLLLKLTSVSKKKDREQRGQENTSGFWLNRSNELIWLELQAWHAGRTINDQDFFLYTARQAIPDIINEILTFKVDYGSFAFVRDRAGFNGTSVEGQCKATPGTKIVGYSTHHEHLQRQRVSFEQVKRIMELLEYIEALYPSLQALQKDYEKYAAKDFQDRVQALCLWLNITKDLNQKLRIMGTVLGIKNLSDIGWPVFEIPSPRPSKGNEPEYEGDDTEGELKELESSTDESEEEQISDPRVPEIRQPIDNSFDIQSRDCISKKLERLESEDDSLGWGAPDWSTEAGFSRHCLTSIYRPFVDKALKQMGLRKLILRLHKLMDGSLQRARIALVKNDRPVEFSEFPDPMWGSDYVQLSRTPPSSEEKCSAVSWEELKAMDLPSFEPAFLVLCRVLLNVIHECLKLRLEQRPAGEPSLLSIKQLVRECKEVLKGGLLMKQYYQFMLQEVLEDLEKPDCNIDAFEEDLHKMLMVYFDYMRSWIQMLQQLPQASHSLKNLLEEEWNFTKEITHYIRGGEAQAGKLFCDIAGMLLKSTGSFLEFGLQESCAEFWTSADDSSASDEIRRSVIEISRALKELFHEARERASKALGFAKMLRKDLEIAAEFRLSAPVRDLLDVLKSKQYVKVQIPGLENLQMFVPDTLAEEKSIILQLLNAAAGKDCSKDSDDVLIDAYLLLTKHGDRARDSEDSWGTWEAQPVKVVPQVETVDTLRSMQVDNLLLVVMQSAHLTIQRKAFQQSIEGLMTLCQEQTSSQPVIAKALQQLKNDALELCNRISNAIDRVDHMFTSEFDAEVDESESVTLQQYYREAMIQGYNFGFEYHKEVVRLMSGEFRQKIGDKYISFARKWMNYVLTKCESGRGTRPRWATQGFDFLQAIEPAFISALPEDDFLSLQALMNECIGHVIGKPHSPVTGLYLAIHRNSPRPMKVPRCHSDPPNPHLIIPTPEGFSTRSMPSDARSHGSPAAAAAAAAAAVAASRPSPSGGDSVLPKSISSAHDTRGSSVPENDRLASIAAELQFRSLSRHSSPTEERDEPAYPRGDSSGSTRRSWELRTLISQSKDTASKLGPIEAIQKSVRLFEEKRYREMRRKNIIGQVCDTPKSYDNVMHVGLRKVTFKWQRGNKIGEGQYGKVYTCISVDTGELMAMKEIRFQPNDHKTIKETADELKIFEGIKHPNLVRYFGVELHRSTVTLPNSQEISMSYIISAFSLKLEEFLLK

SEQ ID NO: 49040 - protein, 626 aa, Homo sapiens
MERDILAEVNHPFIVKLHYAFQTEGKLYLILDFLRGGDLFTRLSKEVMFTEEDVKFYLAELALALDHLHSLGIIYRDLKPENILLDEEGHIKITDFGLSKEAIDHDKRAYSFCGTIEYMAPEVVNRRGHTQSADWWSFGVLMFEMLTGSLPFQGKDRKETMALILKAKLGMPQFLSGEAQSLLRALFKRNPCNRLGAGIDGVEEIKRHPFFVTIDWNTLYRKEIKPPFKPAVGRPEDTFHFDPEFTARTPTDSPGVPPSANAHHLFRGFSFVASSLIQEPSQQDLHKVPVHPIVQQLHGNNIHFTDGYEIKEDIGVGSYSVCKRCVHKATDTEYAVKIIDKSKRDPSEEIEILLRYGQHPNIITLKDVYDDGKFVYLVMELMRGGELLDRILRQRYFSEREASDVLCTITKTMDYLHSQGVVHRDLKPSNILYRDESGSPESIRVCDFGFAKQLRAGNGLLMTPCYTANFVAPEVLKRQGYDAACDIWSLGILLYTMLAGFTPFANGPDDTPEEILARIGSGKYALSGGNWDSISDAAKDVVSKMLHVDPHQRLTAMQVLKHPWVVNREYLSPNQLSRQDVHLVKGAMAATYFALNRTPQAPRLEPVLSSNLAQRRGMKRLTSTRL

SEQ ID NO: 49041 - protein, 330 aa, Homo sapiens
MGSGDSSRSCETSSQDLGFSYYPAENLIEYKWPPDETGEYYMLQEQVSEYLGVTSFKRKYPDLERRDLSHKEKLYLRELNVITETQCTLGLTALRSDEVIDLMIKEYPAKHAEYSVILQEKERQRITDHYKEYSQMQQQNTQKVEASKVPEYIKKAAKKAAEFNSNLNRERMEERRAYFDLQTHVIQVPQGKYKVLPTERTKVSSYPVALIPGQFQEYYKRYSPDELRYLPLNTALYEPPLDPELPALDSDGDSDDGEDGRGDEKRKNKGTSDSSSGNVSEGESPPDSQEDSFQGRQKSKDKAATPRKDGPKRSVLSKSVPGYKVEEKSP

SEQ ID NO: 49042 - protein, 235 aa, Homo sapiens [sequence omitted]

SEQ ID NO: 49043 - protein, 581 aa, Homo sapiens
MLVRRFRVLILMVFLVACALHIALDLLPRLERRGARPSGEPGCSCAQPAAEVAAPGWAQVRGRPGEPPAASSAAGDAGWPNKHTLRILQDFSSDPSSNLSSHSLEKLPPAAEPAERALRGRDPGALRPHDPAHRPLLRDPGPRRSESPPGPGGDASLLARLFEHPLYRVAVPPLTEEDVLFNVNSDTRLSPKAAENPDWPHAGAEGAEFLSPGEAAVDSYPNWLKFHIGINRYELYSRHNPAIEALLHDLSSQRITSVAMKSGGTQLKLIMTFQNYGQALFKPMKQTREQETPPDFFYFSDYERHNAEIAAFHLDRILDFRRVPPVAGRMVNMTKEIRDVTRDKKLWRTFFISPANNICFYGECSYYCSTEHALCGKPDQIEGSLAAFLPDLSLAKRKTWRNPWRRSYHKRKKAEWEVDPDYCEEVKQTPPYDSSHRILDVMDMTIFDFLMGNMDRHHYETFEKFGNETFIIHLDNGRGFGKYSHDELSILVPLQQCCRIRKSTYLRLQLLAKEEYKLSLLMAESLRGDQVAPVLYQPHLEALDRRLRVVLKAVRDCVERNGLHSVVDDDLDTEHRAASAR

SEQ ID NO: 49044 - protein, 643 aa, Homo sapiens
MQTISHQHWKVRVAAIEATGAVIHFGNGKSVDDVLSHFAQRLFDDVPQVRRAVASVVGGWLLCLRDRYSFFHKLIPLLLSSLNDEVPEVRQLAASLWEDVGLQWQKENEEDLKDKLDFAPPTPPHYPPHERRPVLGCRELVFRNLSKILPALCHDITDWVVGTRVKSAQLLPVLLLHAEDHATQHLEVVLRTLFQACTDEEAAVVQSCTRSAELVGTFVSPEVFLKLILSTLKKTPSASGLLVLASAMRGCPREALQPHLAAIATELAQAHICQASENDLYLERLLLCVQALVSVCHEDCGVASLQLLDVLLTIVALAGATGLRDKAQETMDSLAMVEGVSSCQDLYRKHIGPLLERVTASHLDWTAHSPELLQFSVIVAQSGPALGEALPHVVPTLRACLQPSQDPQMRLKLFSILSTVLLRATDTINSQGQFPSYLETVTKDILAPNLQWHAGRTAAAIRTAAVSCLWALTSSEVLSAEQIRDVQETLMPQVLTTLEEDSKMTRLISCRIINTFLKTSGGMTDPEKLIRIYPELLKRLDDVSNDVRMAAASTLVTWLQCVKGANAKSYYQSSVQYLYRELLVHLDDPERAIQDAILEVLKEGSGLFPDLLVRETEAVIHKHRSATYCEQLLQHVQAVPATQ

SEQ ID NO: 49045 - protein, 632 aa, Homo sapiens
MSRRSLRLATTACTLGDGEAVGADSGTSSAVSLKNRAARTTKQRRSTNKSAFSINHVSRQVTSSGVSHGGTVSLQDAVTRRPPVLDESWIREQTTVDHFWGKAASGVFWWLGIGWYQFVTLISWLNVFLLTRCLRNICKFLVLLIPLFLLLGLSLRGQGNFFSFLPVLNWASMHRTQRVDDPQDVFKPTTSRLKQPLQGDSEAFPWHWMSGVEQQVASLSGQCHHHGENLRELTTLLQKLQARVDQMEGGAAGPSASVRDAVGQPPRETDFMAFHQEHEVRMSHLEDILGKLREKSEAIQKELEQTKQKTISAVGEQLLPTVEHLQLELDQLKSELSSWRHVKTGCETVDAVQERVDVQVREMVKLLFSEDQQGGSLEQLLQRFSSQFVSKGDLQTMLRDLQLQILRNVTHHVSVTKQLPTSEAVVSAVSEAGASGITEAQARAIVNSALKLYSQDKTGMVDFALESGGGSILSTRCSETYETKTALMSLFGIPLWYFSQSPRVVIQPDIYPGNCWAFKGSQGYLVVRLSMMIHPAAFTLEHIPKTLSPTGNISSAPKDFAVYGLENEYQEEGQLLGQFTYDQDGESLQMFQALKRPDDTAFQIVELRIFSNWGHPEYTCLYRFRVHGEPVK

SEQ ID NO: 49046 - protein, 86 aa, Homo sapiens
MNFGTKSFQPRPPDKGSFPLDHLGECKSFKEKFMKCLHNNNFENALCRKESKEYLECRMERKLMLQEPLEKLGFGDLTSGKSEAKK

SEQ ID NO: 49047 - protein, 879 aa, Homo sapiens
MTTSFRDGLAFCAILHRHRPDLINFSALKKENIYENNKLAFRVAEEHLGIPALLDAEDMVALKVPDRLSILTYVSQYYNYFHGRSPIGGMAGVKRASEDSEEEPSGKKAPVQAAKLPSPAPARKPPLSPAQTNPVVQRRNEGAGGPPPKTDQALAGSLVSSTCGVCGKHVHLVQRHLADGRLYHRSCFRCKQCSCTLHSGAYKATGEPGTFVCTSHLPAAASASPKLTGLVPRQPGAMGVDSRTSCSPQKAQEANKARPSAWEPAAGNSPARASVPAAPNPAATSATSVHVRSPARPSESRLAPTPTEGKVRPRVTNSSPMGWSSAAPCTAAAASHPAVPPSAPDPRPATPQGGGAPRVAAPQTTLSSSSTSAATVDPPAWTPSASRTQQARNKFFQTSAVPPGTSLSGRGPTPSLVLSKDSSKEQARNFLKQALSALEEAGAPAPGRPSPATAAVPSSQPKTEAPQASPLAKPLQSSSPRVLGLPSRMEPPAPLSTSSTSQASALPPAGRRNLAESSGVGRVGAGSRPKPEAPMAKGKSTTLTQDMSTSLQEGQEDGPAGWRANLKPVDRRSPAERTLKPKEPRALAEPRAGEAPRKVSGSFAGSVHITLTPVRPDRTPRPASPGPSLPARSPSPPRRRRLAVPASLDVCDNWLRPEPPGQEARVQSWKEEEKKPHLQGKPGRPLSPANVPALPGETVTSPVRLHPDYLSPEEIQRQLQDIERRLDALELRGVELEKRLRAAEGDDAEDSLMVDWFWLIHEKQLLLRQESELMYKSKAQRLEEQQLDIEGELRRLMAKPEALKSLQERRREQELLEQYVSTVNDRSDIVDSLDEDRLREQEEDQMLRDMIEKLGLQRKKSKFRLSKIWSPKSKSSPSQ

SEQ ID NO: 49048 - protein, 236 aa, Homo sapiens
MTFIFTDGEDEALARHTGNVVITNCSAAHSRQALSCKMAVEYDRFIESGRKWFCHVDDDNYVNLRALLRLLASYPHTRDVYVGKPSLDRPIQAMERVSENKVRPVHFWFATGGAGFCISRGLALKMSPWASGGHFMNTAERIRLPDDCTIGYIVEALLGVPLIRSGLFHSHLENLQQVPTSELHEQVTLSYGMFENKRNAVHVKGPFSVEADPSRFRSIHCHLYPDTPWCPRTAIF

SEQ ID NO: 49049 - protein, 218 aa, Homo sapiens
MTFIFTDGEDEALARHTGNVVITNCSAAHSRQALSCKMAVEYDRFIESGRKWFCHVDDDNYVNLRALLRLLASYPHTRDVYVGKPSLDRPIQAMERVSENKVRPVHFWFATGGAGFCISRGLALKMSPWASGGHFMNTAERIRLPDDCTIGYIVEALLGVPLIRSGLFHSHLENLQQVPTSELHEQVTLSYGMFENKRNAVHVKGPFSVEADPSRWGN

SEQ ID NO: 49050 - protein, 651 aa, Homo sapiens
MAKVVVLSPGTLQEDQATLLSKRLVDWLRYASLQQGLPHSGGFFSTPRARQPGPVTEVDGAVATDFFTVLSSGHRFTDDQWLNVQAFSMLRAWLLHSGPEGPGTLDTDDRSEQEGSTLSVISATSSAGRLLPPRERLREVAFEYCQRLIEQSNRRALRKGDSDLQKACLVEAVLVLDVLCRQDPSFLYRSLSCLKALHGRVRGDPASVRVLLPLAHFFLSHGEAAAVDSEAVYQHLFTRIPVEQFHSPMLAFEFIQFCRDNLHLFSGHLSTLRLSFPNLFKFLAWNSPPLTSEFVALLPALVDAGTALEMLHALLDLPCLTAVLDLQLRSAPAASERPLWDTSLRAPSCLEAFRDPQFQGLFQYLLRPKASGATERLAPLHQLLQPMAGCARVAQCAQAVPTLLQAFFSAVTQVADGSLINQLALLLLGRSDSLYPAPGYAAGVHSVLSSQFLALCTLKPSLVVELARDLLEFLGSVNGLCSRASLVTSVVWAIGEYLSVTYDRRCTVEQINKFFEALEALLFEVTQCRPSAALPRCPPQVVTVLMTTLTKLASRSQDLIPRASLLLSKMRTLAHSPATSSTHSEEGAEAIRTRATELLTLLKMPSVAQFVLTPSTEVCSPRYHRDANTALPLALRTVSRLVEREAGLMPG

SEQ ID NO: 49051 - protein, 2894 aa, Homo sapiens
MGPSASSHGSPVPLPSDLSFRSPTPSNLPMVQLWAAHAHEGFSHLPSGLYPSYLHLNHLEPPSSGSPLLSQLGQPSIFDTQKGQGPGGDGFYLPTAGAPGSLHSHAPSARTPGGGHSSGAPAKGSSSRDGPAKERAGRGGEPPPLFGKKDPRARGEEASGPRGVVDLTQEARAEGRQDRGPPRLAERLSPFLAESKTKNAALQPSVLTMCNGGAGDVGLPALVAEAGRGGAKEAARQDEGARLLRRTETLLPGPRPCPSPLPPPPAPPKGPPAPPAATPAGVYTVFREQGREHRVVAPTFVPSVEAFDERPGPIQIASQARDARAREREAGRPGVLQAPPGSPRPLDRPEGLREKNSVIRSLKRPPPADAPTVRATRASPDPRAYVPAKELLKPEADPRPCERAPRGPAGPAAQQAAKLFGLEPGRPPPTGPEHKWKPFELGNFAATQMAVLAAQHHHSRAEEEAAVVAASSSKKAYLDPGAVLPRSAATCGRPVADMHSAAHGSGEASAMQSLIKYSGSFARDAVAVRPGGCGKKSPFGGLGTMKPEPAPTSAGASRAQARLPHSGGPAAGGGRQLKRDPERPESAKAFGREGSGAQGEAEVRHPPVGIAVAVARQKDSGGSGRLGPGLVDQERSLSLSNVKGHGRADEDCVDDRARHREERLLGARLDRDQEKLLRESKELADLARLHPTSCAPNGLNPNLMVTGGPALAGSGRWSADPAAHLATHPWLPRSGNASMWLAGHPYGLGPPSLHQGMAPAFPPGLGGSLPSAYQFVRDPQSGQLVVIPSDHLPHFAELMERATVPPLWPALYPPGRSPLHHAQQLQLFSQQHFLRQQEFLYLQQQAAQALELQRSAQLVQERLKAQEHRAEMEEKGSKRGLEAAGKAGLATAGPGLLPRKPPGLAAGPAGTYGKAVSPPPSPRASPVAALKAKVIQKLEDVSKPPAYAYPATPSSHPTSPPPASPPPTPGITRKEEAPENVVEKKDLELEKEAPSPFQALFSDIPPRYPFQALPPHYGRPYPFLLQPTAAADADGLAPDVPLPADGPERLALSPEDKPIRLSPSKITEPLREGPEEEPLAEREVKAEVEDMDEGPTELPPLESPLPLPAAEAMATPSPAGGCGGGLLEAQALSATGQSCAEPSECPDFVEGPEPRVDSPGRTEPCTAALDLGVQLTPETLVEAKEEPVEVPVAVPVVEAVPEEGLAQVAPSESQPTLEMSDCDVPAGEGQCPSLEPQEAVPVLGSTCFLEEASSDQFLPSLEDPLAGMNALAAAAELPQARPLPSPGAAGAQALEKLEAAESLVLEQSFLHGITLLSEIAELELERRSQEMGGAERALVARPSLESLLAAGSHMLREVLDGPVVDPLKNLRLPRELKPNKKYSWMRKKEERMYAMKSSLEDMDALELDFRMRLAEVQRQYKEKQRELVKLQRRRDSEDRREEPHRSLARRGPGRPRKRTHAPSALSPPRKRGKSGHSSGKLSSKSLLTSDDYELGAGIRKRHKGSEEEHDALIGMGKARGRNQTWDEHEASSDFISQLKIKKKKMASDQEQLASKLDKALSLTKQDKLKSPFKFSDSAGGKSKTSGGCGRYLTPYDSLLGKNRKALAKGLGLSLKSSREGKHKRAAKTRKMEVGFKARGQPKSAHSPFASEVSSYSYNTDSEEDEEFLKDEWPAQGPSSSKLTPSLLCSMVAKNSKAAGGPKLTKRGLAAPRTLKPKPATSRKQPFCLLLREAEARSSFSDSSEESFDQDESSEEEDEEEELEEEDEASGGGYRLGARERALSPGLEESGLGLLARFAASALPSPTVGPSLSVVQLEAKQKARKKEERQSLLGTEFEYTDSESEVKVRKRSPAGLLRPKKGLGEPGPSLAAPTPGARGPDPSSPDKAKLAVEKGRKARKLRGPKEPGFEAGPEASDDDLWTRRRSERIFLHDASAAAPAPVSTAPATKTSRCAKGGPLSPRKDAGRAKDRKDPRKKKKGKEAGPGAGLPPPRAPALPSEARAPHASSLTAAKRSKAKAKGKEVKKENRGKGGAVSKLMESMAAEEDFEPNQDSSFSEDEHLPRGGAVERPLTPAPRSCIIDKDELKDGLRVLIPMDDKLLYAGHVQTVHSPDIYRVVVEGERGNRPHIYCLEQLLQEAIIDVRPASTRFLPQGTRIAAYWSQQYRCLYPGTVVRGLLDLEDDGDLITVEFDDGDTGRIPLSHIRLLPPDYKIQCAEPSPALLVPSAKRRSRKTSKDTGEGKDGGTAGSEEPGAKARGRGRKPSAKAKGDRAATLEEGNPTDEVPSTPLALEPSSTPGSKKSPPEPVDKRAKAPKARPAPPQPSPAPPAFTSCPAPEPFAELPAPATSLAPAPLITMPATRPKPKKARAAEESGAKGPRRPGEEAELLVKLDHEGVTSPKSKKAKEALLLREDPGAGGWQEPKSLLSLGSYPPAAGSSEPKAPWPKATDGDLAQEPGPGLTFEDSGNPKSPDKAQAEQDGAEESESSSSSSSGSSSSSSSSSSSGSETEGEEEGDKNGDGGCGTGGRNCSAASSRAASPASSSSSSSSSSSSSSSSSSSSSSSSSSSSSSSSSSSSSSSSSSSSSSSSSSSSSSSSSSTTDEDSSCSSDDEAAPAPTAGPSAQAALPTKATKQAGKARPSAHSPGKKTPAPQPQAPPPQPTQPLQPKAQAGAKSRPKKREGVHLPTTKELAKRQRLPSVENRPKIAAFLPARQLWKWFGKPTQRRGMKGKARKLFYKAIVRGKEMIRIGDCAVFLSAGRPNLPYIGRIQSMWESWGNNMVVRVKWFYHPEETSPGKQFHQGQHWDQKSSRSLPAALRVSSQRKDFMERALYQSSHVDENDVQTVSHKCLVVGLEQYEQMLKTKKYQDSEGLYYLAGTYEPTTGMIFSTDGVPVLC

SEQ ID NO: 49052 - protein, 618 aa, Homo sapiens
MAGCYWLPGSTVEHVARCRSLVKVNLSGCHLTSLRLSKMLSALQHLRSLAIDVSPGFDASQLSSECKATLSRVRELKQTLFTPSYGVVPCCTSLEKLLLYFEILDRTREGAILSGQLMVGQSNVPHYQNLRVFYARLAPGYINQEVVRLYLAVLSDRTPQNLHAFLISVPGSFAESGATKNLLDSMARNVVLDALQLPKSWLNGSSLLQHMKFNNPFYFSFSRCTLSGGHLIQQVINGGKDLRSLASLNLSGCVHCLSPDSLLRKAEDDIDSSILETLVASCCNLRHLNLSAAHHHSSEGLGRHLCQLLARLRHLRSLSLPVCSVADSAPRADRAPAQPAMHAVPRGFGKKVRVGVQSCPSPFSGQACPQPSSVFWSLLKNLPFLEHLELIGSNFSSAMPRNEPAIRNSLPPCSRAQSVGDSEVAAIGQLAFLRHLTLAQLPSVLTGSGLVNIGLQCQQLRSLSLANLGMMGKVVYMPALSDMLKHCKRLRDLRLEQPYFSANAQFFQALSQCPSLQRLCLVSRSGTLQPDAVLAFMARCLQVVMCHLFTGESLATCKSLQQSLLRSFQAERPALNVVIFPLLHEGLTDVIRDVPLVHLDEITLFKSRVAEEPPNLWW

SEQ ID NO: 49053 - protein, 1178 aa, Homo sapiens
MLSHEHSKTCHAEGFCMMCTMQAHITQALSNPGDVIKPMFVINEMRRIARHFRFGNQEDAHEFLQYTVDAMQKACLNGSNKLDRHTQATTLVCQIFGGYLRSRVKCLNCKGVSDTFDPYLDITLEIKAAQSVNKALEQFVKPEQLDGENSYKCSKCKKMVPASKRFTIHRSSNVLTLSLKRFANFTGGKIAKDVKYPEYLDIRPYMSQPNGEPIVYVLYAVLVHTGFNCHAGHYFCYIKASNGLWYQMNDSIVSTSDIRSVLSQQAYVLFYIRSHDVKNGGELTHPTHSPGQSSPRPVISQRVVTNKQAAPGFIGPQLPSHMIKNPPHLNGTGPLKDTPSSSMSSPNGNSSVNRASPVNASASVQNWSVNRSSVIPEHPKKQKITISIHNKLPVRQCQSQPNLHSNSLENPTKPVPSSTITNSAVQSTSNASTMSVSSKVTKPIPRSESCSQPVMNGKSKLNSSVLVPYGAESSEDSDEESKGLGKENGIGTIVSSHSPGQDAEDEEATPHELQEPMTLNGANSADSDSDPKENGLAPDGASCQGQPALHSENPFAKANGLPGKLMPAPLLSLPEDKILETFRLSNKLKGSTDEMSAPGAERGPPEDRDAEPQPGSPAAESLEEPDAAAGLSSTKKAPPPRDPGTPATKEGAWEAMAVAPEEPPPSAGEDIVGDTAPPDLCDPGSLTGDASPLSQDAKGMIAEGPRDSALAEAPEGLSPAPPARSEEPCEQPLLVHPSGDHARDAQDPSQSLGAPEAAERPPAPVLDMAPAGHPEGDAEPSPGERVEDAAAPKAPGPSPAKEKIGSLRKVDRGHYRSRRERSSSGEPARESRSKTEGHRHRRRRTCPRERDRQDRHAPEHHPGHGDRLSPGERRSLGRCSHHHSRHRSGVELDWVRHHYTEGERGWGREKFYPDRPRWDRCRYYHDRYALYAARDWKPFHGGREHERAGLHERPHKDHNRGRRGCEPARERERHRPSSPRAGAPHALAPHPDRFSHDRTALVAGDNCNLSDRFHEHENGKSRKRRHDSVENSDSHVEKKARRSEQKDPLEEPKAKKHKKSKKKKKSKDKHRDRDSRHQQDSDLSAACSDADLHRHKKKKKKKKRHSRKSEDFVKDSELHLPRVTSLETVAQFRRAQGGFPLSGGPPLEGVGPFREKTKHLRMESRDDRCRLFEYGQGD

SEQ ID NO: 49054 - protein, 351 aa, Homo sapiens
MTEIDNLTSVEESKTTQRNKQIAMGRKKFNMDPKKGIQFLIENDLLQSSPEDVAQFLYKGEGLNKTVIGDYLGERDEFNIKVLQAFVELHEFADLNLVQALRQFLWSFRLPGEAQKIDRMMEAFASRYCLCNPGVFQSTDTCYVLSFAIIMLNTSLHNHNVRDKPTAERFIAMNRGINEGGDLPEELLRNLYESIKNEPFKIPEDDGNDLTHTFFNPDREGWLLKLGGRVKTWKRRWFILTDNCLYYFEYTTDKEPRGIIPLENLSIREVEDPRKPNCFELYNPSHKGQVIKACKTEADGRVVEGNHVVYRISAPSPEEKEEWMKSIKASISRDPFYDMLATRKRRIANKK

SEQ ID NO: 49055 - protein, 267 aa, Homo sapiens [sequence omitted]

SEQ ID NO: 49056 - protein, 270 aa, Homo sapiens
MTGPQNLEKKAKHVKATWAQRCNKVLFMSSEENKDFPAVGLKTKEGRDQLYWKTIKAFQYVHEHYLEDADWFLKADDDTYVILDNLRWLLSKYDPEEPIYFGRRFKPYVKQGYMSGGAGYVLSKEALKRFVDAFKTDKCTHSSSIEDLALGRCMEIMNVEAGDSRDTIGKETFHPFVPEHHLIKGYLPRTFWYWNYNYYPPVEGPGCCSDLAVSFHYVDSTTMYELEYLVYHLRPYGYLYRYQPTLPERILKEISQANKNEDTKVKLGNP

SEQ ID NO: 49057 - protein, 249 aa, Homo sapiens
MRNGLVNSEVHNEDGRNGDVSQFPYVEFTGRDSVTCPTCQGTGRIPRGQENQLVALIPYSDQRLRPRRTKLYVMASVFVCLLLSGLAVFFLFPRSIDVKYIGVKSAYVSYDVQKRTIYLNITNTLNITNNNYYSVEVENITAQVQFSKTVIGKARLNNITIIGPLDMKQIDYTVPTVIAEEMSYMYDFCTLISIKVHNIVLMMQVTVTTTYFGHSEQISQERYQYVDCGRNTTYQLGQSEYLNVLQPQQ

SEQ ID NO: 49058 - protein, 391 aa, Homo sapiens
MHAAYKGKLDMCKLLLRHGADVNCHQHEHGYTALMFAALSGNKDITWVMLEAGAETDVVNSVGRTAAQMAAFVGQHDCVTIINNFFPRERLDYYTKPQGLDKEPKLPPKLAGPLHKIITTTNLHPVKIVMLVNENPLLTEEAALNKCYRVMDLICEKCMKQRDMNEVLAMKMHYISCIFQKCINFLKDGENKLDTLIKSLLKGRASDGFPVYQEKIIRESIRKFPYCEATLLQQLVRSIAPVEIGSDPTAFSVLTQAITGQVGFVDVEFCTTCGEKGASKRCSVCKMVIYCDQTCQKTHWFTHKKICKNLKDIYEKQQLEAAKEKRQEENHGKLDVNSNCVNEEQPEAEVGISQKDSNPEDSGEGKKESLESEAELEGLQDAPAGPQVSEE

SEQ ID NO: 49059 - protein, 35 aa, Homo sapiens
MKGLDDFYYCPHFTGFKRGADPGMPEPTVLSLLWG

SEQ ID NO: 49060 - protein, 116 aa, Homo sapiens
MKSNKEGTRCIQVEITPTSSRISRNAVTSMSIRGHRWKRHEQPDNNNDATELGILVIPEISVTNVAGERTGNGEKGRTLGEIDAQHIQGVQETATDPRTESKGLPEIRRQKSEIQN

SEQ ID NO: 49061 - protein, 93 aa, Homo sapiens [sequence omitted]

SEQ ID NO: 49062 - protein, 173 aa, Homo sapiens
MGKKQNGKSKKVEEAEPEEFVVEKVLDRRVVNGKVEYFLKWKGFTDADNTWEPEENLDCPELIEAFLNSQKAGKEKDGTKRKSLSDSESDDSKSKKKRDAADKPRGFARGLDPERIIGATDSSGELMFLMKWKDSDEADLVLAKEANMKCPQIVIAFYEERLTWHSCPEDEAQ

SEQ ID NO: 49063 - protein, 283 aa, Homo sapiens [sequence omitted]

SEQ ID NO: 49064 - protein, 945 aa, Homo sapiens [sequence omitted]

SEQ ID NO: 49065 - protein, 50 aa, Homo sapiens
MGQHEAGRGLPGDSSLFKMPRTWMTHSQDPPPVTYIGEPARSLEPSVDSA

SEQ ID NO: 49066 - protein, 577 aa, Homo sapiens
MVLATCSSYFRAMFMSGLSESKQTHVHLRNVDAATLQIIITYAYTGNLAMNDSTVEQLYETACFLQVEDVLQRCREYLIKKINAENCVRLLSFADLFSCEELKQSAKRMVEHKFTAVYHQDAFMQLSHDLLIDILSSDNLNVEKEETVREAAMLWLEYNTESRSQYLSSVLSQIRIDALSEVTQRAWFQGLPPNDKSVVVQGLYKSMPKFFKPRLGMTKEEMMIFIEASSENPCSLYSSVCYSPQAEKVYKLCSPPADLHKVGTVVTPDNDIYIAGGQVPLKNTKTNHSKTSKLQTAFRTVNCFYWFDAQQNTWFPKTPMLFVRIKPSLVCCEGYIYAIGGDSVGGELNRRTVERYDTEKDEWTMVSPLPCAWQWSAAVVVHDCIYVMTLNLMYCYFPRSDSWVEMAMRQTSRSFASAAAFGDKIFYIGGLHIATNSGIRLPSGTVDGSSVTVEIYDVNKNEWKMAANIPAKRYSDPCVRAVVISNSLCVFMRETHLNERAKYVTYQYDLELDRWSLRQHISERVLWDLGRDFRCTVGKLYPSCLEESPWKPPTYLFSTDGTEEFELDGEMVALPPV

SEQ ID NO: 49067 - protein, 477 aa, Homo sapiens
MDQALVGMCVNERRFVKIPPKLAYGNEGVSGVIPPNSVLHFDVLLMDIWNSEDQVQIHTYFKPPSCPRTIQVSDFVRYHYNGTFLDGTLFDSSHNRMKTYDTYVGIGWLIPGMDKGLLGMCVGEKRIITIPPFLAYGEDGDGKDIPGQASLVFDVALLDLHNPKDSISIENKVVPENCERISQSGDFLRYHYNGTLLDGTLFDSSYSRNRTFDTYIGQGYVIPGMDEGLLGVCIGEKRRIVVPPHLGYGEEGRGNIPGSAVLVFDIHVIDFHNPSDSISITSHYKPPDCSVLSKKGDYLKYHYNASLLDGTLLDSTWNLGKTYNIVLGSGQVVLGMDMGLREMCVGEKRTVIIPPHLGYGEAGVDGEVPGSAVLVFDIELLELVAGLPEGYMFIWNGEVSPNLFEEIDKDGNGEVLLEEFSEYIHAQVASGKGKLAPGFDAELIVKNMFTNQDRNGDGKVTAEEFKLKDQEAKHDEL

SEQ ID NO: 49068 - protein, 401 aa, Homo sapiens [sequence omitted]

SEQ ID NO: 49069 - protein, 1102 aa, Homo sapiens
MAERPTAAPRSMTHAKRARQPLSEASNQQPLSGGEEKSCTKPSPSKKRCSDNTEVEVSNLENKQPVESTSAKSCSPSPVSPQVQPQAADTISDSVAVPASLLGMRRGLNSRLEATAASSVKTRMQKLAEQRRRWDNDDMTDDIPESSLFSPMPSEEKAASPPRPLLSNASATPVGRRGRLANLAATICSWEDDVNHSFAKQNSVQEQPGTACLSKFSSASGASARINSSSVKQEATFCSQRDGDASLNKALSSSADDASLVNASISSSVKATSPVKSTTSITDAKSCEGQNPELLPKTPISPLKTGVSKPIVKSTLSQTVPSKGELSREICLQSQSKDKSTTPGGTGIKPFLERFGERCQEHSKESPARSTPHRTPIITPNTKAIQERLFKQDTSSSTTHLAQQLKQERQKELACLRGRFDKGNIWSAEKGGNSKSKQLETKQETHCQSTPLKKHQGVSKTQSLPVTEKVTENQIPAKNSSTEPKGFTECEMTKSSPLKITLFLEEDKSLKVTSDPKVEQKIEVIREIEMSVDDDDINSSKVINDLFSDVLEEGELDMEKSQEEMDQALAESSEEQEDALNISSMSLLAPLAQTVGVVSPESLVSTPRLELKDTSRSDESPKPGKFQRTRVPRAESGDSLGSEDRDLLYSIDAYRSQRFKETERPSIKQVIVRKEDVTSKLDEKNNAFPCQVNIKQKMQELNNEINMQQTVIYQASQALNCCVDEEHGKGSLEEAEAERLLLIATGKRTLLIDELNKLKNEGPQRKNKASPQSEFMPSKGSVTLSEIRLPLKADFVCSTVQKPDAANYYYLIILKAGAENMVATPLASTSNSLNGDALTFTTTFTLQDVSNDFEINIEVYSLVQKKDPSGLDKKKKTSKSKAITPKRLLTSITTKSNIHSSVMASPGGLSAVRTSNFALVGSYTLSLSSVGNTKFVLDKVPFLSSLEGHIYLKIKCQVNSSVEERGFLTIFEDVSGFGAWHRRWCVLSGNCISYWTYPDDEKRKNPIGRINLANCTSRQIEPANREFCARRNTFELITVRPQREDDRETLVSQCRDTLCVTKNWLSADTKEERDLWMQKLNQVLVDIRLWQPDACYKPIGKP

SEQ ID NO: 49070 - protein, 368 aa, Homo sapiens
MRVAGREGRFLSAGVAAREGSAMFLSILVALCLWLHLALGVRGAPCEAVRIPMCRHMPWNITRMPNHLHHSTQENAILAIEQYEELVDVNCSAVLRFFLCAMYAPICTLEFLHDPIKPCKSVCQRARDDCEPLMKMYNHSWPESLACDELPVYDRGVCISPEAIVTDLPEDVKWIDITPDMMVQERPLDVDCKRLSPDRCKCKKVKPTLATYLSKNYSYVIHAKIKAVQRSGCNEVTTVVDVKEIFKSSSPIPRTQVPLITNSSCQCPHILPHQDVLIMCYEWRSRMMLLENCLVEKWRDQLSKRSIQWEERLQEQRRTVQDKKKTAGRTSRSNPPKPKGKPPAPKPASPKKNIKTRSAQKRTNPKRV

SEQ ID NO: 49071 - protein, 188 aa, Homo sapiens
MVGSGGVGKSALTLQFMYDEFVEDYEPTKADSYRKKVVLDGEEVQIDILDTAGQEDYAAIRDNYFRSGEGFLCVFSITEMESFAATADFREQILRVKEDENVPFLLVGNKSDLEDKRQVSVEEAKNRAEQWNVNYVETSAKTRANVDKVFFDLMREIRARKMEDSKEKNGKKKRKSLAKRIRERCCIL

SEQ ID NO: 49072 - protein, 464 aa, Homo sapiens
MLATLARVAALRRTCLFSGRGGGRGLWTGRPQSDMNNIKPLEGVKILDLTRVLAGPFATMNLGDLGAEVIKVERPGAGDDTRTWGPPFVGTESTYYLSVNRNKKSIAVNIKDPKGVKIIKELAAVCDVFVENYVPGKLSAMGLGYEDIDEIAPHIIYCSITGYGQTGPISQRAGYDAVASAVSGLMHITGPENGDPVRPGVAMTDLATGLYAYGAIMAGLIQKYKTGKGLFIDCNLLSSQVACLSHIAANYLIGQKEAKRWGTAHGSIVPYQAFKTKDGYIVVGAGNNQQFATVCKILDLPELIDNSKYKTNHLRVHNRKELIKILSERFEEELTSKWLYLFEGSGVPYGPINNMKNVFAEPQNAVSGFQSLLHSLAHGPFLHLQGSARVLHNGLVMEMEHPTVGKISVPGPAVRYSKFKMSEARPPPLLGQHTTHILKEVLRYDDRAIGELLSAGVVDQHETH

SEQ ID NO: 49073 - protein, 184 aa, Homo sapiens [sequence omitted]

SEQ ID NO: 49074 - protein, 159 aa, Homo sapiens [sequence omitted]

SEQ ID NO: 49075 - protein, 355 aa, Homo sapiens
MTSAWLAQGTGEGVNDVRKGACASHVSTMASFLKGAHVTINARAEEDVEPECIMEKVAKASGANYSFHKESGRFQDVGPQAPVGSVYQKTNAVSEIKRVGKDSFWAKAEKEEENRRLEEKRRAEEAQRQLEQERRERELREAARREQRYQEQGGEASPQRTWEQQQEVVSRNRNEQESAVHPREIFKQKERAMSTTSISSPQPGKLRSPFLQKQLTQPETHFGREPAAAISRPRADLPAEEPAPSTPPCLVQAEEEAVYEEPPEQETFYEQPPLVQQQGAGSEHIDHHIQGQGLSGQGLCARALYDYQAADDTEISFDPENLITGIEVIDEGWWRGYGPDGHFGMFPANYVELIE

SEQ ID NO: 49076 - protein, 354 aa, Homo sapiens
MVEELNSGKVMYAFCRVKDPNSGLPKFVLINWGAHVTINARAEEDVEPECIMEKVAKASGANYSFHKESGRFQDVGPQAPVGSVYQKTNAVSEIKRVGKDSFWAKAEKEEENRRLEEKRRAEEAQRQLEQERRERELREAARREQRYQEQGGEASPQSRTWEQQQEVVSRNRNEQESAVHPREIFKQKERAMSTTSISSPQPGKLRSPFLQKQLTQPETHFGREPAAAISRPRADLPAEEPAPSTPPCLVQAEEEAVYEEPPEQETFYEQPPLVQQQGAGSEHIDHHIQGQGLSGQGLCARALYDYQAADDTEISFDPENLITGIEVIDEGWWRGYGPDGHFGMFPANYVELIE

SEQ ID NO: 49077 - protein, 387 aa, Homo sapiens
MVEELNSGKVMYAFCRVKDPNSGLPKFVLINWTGEGVNDVRKGACASHVSTMASFLKGAHVTINARAEEDVEPECIMEKVAKASGANYSFHKESGRFQDVGPQAPVGSVYQKTNAVSEIKRVGKDSFWAKAEKEEENRRLEEKRRAEEAQRQLEQERRERELREAARREQRYQEQGGEASPQSRTWEQQQEVVSRNRNEQGSTCASLQESAVHPREIFKQKERAMSTTSISSPQPGKLRSPFLQKQLTQPETHFGREPAAAISRPRADLPAEEPAPSTPPCLVQAEEEAVYEEPPEQETFYEQPPLVQQQGAGSEHIDHHIQGQGLSGQGLCARALYDYQAADDTEISFDPENLITGIEVIDEGWWRGYGPDGHFGMFPANYVELIE

SEQ ID NO: 49078 - protein, 379 aa, Homo sapiens
MVEELNSGKVMYAFCRVKDPNSGLPKFVLINWTGEGVNDVRKGACASHVSTMASFLKGAHVTINARAEEDVEPECIMEKVAKASGANYSFHKESGRFQDVGPQAPVGSVYQKTNAVSEIKRVGKDSFWAKAEKEEENRRLEEKRRAEEAQRQLEQERRERELREAARREQRYQEQGGEASPQSRTWEQQQEVVSRNRNEQESAVHPREIFKQKERAMSTTSISSPQPGKLRSPFLQKQLTQPETHFGREPAAAISRPRADLPAEEPAPSTPPCLVQAEEEAVYEEPPEQETFYEQPPLVQQQGAGSEHIDHHIQGQGLSGQGLCARALYDYQAADDTEISFDPENLITGIEVIDEGWWRGYGPDGHFGMFPANYVELIE

SEQ ID NO: 49079 - protein, 409 aa, Homo sapiens [sequence omitted]

SEQ ID NO: 49080 - protein, 311 aa, Homo sapiens [sequence omitted]

SEQ ID NO: 49081 - protein, 577 aa, Homo sapiens
MEPVEKERASTPYIEKQVDHLIKKATRPEELLELLGGSHDLDSNQAAMVLIRLSHLLSEKPEDKGLLIQDAHFHQLLCLLNSQIASVWHGTLSKLLGSLYALGIPKASKELQSVEQEVRWRMRKLKYKHLAFLAESCATLSQEQHSQELLAELLTHLERRWTEIEDSHTLVTVMMKVGHLSEPLMNRLEDKCLELVEHFGPNELRKVLVMLAAQSRRSVPLLRAISYHLVQKPFSLTKDVLLDVAYAYGKLSFHQTQVSQRLATDLLSLMPSLTSGEVAHCAKSFALLKWLSLPLFEAFAQHVLNRAQDITLPHLCSVLLAFARLNFHPDQEDQFFSLVHEKLGSELPGLEPALQVDLVWALCVLQQAREAELQAVLHPEFHIQFLGGKSQKDQNTFQKLLHINATALLEYPEYSGPLLPASAVAPGPSALDRKVTPLQKELQETLKGLLGSADKGSLEVATQYGWVLDAEVLLDSDGEFLPVRDFVAPHLAQPTGSQSPPPGSKRLAFLRWEFPNFNSRSKDLLGRFVLARRHIVAAGFLIVDVPFYEWLELKSEWQKGAYLKDKMRKAVAEELAK

SEQ ID NO: 49082 - protein, 1377 aa, Homo sapiens
MDVGWPELHAPPLDKMCTICKAQESWLNSNLQHVVVIHCRGGKGRIGVVISSYMHFTNVSASADQALDRFAMKKFYDDKVSALMQPSQKRYVQFLSGLLSGSVKMNASPLFLHFVILHGTPNFDTGGVCRPFLKLYQAMQPVYTSGIYNVGPENPSRICIVIEPAQLLKGDVMVKCYHKKYRSATRDVIFRLQFHTGAVQGYGLVFGKEDLDNASKDDRFPDYGKVELVFSATPEKIQGSEHLYNDHGVIVDYNTTDPLIRWDSYENLSADGEVLHTQGPVDGSLYAKVRKKSSSDPGIPGGPQAIPATNSPDHSDHTLSVSSDSGHSTASARTDKTEERLAPGTRRGLSAQEKAELDQLLSGFGLEDPGSSLKEMTDARSKYSGTRHVVPAQVHVNGDAALKDRETDILDDEMPHHDLHSVDSLGTLSSSEGPQSAHLGPFTCHKSSQNSLLSDGFGSNVGEDPQGTLVPDLGLGMDGPYERERTFGSREPKQPQPLLRKPSVSAQMQAYGQSSYSTQTWVRQQQMVVAHQYSFAPDGEARLVSRCPADNPGLVQAQPRVPLTPTRGTSSRVAVQRGVGSGPHPPDTQQPSPSKAFKPRFPGDQVVNGAGPELSTGPSPGSPTLDIDQSIEQLNRLILELDPTFEPIPTHMNALGSQANGSVSPDSVGGGLRASSRLPDTGEGPSRATGRQGSSAEQPLGGRLRKLSLGQYDNDAGGQLPFSKCAWGKAGVDYAPNLPPFPSPADVKETMTPGYPQDLDIIDGRILSSKESMCSTPAFPVSPETPYVKTALRHPPFSPPEPPLSSPASQHKGGREPRSCPETLTHAVGMSESPIGPKSTMLRADASSTPSFQQAFASSCTISSNGPGQRRESSSSAERQWVESSPKPMVSLLGSGRPTGSPLSAEFSGTRKDSPVLSCFPPSELQAPFHSHELSLAEPPDSLAPPSSQAFLGFGTAPVGSGLPPEEDLGALLANSHGASPTPSIPLTATGAADNGFLSHNFLTVAPGHSSHHSPGLQGQGVTLPGQPPLPEKKRASEGDRSLGSVSPSSSGFSSPHSGSTISIPFPNVLPDFSKASEAASPLPDSPGDKLVIVKFVQDTSKFWYKADISREQAIAMLKDKEPGSFIVRDSHSFRGAYGLAMKVATPPPSVLQLNKKAGDLANELVRHFLIECTPKGVRLKGCSNEPYFGSLTALVCQHSITPLALPCKLLIPERDPLEEIAESSPQTAANSAAELLKQGAACNVWYLNSVEMESLTGHQAIQKALSITLVQEPPPVSTVVHFKVSAQGITLTDNQRKLFFRRHYPVNSVIFCALDPQDRKWIKDGPSSKVFGFVARKQGSATDNVCHLFAEHDPEQPASAIVNFVSKVMIGSPKKV

SEQ ID NO: 49083 - protein, 486 aa, Homo sapiens
MLVSGAGDIKLTKDGNVLLHEMQIQHPTASLIAKVATAQDDITGDGTTSNVLIIGELLKQADLYISEGLHPRIITEGFEAAKEKALQFLEEVKVSREMDRETLIDVARTSLRTKVHAELADVLTEAVVDSILAIKKQDEPIDLFMIEIMEMKHKSETDTSLIRGLVLDHGARHPDMKKRVEDAYILTCNVSLEYEKTEVNSGFFYKSAEEREKLVKAERKFIEDRVKKIIELKRKVCGDSDKGFVVINQKGIDPFSLDALSKEGIVALRRAKRRNMERLTLACGGVALNSFDDLSPDCLGHAGLVYEYTLGEEKFTFIEKCNNPRSVTLLIKGPNKHTLTQIKDAVRDGLRAVKNAIDDGCVVPGAGAVEVAMAEALIKHKPSVKGRAQLGVQAFADALLIIPKVLAQNSGFDLQETLVKIQAEHSESGQLVGVDLNTGEPMVAAEVGVWDNYCVKKQLLHSCTVIATNILLVDEIMRAGMSSLKG

SEQ ID NO: 49084 - protein, 161 aa, Homo sapiens
MQPLKGEKVRQAFLGLMPYYKDHLERIVEIARLRAVQRKARFAKLKVCVFKEEMPITPYECPLLNSLRFERSESDGQLFEHHCEVDVSFGPWEAVADVYDLLHCLVTDLSAQGLTVDHQCIGVCDKHLVNHYYCKRPIYEFKITWWVIFSQGWNANFRGFF

SEQ ID NO: 49085 - protein, 66 aa, Homo sapiens [sequence omitted]

SEQ ID NO: 49086 - protein, 250 aa, Homo sapiens
MIDIQTRMAGRALELLYLPENKPCYLLDIGCGTGLSGSYLSDEGHYWVGLDISPAMLDEAVDREIEGDLLLGDMGQGIPFKPGTFDGCISISAVQWLCNANKKSENPAKRLYCFFASLFSVLVRGSRAVLQLYPENSEQLELITTQATKAGFSGGMVVDYPNSAKAKKFYLCLFSGPSTFIPEGLSENQDEVEPRESVFTNERFPLRMSRRGMVRKSRAWVLEKKERHRRQGREVRPDTQYTGRKRKPRF

SEQ ID NO: 49087 - protein, 202 aa, Homo sapiens
MSYEIMSQDLQDLLPQLGLVPCVVVGHSMGGKTAMLLALQRPELVERLIAVDISPVESTGVSHFATYVAAMRAINIADELPRSRARKLADEQLSSVIQDMAVRQHLLTNLVEVDGRFVWRVNLDALTQHLDKILAFPQRQESYLGPTLFLLGGNSQFVHPSHHPEIMRLFPRAQMQTVPNAGHWIHADRPQDFIAAIRGFLV

SEQ ID NO: 49088 - protein, 437 aa, Homo sapiens
MDNWKSKLDSLASDHQKSLEDLKATLNSGPGAQQKEIGELKAVMEGIKMEHQLELGNLQAKHDLETAMHVKEKEALREKLQEAQEELAGLQRHWRAQLEVQASQHRLELQEAQDQRRDAELRVHELEKLDVEYRGQAQAIEFLKEQISLAEKKMLDYERLQRAEAQGKQEVESLREKLLVAENRLQAVEALCSSQHTHMIESNDISEETIRTKETVEGLQDKLNKRDKEVTALTSQTEMLRAQVSALESKCKSGEKKVDALLKEKRRLEAELETVSRKTHDASGQLVLISQELLRKERSLNELRVLLLEANRHSPGPERDLSREVHKAEWRIKEQKLKDDIRGLREKLTGLDKEKSLSDQRRYSLIDRSSAPELLRLQHQLMSTEDALRDALDQAQQVEKLMEAMRSCPDKAQTIGNSGSANGIHQQDKAQKQEDKH

SEQ ID NO: 49089 - protein, 119 aa, Homo sapiens [sequence omitted]

SEQ ID NO: 49090 - protein, 225 aa, Homo sapiens
MAAAMKNVTELNEPLSNEERNLLSVAYKNVVGARRSSWRVISSIEQKTSADGNEKKIEMVRAYREKIEKELEAVCQDVLSLLDNYLIKNCSETQYESKVFYLKMKGDYYRYLAEVATGEKRATVVESSEKAYSEAHEISKEHMQPTHPIRLGLALNYSVFYYEIQNAPEQACHLAKTAFDDAIAELDTLNEDSYKDSTLIMQLLRDNLTLWTSDQQDDDGGEGNN

SEQ ID NO: 49091 - protein, 610 aa, Homo sapiens
MLLLGTVHCQIVSTRTPKPPLSTGGKRRRKLRKAAHLEVHREGDGSSTTDNTQEGAVQNHGTSTSHSVGTVFRDLWHAAFFLSGSKKAKNSIDKSTETDNGYVSLDGKKTVKSGEDGIQNHEPQCETIRPEETAWNTGTLRNGPSKDTQRTITNVSDEVSSEEGPETGYSLRRHVDRTSEGVLRNRKSHHYKKHYPNEDAPKSGTSCSSRCSSSRQDSESARPESETEDVLWEDLLHCAECHSSCTSETDVENHQINPCVKKEYRDDPFHQSHLPWLHSSHPGLEKISAIVWEGNDCKKADMSVLEISGMIMNRVNSHIPGIGYQIFGNAVSLILGLTPFVFRLSQATDLEQLTAHSASELYVIAFGSNEDVIVLSMVIISFVVRVSLVWIFFFLLCVAERTYKQRLLFAKLFGHLTSARRARKSEVPHFRLKKVQNIKMWLSLRSYLKRRGPQRSVDVIVSSAFLLTISVVFICCAQLLHVHEIFLDCHYNWELVIWCISLTLFLLRFVTLGSETSKKYSNTSILLTEQINLYLKMEKKPNKKEELTLVNNVLKLATKLLKELDSPFRLYGLTMNPLLYNITQVVILSAVSGVISDLLGFNLKLWKIKS

SEQ ID NO: 49092 - protein, 337 aa, Homo sapiens
MIDRNLREDGEKAAREVKLLLLGAGESGKSTIVKQMKIIHEAGYSEEECKQYKAVVYSNTIQSIIAIIRAMGRLKIDFGDSARADDARQLFVLAGAAEEGFMTAELAGVIKRLWKDSGVQACFNRSREYQLNDSAAYYLNDLDRIAQPNYIPTQQDVLRTRVKTTGIVETHFTFKDLHFKMFDVGGQRSERKKWIHCFEGVTAIIFCVALSDYDLVLAEDEEMNRMHESMKLFDSICNNKWFTDTSIILFLNKKDLFEEKIKKSPLTICYPEYAGSNTYEEAAAYIQCQFEDLNKRKDTKEIYTHFTCATDTKNVQFVFDAVTDVIIKNNLKDCGLF

SEQ ID NO: 49093 - protein, 320 aa, Homo sapiens [sequence omitted]

SEQ ID NO: 49094 - protein, 176 aa, Homo sapiens
MYDTTWYSSVDQLDLRVLQFALPLSMLIAMGALLLCLIGMCNTAFRSSVPNIKLAKCLVNSAGCHLVAGLLFFLAGTVSLSPSIWVIFYNIHLNKKFEPVFSFDYAVYVTIASAGGLFMTSLILFIWYCTCKSLPSPFWQPLYSHPPSMHTYSQPYSARSRLSAIEIDIPVVSHTT

SEQ ID NO: 49095 - protein, 1653 aa, Homo sapiens
MSTQDQHVLFGKFAQIIQEKEVEIDQLNEQVTKLQQQLKITTDNKVIEEKNELIRDLETQIECLMSDQECVKRNREEEIEQLNEVIEKLQQELANIGQKTSMNAHSLSEEADSLKHQLDVVIAEKLALEQQVETANEEMTFMKNVLKETNFKMNQLTQELFSLKRERESVEKIQSIPENSVNVAIDHLSKDKPELEVVLTEDALKSLENQTYFKSFEENGKGSIINLETRLLQLESTVSAKDLELTQCYKQIKDMQEQGQFETEMLQKKIVNLQKIVEEKVAAALVSQIQLEAVQEYAKFCQDNQTISSEPERTNIQNLNQLREDELGSDISALTLRISELESQVVEMHTSLILEKEQVEIAEKNVLEKEKKLLELQKLLEGNEKKQREKEKKRSPQDVEVLKTTTELFHSNEESGFFNELEALRAESVATKAELASYKEKAEKLQEELLVKETNMTSLQKDLSQVRDHLAEAKEKLSILEKEDETEVQESKKACMFEPLPIKLSKSIASQTDGTLKISSSNQTPQILVKNAGIQINLQSECSSEEVTEIISQFTEKIEKMQELHAAEILDMESRHISETETLKREHYVAVQLLKEECGTLKAVIQCLRSKEGSSIPELAHSDAYQTREICSSDSGSDWGQGIYLTHSQGFDIASEGRGEESESATDSFPKKIKGLLRAVHNEGMQVLSLTESPYSDGEDHSIQQVSEPWLEERKAYINTISSLKDLITKMQLQREAEVYDSSQSHESFSDWRGELLLALQQVFLEERSVLLAAFRTELTALGTTDAVGLLNCLEQRIQEQGVEYQAAMECLQKADRRSLLSEIQALHAQMNGRKITLKREQESEKPSQELLEYNIQQKQSQMLEMQVELSSMKDRATELQEQLSSEKMVVAELKSELAQTKLELETTLKAQHKHLKELEAFRLEVKDKTDEVHLLNDTLASEQKKSRELQWALEKEKAKLGRSEERDKEELEDLKFSLESQKQRNLQLNLLLEQQKQLLNESQQKIESQRMLYDAQLSEEQGRNLELQVLLESEKVRIREMSSTLDRERELHAQLQSSDGTGQSRPPLPSEDLLKELQKQLEEKHSRIVELLNETEKYKLDSLQTRQQMEKDRQVHRKTLQTEQEANTEGQKKMHELQSKVEDLQRQLEEKRQQVYKLDLEGQRLQGIMQEFQKQELEREEKRESRRILYQNLNEPTTWSLTSDRTRNWVLQQKIEGETKESNYAKLIEMNGGGTGCNHELEMIRQKLQCVASKLQVLPQKASERLQFETADDEDFIWVQENIDEIILQLQKLTGQQGEEPSLVSPSTSCGSLTERLLRQNAELTGHISQLTEEKNDLRNMVMKLEEQIRWYRQTGAGRDNSSRFSLNGGANIEAIIASEKEVWNREKLTLQKSLKRAEAEVYKLKAELRNDSLLQTLSPDSEHVTLKRIYGKYLRAESFRKALIYQKKYLLLLLGGFQECEDATLALLARMGGQPAFTDLEVITNRPKGFTRFRSAVRVSIAISRMKFLVRRWHRVTGSVSININRDGFGLNQGAEKTDSFYHSSGGLELYGEPRHTTYRSRSDLDYIRSPLPFQNRYPGTPADFNPGSLACSQLQNYDPDRALTDYITRLEALQRRLGTIQSGALSLTTSWQHHSARPTAPLSLKFFHTH

SEQ ID NO: 49096 - protein, 172 aa, Homo sapiens
MLIGLLLAGQHTSSTTSAWMGFFLARDKTLQKKCYLEQKTVCGENLPPLTYDQLKDLNLLDRCIKETLRLRPPIMIMMRMARTPQTVAGYTIPPGHQDNPASGEKFAYVPFGAGRHRCIGENFAYVQIKTIWSTMLRLYEFDLIDGYFPTVNYTTMIHTPENPVIRYKRRSK

SEQ ID NO: 49097 - protein, 1074 aa, Homo sapiens
MKELQTKQLQSNTVGITESNENESEIPVDSSSVASLWTMIGSIFSFQSEKKQETSWGLTEINAFKNMQSKVVPLDNIFRVCKSQPPSIYNASATSVFHKHCAIHVFPWDQEYFDVEPSFTVTYGKLVKLLSPKQQQSKTKQNVLSPEKEKQMSEPLDQKKIRSDHNEEDEKACVLQVVWNGLEELNNAIKYTKNVEVLHLGKVWIPDDLRKRLNIEMHAVVRITPVEVTPKIPRSLKLQPRENLPKDISEEDIKTVFYSWLQQSTTTMLPLVISEEEFIKLETKDGLKEFSLSIVHSWEKEKDKNIFLLSPNLLQKTTIQVLLDPMVKEENSEEIDFILPFLKLSSLGGVNSLGVSSLEHITHSLLGRPLSRQLMSLVAGLRNGALLLTGGKGSGKSTLAKAICKEAFDKLDAHVERVDCKALRGKRLENIQKTLEVAFSEAVWMQPSVVLLDDLDLIAGLPAVPEHEHSPDAVQSQRLAHALNDMIKEFISMGSLVALIATSQSQQSLHPLLVSAQGVHIFQCVQHIQPPNQEQRCEILCNVIKNKLDCDINKFTDLDLQHVAKETGGFVARDFTVLVDRAIHSRLSRQSISTREKLVLTTLDFQKALRGFLPASLRSVNLHKPRDLGWDKIGGLHEVRQILMDTIQLPAKYPELFANLPIRQRTGILLYGPPGTGKTLLAGVIARESRMNFISVKGPELLSKYIGASEQAVRDIFIRAQAAKPCILFFDEFESIAPRRGHDNTGVTDRVVNQLLTQLDGVEGLQGVYVLAATSRPDLIDPALLRPGRLDKCVYCPPPDQVSRLEILNVLSDSLPLADDVDLQHVASVTDSFTGADLKALLYNAQLEALHGMLLSSGLQDGSSSSDSDLSLSSMVFLNHSSGSDDSAGDGECGLDQSLVSLEMSEILPDESKFNMYRLYFGSSYESELGNGTSSDLSSQCLSAPSSMTQDLPGVPGKDQLFSQPPVLRTASQEGCQELTQEQRDQLRADISIIKGRYRSQSGEDESMNQPGPIKTRLAISQSHLMTALGHTRPSISEDDWKNFAELYESFQNPKRRKNQSGTMFRPGQKVTLA

SEQ ID NO: 49098 - protein, 1502 aa, Homo sapiens
MGKPSKNAPKDQTVSQKERRETSKQKQKGKENPDMANPSAMSTTAKGSKSLKVELIEDKIDYTKERQPSIDLTCVSYPFDEFSNPYRYKLDFSLQPETGPGNLIDPIHEFKAFTNTATATEEDVKMKFSNEVFRFASACMNSRTNGTIHFGVKDKPHGKIVGIKVTNDTKEALINHFNLMINKYFEDHQVQQAKKCIREPRFVEVLLPNSTLSDRFVIEVDIIPQFSECQYDYFQIKMQNYNNKIWEQSKKFSLFVRDGTSSKDITKNKVDFRAFKADFKTLAESRKAAEEKFRAKTNKKEREGPKLVKLLTGNQDLLDNSYYEQYILVTNKCHPDQTKHLDFLKEIKWFAVLEFDPESNINGVVKAYKESRVANLHFPSVYVEQKTTPNETISTLNLYHQPSWIFCNGRLDLDSEKYKPFDPSSWQRERASDVRKLISFLTHEDIMPRGKFLVVFLLLSSVDDPRDPLIETFCAFYQDLKGMENILCICVHPHIFQGWKDLLEARLIKHQDEISSQCISALSLEEINGTILKLKSVTQSSKRLLPSIGLSTVLLKKEEDIMTALEIICENECEGTLLEKDKNKFLEFKASKEEDFYRGGKVSWWNFYFSSESYSSPFVKRDKYERLEAMIQNCADSSKPTSTKIIHLYHHPGCGGTTLAMHILWELRKKFRCAVLKNKTVDFSEIGEQVTSLITYGAMNRQEYVPVLLLVDDFEEQDNVYLLQYSIQTAIAKKYIRYEKPLVIILNCMRSQNPEKSARIPDSIAVIQQLSPKEQRAFELKLKEIKEQHKNFEDFYSFMIMKTNFNKEYIENVVRNILKGQNIFTKEAKLFSFLALLNSYVPDTTISLSQCEKFLGIGNKKAFWGTEKFEDKMGTYSTILIKTEVIECGNYCGVRIIHSLIAEFSLEELKKSYHLNKSQIMLDMLTENLFFDTGMGKSKFLQDMHTLLLTRHRDEHEGETGNWFSPFIEALHKDEGNEAVEAVLLESIHRFNPNAFICQALARHFYIKKKDFGNALNWAKQAKIIEPDNSYISDTLGQVYKSKIRWWIEENGGNGNISVDDLIALLDLAEHASSAFKESQQQSEDREYEVKERLYPKSKRRYDTYNIAGYQGEIEVGLYTIQILQLIPFFDNKNELSKRYMVNFVSGSSDIPGDPNNEYKLALKNYIPYLTKLKFSLKKSFDFFDEYFVLLKPRNNIKQNEEAKTRRKVAGYFKKYVDIFCLLEESQNNTGLGSKFSEPLQVERCRRNLVALKADKFSGLLEYLIKSQEDAISTMKCIVNEYTFLLEQCTVKIQSKEKLNFILANIILSCIQPTSRLVKPVEKLKDQLREVLQPIGLTYQFSEPYFLASLLFWPENQQLDQHSEQMKEYAQALKNSFKGQYKHMHRTKQPIAYFFLGKGKRLERLVHKGKIDQCFKKTPDINSLWQSGDVWKEEKVQELLLRLQGRAENNCLYIEYGINEKITIPITPAFLGQLRSGRSIEKVSFYLGFSIGGPLAYDIEIV

SEQ ID NO: 49099 - protein, 1575 aa, Homo sapiens
MIKDWTKEHVKKWVNEDLKINEQYGQILLSEEVTGLVLQELTEKDLVEMGLPWGPALLIKRSYNKLNSKSPESDNHDPGQLDNSKPSKTEHQKNPKHTKKEEENSMSSNIDYDPREIRDIKQEESILMKENVLDEVANAKHKKKGKLKPEQLTCMPYPFDQFHDSHRYIEHYTLQPETGALNLIDPIHEFKALTNTETATEVDIKMKFSNEVFRFASACMNSRTNGTIHFGVKDKPHGEIVGVKITSKAAFIDHFNVMIKKYFEESEINEAKKCIREPRFVEVLLQNNTPSDRFVIEVDTIPKHSICNDKYFYIQMQICKDKIWKQNQNLSLFVREGASSRDILANSKQRDVDFKAFLQNLKSLVASRKEAEEEYGMKAMKKESEGLKLVKLLIGNRDSLDNSYYDWYILVTNKCHPNQIKHLDFLKEIKWFAVLEFDPESMINGVVKAYKESRVANLHFPNQYEDKTTNMWEKISTLNLYQQPSWIFCNGRSDLKSETYKPLEPHLWQRERASEVRKLILFLTDENIMTRGKFLVVFLLLSSVESPGDPLIETFWAFYQALKGMENMLCISVNSHIYQRWKDLLQTRMKMEDELTNHSISTLNIELVNSTILKLKSVTRSSRRFLPARGSSSVILEKKKEDVLTALEILCENECTETDIEKDKSKFLEFKKSKEEHFYRGGKVSWWNFYFSSENYSSDFVKRDSYEKLKDLIHCWAESPKPIFAKIINLYHHPGCGGTTLAMHVLWDLKKNFRCAVLKNKTTDFAEIAEQVINLVTYRAKSHQDYIPVLLLVDDFEEQENVYFLQNAIHSVLAEKDLRYEKTLVIILNCMRSRNPDESAKLADSIALNYQLSSKEQRAFGAKLKEIEKQHKNCENFYSFMIMKSNFDETYIENVVRNILKGQDVDSKEAQLISFLALLSSYVTDSTISVSQCEIFLGIIYTSTPWEPESLEDKMGTYSTLLIKTEVAEYGRYTGVRIIHPLIALYCLKELERSYHLDKCQIALNILEENLFYDSGIGRDKFQHDVQTLLLTRQRKVYGDETDTLFSPLMEALQNKDIEKVLSAGSRRFPQNAFICQALARHFYIKEKDFNTALDWARQAKMKAPKNSYISDTLGQVYKSEIKWWLDGNKNCRSITVNDLTHLLEAAEKASRAFKESQRQTDSKNYETENWSPQKSQRRYDMYNTACFLGEIEVGLYTIQILQLTPFFHKENELSKKHMVQFLSGKWTIPPDPRNECYLALSKFTSHLKNLQSDLKRCFDFFIDYMVLLKMRYTQKEIAEIMLSKKVSRCFRKYTELFCHLDPCLLQSKESQLLQEENCRKKLEALRADRFAGLLEYLNPNYKDATTMESIVNEYAFLLQQNSKKPMTNEKQNSILANIILSCLKPNSKLIQPLTTLKKQLREVLQFVGLSHQYPGPYFLACLLFWPENQELDQDSKLIEKYVSSLNRSFRGQYKRMCRSKQASTLFYLGKRKGLNSIVHKAKIEQYFDKAQNTNSLWHSGDVWKKNEVKDLLRRLTGQAEGKLISVEYGTEEKIKIPVISVYSGPLRSGRNIERVSFYLGFSIEGPLAYDIEVI

SEQ ID NO: 49100 - protein, 357 aa, Homo sapiens
MLQIHLPGRHTLFVRAMIDSGASGNFIDHEYVAQNGIPLRIKDWPILVEAIDGRPIASGPVVHETHDLIVDLGDHREVLSFDVTQSPFFPVVLGVRWLSTHDPNITWSTRSIVFDSEYCRYHCRMYSPIPPSLPPPAPQPPLYYPVDGYRVYQPVRYYYVQNVYTPVDEHVYPDHRLVDPHIEMIPGAHSIPSGHVYSLSEPEMAALRDFVARNVKDGLITPTIAPNGAQVLQVKRGWKLQVSYDCRAPNNFTIQNQYPRLSIPNLEDQAHLATYTEFVPQIPGYQTYPTYAAYPTYPVGFAWYPVGRDGQGRSLYVPVMITWNPHWYRQPPVPQYPPPQPPPPPPPPPPPPSYSTL

SEQ ID NO: 49101 - protein, 278 aa, Homo sapiens
MAQGIIEYKDACTVDPVTNQNLQYFLDRFYMNRISTRMLMNQHILIFSDSQTGNPSHIGSIDPNCDVVAVVQDAFECSRMLCDQYYLSSPELKLTQVNGKFPDQPIHIVYVPSHLHHMLFELFKNAMRATVEHQENQPSLTPIEVIVVLGKEDLTIKISDRGGGVPLRIIDRLFSYTYSTAPTPVMDNSRNAPLAGFGYGLPISRLYAKYFQGDLNLYSLSGYGTDAIIYLKALSSESIEKLPVFNKSAFKHYQMSSEADDWCIPSREPKNLAKEVAM

SEQ ID NO: 49102 - protein, 220 aa, Homo sapiens
MTESREVIDLDPPAETSQEQEDLFIVKVEEEDCTWMQEYNPPTFETFYQRFRHFQYHEASGPREALSQLRVLCCEWLRPELHTKEQILELLVLEQFLTILPEEFQPWVREHHPESGEEAVAVIENIQRELEERRQQIVACPDVLPRKMATPGAVQESCSPHPLTVDTQPEQAPQKPRLLEENALPVLQVPSLPLKDSQELTASLLSTGSQVMSPGTIWSS

SEQ ID NO: 49103 - protein, 72 aa, Homo sapiens
MEQGLTGGILLRLPTTRIHSVNSCPALSHTQASAFSGETLAVLTAGISKRWPKYRLPIDIARPCSETPFPRL

SEQ ID NO: 49104 - protein, 537 aa, Homo sapiens
MAEAPQQQLGIPVVKLEKELPWGRGREDPSPETFRLRFRQFRYQEAAGPQEALRELQELCRRWLRPELHTKEQILELLVLEQFLTILPREFYAWIREHGPESGKALAAMVEDLTERALEAKAVPCHRQGEQEETALCRGAWEPGIQLGPVEVKPEWGMPPGEGVQGPDPGTEEQLSQDPGDETRAFQEQALPVLQAGPGLPAVNPRDQEMAAGFFTAGSQGLGPFKDMALAFPEEEWRHVTPAQIDCFGEYVEPQDCRVSPGGGSKEKEAKPPQEDLKGALVALTSERFGEASLQGPGLGRVCEQEPGGPAGSAPGLPPPQHGAIPLPDEVKTHSSFWKPFQCPECGKGFSRSSNLVRHQRTHEEKSYGCVECGKGFTLREYLMKHQRTHLGKRPYVCSECWKTFSQRHHLEVHQRSHTGEKPYKCGDCWKSFSRRQHLQVHRRTHTGEKPYTCECGKSFSRNANLAVHRRAHTGEKPYGCQVCGKRFSKGERLVRHQRIHTGEKPYHCPACGRSFNQRSILNRHQKTQHRQEPLVQ

SEQ ID NO: 49105 - protein, 355 aa, Homo sapiens [sequence omitted]

SEQ ID NO: 49106 - protein, 175 aa, Homo sapiens
MAPIDEAFESYREKLLKSQRNLVAKMKKVMHLQDVEVKNATQWKDKIKSQRMRISTEFSKLHNFLVEEEDLFLQRLNKEEEETKKKLNENTLKLNQTIASLKKLILEVGEKSQAPTLELLQNPKEVLTRSEIQDVNYSLEAVKVKTVCQIPLMKEMLKRFQATKIKTQKQNRHNM

SEQ ID NO: 49107 - protein, 251 aa, Homo sapiens
MGCGESELKSADGEEAAAVPGPPPEPQVPQLRAPVPEPGLDLSLSPRPDSPQPRHGSPGRRKGRAERRGAARQRRQVRFRLTPPSPVRSEPQPAVPQELEMPVLKSSLALGLELRAAAGSHFDAAKAVEEQLRKSFQIRCGLEESVSEGLNVPRSKRLFRDLVSLQVPEEQVLNAALREKLALLPPQARAPHPKEPPGPGPDMTILCDPETLFYESPHLTLDGLPPLRLQLRPRPSEDTFLMHRTLRRWEA

SEQ ID NO: 49108 - protein, 990 aa, Homo sapiens
MLALYVKENKVPEELQDKEFAAVLQDEPLQPLALEPLTEEEQRNFSLSVNSVAVLRLMGKGAGPPLAGTSRGRGSTRSRGRGRGDSCFYQRSIEEGDGAFGRSPREIQRSQSWDDRGERRFEKSARRDGARCGFEEGGAGPRKEHARSDSENWRSLREEQEEEEEGSWRLGAGPRRDGDRWRSASPDGGPRSAGWREHGERRRKFEFDLRGDRGGCGEEEGRGGGGSSHLRRCRAPEGFEEDKDGLPEWCLDDEDEEMGTFDASGAFLPLKKGPKEPIPEEQELDFQGLEEEEEPSEGLEEEGPEAGGKELTPLPPQEEKSSSPSPLPTLGPLWGTNGDGDETAEKEPPAAEDDIRGIQLSPGVGSSAGPPGDLEDDEGLKHLQQEAEKLVASLQDSSLEEEQFTAAMQTQGLRHSAAATALPLSHGAARKWFYKDPQGEIQGPFTTQEMAEWFQAGYFSMSLLVKRGCDEGFQPLGEVIKMWGRVPFAPGPSPPPLLGNMDQERLKKQQELAAAALYQQLQHQQFLQLVSSRQLPQCALREKAALGDLTPPPPPPPQQQQQQLTAFLQQLQALKPPRGGDQNLLPTMSRSLSVPDSGRLWDVHTSASSQSGGEASLWDIPINSSTQGPILEQLQLQHKFQERREVELRAKREEEERKRREEKRRQQQQEEQKRRQEEEELFRRKHVRQQELLLKLLQQQQAVPVPPAPSSPPPLWAGLAKQGLSMKTLLELQLEGERQLHKQPPPREPARAQAPNHRVQLGGLGTAPLNQWVSEAGPLWGGPDKSGGGSSGLGLWEDTPKSGGSLVRGLGLKNSRSSPSLSDSYSHLSGRPIRKKTEEEEKLLKLLQGIPRPQDGFTQWCEQMLHTLSATGSLDVPMAVAILKEVESPYDVHDYIRSCLGDTLEAKEFAKQFLERRAKQKASQQRQQQQEAWLSSASLQTAFQANHSTKLGPGEGSKAKRRALMLHSDPSILGYSLHGSSGEIESVDDY

SEQ ID NO: 49109 - protein, 894 aa, Homo sapiens
MLECLSLPRAGRSCKETFTVFYYESDADTATALTPAWMENPYIKVDTVAAEHLTRKRPGAEATGKVNVKTLRLGPLSKAGFYLAFQDQGACMALLSLHLFYKKCAQLTVNLTRFPETVPRELVVPVAGSCVVDAVPAPGPSPSLYCREDGQWAEQPVTGCSCAPGFEAAEGNTKCRACAQGTFKPLSGEGSCQPCPANSHSNTIGSAVCQCRVGYFRARTDPRGAPCTTPPSAPRSVVSRLNGSSLHLEWSAPLESGGREDLTYALRCRECRPGGSCAPCGGDLTFDPGPRDLVEPWVVVRGLRPDFTYTFEVTALNGVSSLATGPVPFEPVNVTTDREVPPAVSDIRVTRSSPSSLSLAWAVPRAPSGAVLDYEVKYHEKGAEGPSSVRFLKTSENRAELRGLKRGASYLVQVRARSEAGYGPFGQEHHSQTQLDESEGWREQLALIAGTAVVGVVLVLVVIVVAVLCLRKQSNGREAEYSDKHGQYLIGHGTKVYIDPFTYEDPNEAVREFAKEIDVSYVKIEEVIGAGEFGEVCRGRLKAPGKKESCVAIKTLKGGYTERQRREFLSEASIMGQFEHPNIIRLEGVVTNSMPVMILTEFMENGALDSFLRLNDGQFTVIQLVGMLRGIASGMRYLAEMSYVHRDLAARNILVNSNLVCKVSDFGLSRFLEENSSDPTYTSSLGGKIPIRWTAPEAIAFRKFTSASDAWSYGIVMWEVMSFGERPYWDMSNQDVINAIEQDYRLPPPPDCPTSLHQLMLDCWQKDRNARPRFPQVVSALDKMIRNPASLKIVARENGGASHPLLDQRQPHYSAFGSVGEWLRAIKMGRYEESFAAAGFGSFELVSQISAEDLLRIGVTLAGHQKKILASVQHMKSQAKPGTPGGTGGPAPQY

SEQ ID NO: 49110 - protein, 750 aa, Homo sapiens
MQHHVLPIQARLGSIAEIDLGVPPPVMKTFKEFLLSLDDSVDETEAVKRYNDYKLDFRRQQMQDFFLAHKDEEWFRSKYHPDEVGKRRQEARGALQNRLRVFLSLMETGWFDNLLLDIDKADAIVKMLDAAVIKMEGGTENDLRILEQEEEEEQAGKPGEPSKKEEGRAGAGLGDGERKTNDKDEKKEDGKQAENDSSNDDKTKKSEGDGDKEEKKEDSEKEAKKSSKKRNRKHSGDDSFDEGSVSESESESESGQAEEEKEEAEEALKEKEKPKEEEWEKPKDAAGLECKPRPLHKTCSLFMRNIAPNISRAEIISLCKRYPGFMRVALSEPQPERRFFRRGWVTFDRSVNIKEICWNLQNIRLRECELSPGVNRDLTRRVRNINGITQHKQIVRNDIKLAAKLIHTLDDRTQLWASEPGTPPLPTSLPSQNPILKNITDYLIEEVSAEEEELLGSSGGAPPEEPPKEGNPAEINVERDEKLIKVLDKLLLYLRIVHSLDYYNTCEYPNEDEMPNRCGIIHVRGPMPPNRISHGEVLEWQKTFEEKLTPLLSVRESLSEEEAQKMGRKDPEQEVEKFVTSNTQELGKDKWLCPLSGKKFKGPEFVRKHIFNKHAEKIEEVKKEVAFFNNFLTDAKRPALPEIKPAQPPGPAQSLTPGLPYPHQTPQGLMPYGQPRPPILGYGAGAVRPAVPTGGPPYPHAPYGAGRGNYDAFRGQGGYPGKPRNRMVRGDPRAIVEYRDLDAPDDVDFF

SEQ ID NO: 49111 - protein, 117 aa, Homo sapiens [sequence omitted]

SEQ ID NO: 49112 - protein, 508 aa, Homo sapiens
MVLKHHPDKRKAAGEPIKEGDNDYFTCITKAYEMLSDPVKRRAFNSVDPTFDNSVPSKSEAKDNFFEVFTPVFERNSRWSNKKNVPKLGDMNSSFEDVDIFYSFWYNFDSWREFSYLDEEEKEKAECRDERRWIEKQNRATRAQRKKEEMNRIRTLVDNAYSCDPRIKKFKEEEKAKKEAEKKAKAEAKRKEQEAKEKQRQAELEAARLAKEKEEEEVRQQALLAKKEKDIQKKAIKKERQKLRNSCKTWNHFSDNEAERVKMMEEVEKLCDRLELASLQCLNETLTSCTKEVGKAALEKQIEEINEQIRKEKEEAEARMRQASKNTEKSTGGGGNGSKNWSEDDLQLLIKAVNLFPAGTNSRWEVIANYMNIHSSSGVKRTAKDVIGKAKSLQKLDPHQKDDINKKAFDKFKKEHGVVPQADNATPSERFEGPYTDFTPWTTEEQKLLEQALKTYPVNTPERWEKIAEAVPGRTKKDCMKRYKELVEMVKAKKAAQEQVLNASRAKK

SEQ ID NO: 49113 - protein, 3346 aa, Homo sapiens
MSDHQFGNQFMCSVVASHVSHLPTTNLSFIWIAPPAGTGCVNFMATATHRGQVIFKDALAQQLCEQGAPTDVTVHPHLAEIHSDSIILRDDFDSYHQLQLNPNIWVECNNCETGEQCGAIMHGNAVTFCEPYGPRELITTGLNTTTASVLQFSIGSGSCRFSYSDPSIIVLYAKNNSADWIQLEKIRAPSNVSTIIHILYLPEDAKGENVQFQWKQENLRVGEVYEACWALDNILIINSAHRQVVLEDSLDPVDTGNWLFFPGATVKHSCQSDGNSIYFHGNEGSEFNFATTRDVDLSTEDIQEQWSEEFESQPTGWDVLGAVIGTECGTIESGLSMVFLKDGERKLCTPSMDTTGYGNLRFYFVMGGICDPGNSHENDIILYAKIEGRKEHITLDTLSYSSYKVPSLVSVVINPELQTPATKFCLRQKNHQGHNRNVWAVDFFHVLPVLPSTMSHMIQFSINLGCGTHQPGNSVSLEFSTNHGRSWSLLHTECLPEICAGPHLPHSTVYSSENYSGWNRITIPLPNAALTRNTRIRWRQTGPILGNMWAIDNVYIGPSCLKFCSGRGQCTRHGCKCDPGFSGPACEMASQTFPMFISESFGSSRLSSYHNFYSIRGAEVSFGCGVLASGKALVFNKDGRRQLITSFLDSSQSRFLQFTLRLGSKSVLSTCRAPDQPGEGVLLHYSYDNGITWKLLEHYSYLSYHEPRIISVELPGDAKQFGIQFRWWQPYHSSQREDVWAIDEIIMTSVLFNSISLDFTNLVEVTQSLGFYLGNVQPYCGHDWTLCFTGDSKLASSMRYVETQSMQIGASYMIQFSLVMGCGQKYTPHMDNQVKLEYSTNHGLTWHLVQEECLPSMPSCQEFTSASIYHASEFTQWRRVIVLLPQKTWSSATRFRWSQSYYTAQDEWALDSIYIGQQCPNMCSGHGSCDHGICRCDQGYQGTECHPEAALPSTIMSDFENQNGWESDWQEVIGGEIVKPEQGCGVISSGSSLYFSKAGKRQLVSWDLDTSWVDFVQFYIQIGGESASCNKPDSREEGVLLQYSNNGGIQWHLLAEMYFSDFSKPRFVYLELPAAAKTPCTRFRWWQPVFSGEDYDQWAVDDIIILSEKQKQIIPVINPTLPQNFYEKPAFDYPMNQMSVWLMLANEGMVKNETFCAATPSAMIFGKSDGDRFAVTRDLTLKPGYVLQFKLNIGCANQFSSTAPVLLQYSHDAGMSWFLVKEGCYPASAGKGCEGNSRELSEPTMYHTGDFEEWTRITIVIPRSLASSKTRFRWIQESSSQKNVPPFGLDGVYISEPCPSYCSGHGDCISGVCFCDLGYTAAQGTCVSNVPNHNEMFDRFEGKLSPLWYKITGAQVGTGCGTLNDGKSLYFNGPGKREARTVPLDTRNIRLVQFYIQIGSKTSGITCIKPRTRNEGLIVQYSNDNGILWHLLRELDFMSFLEPQIISIDLPQDAKTPATAFRWWQPQHGKHSAQWALDDVLIGMNDSSQTGFQDKFDGSIDLQANWYRIQGGQVDIDCLSMDTALIFTENIGKPRYAETWDFHVSASTFLQFEMSMGCSKPFSNSHSVQLQYSLNNGKDWHLVTEECVPPTIGCLHYTESSIYTSERFQNWKRITVYLPLSTISPRTRFRWIQANYTVGADSWAIDNVVLASGCPWMCSGRGICDAGRCVCDRGFGGPYCVPVVPLPSILKDDFNGNLHPDLWPEVYGAERGNLNGETIKSGTSLIFKGEGLRMLISRDLDCTNTMYVQFSLRFIAKSTPERSHSILLQFSISGGITWHLMDEFYFPQTTNILFINVPLPYTAQTNATRFRLWQPYNNGKKEEIWIVDDFIIDGNNVNNPVMLLDTFDFGPREDNWFFYPGGNIGLYCPYSSKGAPEEDSAMVFVSNEVGEHSITTRDLNVNENTIIQFEINVGCSTDSSSADPVRLEFSRDFGATWHLLLPLCYHSSSHVSSLCSTEHHPSSTYYAGTMQGWRREVVHFGKLHLCGSVRFRWYQGFYPAGSQPVTWAIDNVYIGPQCEEMCNGQGSCINGTKCICDPGYSGPTCKISTKNPDFLKDDFEGQLESDRFLLMSGGKPSRKCGILSSGNNLFFNEDGLRMLMTRDLDLSHARFVQFFMRLGCGKGVPDPRSQPVLLQYSLNGGLSWSLLQEFLFSNSSNVGRYIALEIPLKARSGSTRLRWWQPSENGHFYSPWVIDQILIGGNISGNTVLEDDFTTLDSRKWLLHPGGTKMPVCGSTGDALVFIEKASTRYVVSTDVAVNEDSFLQIDFAASCSVTDSCYAIELEYSVDLGLSWHPLVRDCLPTNVECSRYHLQRILVSDTFNKWTRITLPLPPYTRSQATRFRWHQPAPFDKQQTWAIDNVYIGDGCIDMCSGHGRCIQGNCVCDEQWGGLYCDDPETSLPTQLKDNFNRAPSSQNWLTVNGGKLSTVCGAVASGMALHFSGGCSRLLVTVDLNLTNAEFIQFYFMYGCLITPNNRNQGVLLEYSVNGGITWNLLMEIFYDQYSKPGFVNILLPPDAKEIATRFRWWQPRHDGLDQNDWAIDNVLISGSADQRTVMLDTFSSAPVPQHERSPADAGPVGRIAFDMFMEDKTSVNEHWLFHDDCTVERFCDSPDGVMLCGSHDGREVYAVTHDLTPTEGWIMQFKISVGCKVSEKIAQNQIHVQYSTDFGVSWNYLVPQCLPADPKCSGSVSQPSVFFPTKGWKRITYPLPESLVGNPVRFRFYQKYSDMQWAIDNFYLGPGCLDNCRGHGDCLREQCICDPGYSGPNCYLTHTLKTFLKERFDSEEIKPDLWMSLEGGSTCTECGILAEDTALYFGGSTVRQAVTQDLDLRGAKFLQYWGRIGSENNMTSCHRPICRKEGVLLDYSTDGGITWTLLHEMDYQKYISVRHDYILLPEDALTNTTRLRWWQPFVISNGIVVSGVERAQWALDNILIGGAEINPSQLVDTFDDEGTSHEENWSFYPNAVRTAGFCGNPSFHLYWPNKKKDKTHNALSSRELIIQPGYMMQFKIVVGCEATSCGDLHSVMLEYTKDARSDSWQLVQTQCLPSSSNSIGCSPFQFHEATIYNSVNSSSWKRITIQLPDHVSSSATQFRWIQKGEETEKQSWAIDHVYIGEACPKLCSGHGYCTTGAICICDESFQGDDCSVFSHDLPSYIKDNFESARVTEANWETIQGGVIGSGCGQLAPYAHGDSLYFNGCQIRQAATKPLDLTRASKIMFVLQIGSMSQTDSCNSDLSGPHAVDKAVLLQYSVNNGITWHVIAQHQPKDFTQAQRVSYNVPLEARMKGVLLRWWQPRHNGTGHDQWALDHVEVVLVSTRKQNYMMNFSRQHGLRHFYNRRRRSLRRYP

SEQ ID NO: 49114 - protein, 245 aa, Homo sapiens
MPHLENVVLCRESQVSILQSLFGERHHFSFPSIFIYGHTASGKTYVTQTLLKTLELPHVFVNCVECFTLRLLLEQILNKLNHLSSSEDGCSTEITCETFNDFVRLFKQVTTAENLKDQTVYIVLDKAEYLRDMEANLLPGFLRLQELADRNVTVLFLSEIVWEKFRPNTGCFEPFVLYFPDYSIGNLQKILSHDHPPEYSADFYAAYINILLGVFYTVCRDLKELRHLKMQNSIKIKMRNNRKEM

SEQ ID NO: 49115 - protein, 1712 aa, Homo sapiens
MGIDRQHIPDTYLCERCQPRNLDKERAVLLQRRKRENMSDGDTSATESGDEVPVELYTAFQHTPTSITLTASRVSKVNDKRRKKSGEKEQHISKCKKAFREGSRKSSRVKGSAPEIDPSSDGSNFGWETKIKAWMDRYEEANNNQYSEGVQREAQRIALRLGNGNDKKEMNKSDLNTNNLLFKPPVESHIQKNKKILKSAKDLPPDALIIEYRGKFMLREQFEANGYFFKRPYPFVLFYSKFHGLEMCVDARTFGNEARFIRRSCTPNAEVRHEIQDGTIHLYIYSIHSIPKGTEITIAFDFDYGNCKYKVDCACLKENPECPVLKRSSESMENINSGYETRRKKGKKDKDISKEKDTQNQNITLDCEGTTNKMKSPETKQRKLSPLRLSVSNNQEPDFIDDIEEKTPISNEVEMESEEQIAERKRKMTREERKMEAILQAFARLEKREKRREQALERISTAKTEVKTECKDTQIVSDAEVIQEQAKEENASKPTPAKVNRTKQRKSFSRSRTHIGQQRRRHRTVSMCSDIQPSSPDIEVTSQQNDIENTVLTIEPETETALAEIITETEVPALNKCPTKYPKTKKHLVNEWLSEKNEKTGKPSDGLSERPLRITTDPEVLATQLNSLPGLTYSPHVYSTPKHYIRFTSPFLSEKRRRKEPTENISGSCKKRWLKQALEEENSAILHRFNSPCQERSRSPAVNGENKSPLLLNDSCSLPDLTTPLKKRRFYQLLDSVYSETSTPTPSPYATPTHTDITPMDPSFATPPRIKSDDETCRNGYKPIYSPVTPVTPGTPGNTMHFENISSPESSPEIKRRTYSQEGYDRSSTMLTLGPFRNSNLTELGLQEIKTIGYTSPRSRTEVNRQCPGEKEPVSDLQLGLDAVEPTALHKTLETPAHDRAEPNSQLDSTHSGRGTMYSSWVKSPDRTGVNFSVNSNLRDLTPSHQLEVGGGFRISESKCLMQDDTRGMFMETTVFCTSEDGLVSGFGRTVNDNLIDGNCTPQNPPQKKKVSLLEYRKRQREARKSGSKTENFPLISVSPHASGSLSNNGDGCASSNDNGEQVDHTASLPLPTPATVYNATSEETSNNCPVKDATASEKNEPEVQWTASTSVEQVRERSYQRALLLSDHRKDKDSGGESPCVSCSPSHVQSSPSSHSNHIPQLQAKGPVPSFSELMEDPDPENPEPTTTNECPSPDTSQNTCKSPPKMSKPGSPGSVIPAQAHGKIFTKPDPQWDSTVSASEAENGVHLKTELQQKQLSNNNQALSKNHPPQTHVRNSSEQLSQKLPSVPTKLHCPPSPHLENPPKSSTPHTPVQHGYLSPKPPSQQLGSPYRPHHSQSPQVGTPQREPQRNFYPAAQNLPANTQQATSGTLFTQTPSGQSSATYSQFNQQSLNSTAPPPPPPPPPSSSYYQNQQPSANFQNYNQLKGSLSQQTVFTSGPNQALPGTTSQQTVPGHHVTPGHFLPSQNPTIHHQTAAAVVPPPPPPPPAPGPHLVQQPNSHQQHSVAHVVGPVHAVTPGSHIHSQTAGHHLPPPPPPPGPAPHHHPPPHPSTGLQGLQAQHQHVVNSAPPPPPPPPPSSVLASGHHTTSAQALHHPPHQGPPLFPSSAHPTVPPYPSQATHHTTLGPGPQHQPSGTGPHCPLPVTGPHLQPQGPNSIPTPTASGFCPHPGSVALPHGVQGPQQASPVPGQIPIHRAQVPPTFQNNYHGSGWH

SEQ ID NO: 49116 - protein, 588 aa, Homo sapiens
MQGKRFVAMKVVKSAQHYTETALDEIKLLKCVRESDPSDPNKDMVVQLIDDFKISGMNGIHVCMVFEVLGHHLLKWIIKSNYQGLPVRCVKSIIRQVLQGLDYLHSKCKIIHTDIKPENILMCVDDAYVRRMAAEATEWQKAGAPPPSGSAVSTAPQQKPIGKISKNKKKKLKKKQKRQAELLEKRLQEIEELEREAERKIIEENITSAAPSNDQDGEYCPEVKLKTTGLEEAAEAETAKDNGEAEDQEEKEDAEKENIEKDEDDVDQELANIDPTWIESPKTNGHIENGPFSLEQQLDDEDDDEEDCPNPEEYNLDEPNAESDYTYSSSYEQFNGELPNGRHKIPESQFPEFSTSLFSGSLEPVACGSVLSEGSPLTEQEESSPSHDRSRTVSASSTGDLPKAKTRAADLLVNPLDPRNADKIRVKIADLGNACWVHKHFTEDIQTRQYRSIEVLIGAGYSTPADIWSTACMAFELATGDYLFEPHSGEDYSRDEDHIAHIIELLGSIPRHFALSGKYSREFFNRRGELRHITKLKPWSLFDVLVEKYGWPHEDAAQFTDFLIPMLEMVPEKRASAGECLRHPWLNS

SEQ ID NO: 49117 - protein, 707 aa, Homo sapiens
MQLEEQVLTISSEIPKRIRSALKNAEESKQFLNQFLEQETHLFSAINSHLLTAQPWMDDLGTMISQIEEIERHLAYLKWISQIEELSDNIQQYLMTNNVPEAASTLVSMAELDIKLQESSCTHLLGFMRATVKFWHKILKDKLTSDFEEILAQLHWPFIAPPQSQTVGLSRPASAPEIYSYLETLFCQLLKLQTSDELLTEPKQLPEKYSLPASPSVILPIQVMLTPLQKRFRYHFRGNRQTNVLSKPEWYLAQVLMWIGNHTEFLDEKIQPILDKVGSLVNARLEFSRGLMMLVLEKLATDIPCLLYDDNLFCHLVDEVLLFERELHSVHGYPGTFASCMHILSEETCFQRWLTVERKFALQKMDSMLSSEAAWVSQYKDITDVDEMKVPDCAETFMTLLLVITDRYKNLPTASRKLQFLELQKDLVDDFRIRLTQVMKEETRASLGFRYCAILNAVNYISTVLADWADNVFFLQLQQAALEVFAENNTLSKLQLGQLASMESSVFDDMINLLERLKHDMLTRQVDHVFREVKDAAKLYKKERWLSLPSQSEQAVMSLSSSACPLLLTLRDHLLQLEQQLCFSLFKIFWQMLVEKLDVYIYQEIILANHFNEGGAAQLQFDMTRNLFPLFSHYCKRPENYFKHIKEACIVLNLNVGSALLLKDVLQSASGQLPATAALNEVGIYKLAQQDVEILLNLRTNWPNTGK

SEQ ID NO: 49118 - protein, 505 aa, Homo sapiens
MPNAVQKLLLVMDKRASGMNDSLELLQCNENLPSSPGYNSCDEHMELDDLPELQAVQSDPTQSGMYQLSSDVSHQEYPRSSWNQNTSDIPETTYRENEVDWLTELANIATSPQSPLMQCSFYNRSSPVHIIATSKSLHSYARPPPVSSSSKSEPAFPHHHWKEETPVRHERANSESESGIFCMSSLSDDDDLGWCNSWPSTVWHCFLKGTRLCFHKGSNKEWQDVEDFARAEGCDNEEDLQMGIHKGYGSDGLKLLSHEESVSFGESVLKLTFDPGTVEDGLLTVECKLDHPFYVKNKGWSSFYPSLTVVQHGIPCCEVHIGDVCLPPGHPDAINFDDSGVFDTFKSYDFTPMDSSAVYVLSSMARQRRASLSCGGPGGQDFARSGFSKNCGSPGSSQLSSNSLYAKAVKNHSSGTVSATSPNKCKRPMNAFMLFAKKYRVEYTQMYPGKDNRAISVILGDRWKKMKNEERRMYTLEAKALAEEQKRLNPDCWKRKRTNSVCFNK

SEQ ID NO: 49119 - protein, 505 aa, Homo sapiens [sequence omitted]

SEQ ID NO: 49120 - protein, 449 aa, Homo sapiens
MVKQVRNQVETPGFSVSIKIRIHDDLKRTVDLCQKAEATGVSWITVHGRTAEERHQPVHYDSIKIIKENMSIPVIANGDIRSLKEAENVWRITGTDGVKKKMTLQWAAVATFLYAEIGLILIFCLPFIPPQRWQKIFSFNVWGKIATFWNKAFLTIIILLIVLFLDAVREVRKYSSVHTIEKSSTSRPDAYEHTQMKLFRSQRNLYISGFSLFFWLVLRRLVTLITQLAKELSNKGVLKTQAENTNKAAKKFMEENEKLKRILKSHGKDEECVLEAENKKLVEDQEKLKTELRKTSDALSKAQNDVMEMKMQSERLSKEYDQLLKEHSELQHSSFGEFLSKRSHKNGSIGKQTGSRKGSFRKRQQEKTVNFIKDTCNILCQNDNFVMLASRKFKFRKMHYDRFVIFLMPHIGCIVMALSKYLMMFQIYCKVCIPALKKNISMLNTIFTY

SEQ ID NO: 49121 - protein, 705 aa, Homo sapiens [sequence omitted]

SEQ ID NO: 49122 - protein, 47 aa, Homo sapiens [sequence omitted]

SEQ ID NO: 49123 - protein, 115 aa, Homo sapiens
MQDQSIWGNPSDGELIRTQPQRLPQLQTSAQVPSGEEIGKIKNGHTGLSNGNGIHHGAKHGSADNRKLSAPVSQKMHRKIQSSLSVNSDISKKSKVNAVFSQKTGSSPEDKQEFW

SEQ ID NO: 49124 - protein, 111 aa, Homo sapiens
MQDQSIWGNPSDGELIRTQPQRLPQLQTSAQVPSGEEIGKIKNGHTGLSNGNGIHHGAKHGSADNRKLSAPVSQKMHRKIQSSLSVNSDISKKSKVNAVFSQKTGSSPEVC

SEQ ID NO: 49125 - protein, 79 aa, Homo sapiens
MYKFLTVFLAIPLAFIAGILFATLSCLHIWILMPFVKTCLMVLPSVQTIWKSVTDVIIAPLCTSVGRCFSSVSLQLSQD

SEQ ID NO: 49126 - protein, 331 aa, Homo sapiens
MRATGGSSRVMCDNVPGLVSSQRQLCHRHPDVMRAISQGVAEWTAECQHQFRQHRWNCNTLDRDHSLFGRVLLRSSRESAFVYAISSAGVVFAITRACSQGEVKSCSCDPKKMGSAKDSKGIFDWGGCSDNIDYGIKFARAFVDAKERKGKDARALMNLHNNRAGRKAVKRFLKQECKCHGVSGSCTLRTCWLAMADFRKTGDYLWRKYNGAIQVVMNQDGTGFTVANERFKKPTKNDLVYFENSPDYCIRDREAGSLGTAGRVCNLTSRGMDSCEVMCCGRGYDTSHVTRMTKCGCKFHWCCAVRCQDCLEALDVHTCKAPKNADWTTAT

SEQ ID NO: 49127 - protein, 604 aa, Homo sapiens
MPAPPRQERKRTQDALIVLNVSGTRFQTWQDTLERYPDTLLGSSERDFFYHPETQQYFFDRDPDIFRHILNFYRTGKLHYPRHECISAYDEELAFFGLIPEIIGDCCYEEYKDRRRENAERLQDDADTDTAGESALPTMTARQRVWRAFENPHTSTMALVFYYVTGFFIAVSVIANVVETVPCGSSPGHIKELPCGERYAVAFFCLDTACVMIFTVEYLLRLAAAPSRYRFVRSVMSIIDVVAILPYYIGLVMTDNEDVSGAFVTLRVFRVFRIFKFSRHSQGLRILGYTLKSCASELGFLLFSLTMAIIIFATVMFYAEKGSSASKFTSIPAAFWYTIVTMTTLGYGDMVPKTIAGKIFGSICSLSGVLVIALPVPVIVSNFSRIYHQNQRADKRRAQKKARLARIRAAKSGSANAYMQSKRNGLLSNQLQSSEDEQAFVSKSGSSFETQHHHLLHCLEKTTNHEFVDEQVFEESCMEVATVNRPSSHSPSLSSQQGVTSTCCSRRHKKTFRIPNANVSGSHQGSIQELSTIQIRCVERTPLSNSRSSLNAKMEECVKLNCEQPYVTTAIISIPTPPVTTPEGDDRPESPEYSGGNIVRVSAL

SEQ ID NO: 49128 - protein, 465 aa, Homo sapiens [sequence omitted]

SEQ ID NO: 49129 - protein, 522 aa, Homo sapiens
MDRLRRASMADYLISGGTGYVPEDGLTAQQLFASADGLTYNDFLILPGFIDFIADEVDLTSALTRKITLKTPLISSPMDTVTEADMAIAMALMGGIGFIHHNCTPEFQANEVRKVKKFEQGFITDPVVLSPSHTVGDVLEAKMRHGFSGIPITETGTMGSKLVGIVTSRDIDFLAEKDHTTLLSEVMTPRIELVVAPAGVTLKEANEILQRSKKGKLPIVNDCDELVAIIARTDLKKNRDYPLASKDSQKQLLCGAAVGTREDDKYRLDLLTQAGVDVIVLDSSQGNSVYQIAMVHYIKQKYPHLQVIGGNVVTAAQAKNLIDAGVDGLRVGMGCGSICITQEVMACGRPQGTAVYKVAEYARRFGVPIIADGGIQTVGHVVKALALGASTVMMGSLLAATTEAPGEYFFSDGVRLKKYRGMGSLDAMEKSSSSQKRYFSEGDKVKIAQGVSGSIQDKGSIQKFVPYLIAGIQHGCQDIGARSLSVLRSMMYSGELKFEKRTMSAQIEGGVHGLHSYEKRLY

SEQ ID NO: 49130 - protein, 1151 aa, Homo sapiens
MEGEVLLPALYEEEEEEEEEEEEVEEEEEQVQKGGSVGSLSVNKHRGLSLTETELEELRAQVLQLVAELEETRELAGQHEDDSLELQGLLEDERLASAQQAEVFTKQIQQLQGELRSLREEISLLEHEKESELKEIEQELHLAQAEIQSLRQAAEDSATEHESDIASLQEDLCRMQNELEDMERIRGDYEMEIASLRAEMEMKSSEPSGSLGLSDYSGLQEELQELRERYHFLNEEYRALQESNSSLTGQLADLESERTQRATERWLQSQTLSMTSAESQTSEMDFLEPDPEMQLLRQQLRDAEEQMHGMKNKCQELCCELEELQHHRQVSEEEQRRLQRELKCAQNEVLRFQTSHSVTQNEELKSRLCTLQKKYDTSQDEQNELLKMQLQLQTELRQLKVMKSTLVENQSEKELLCRLQKLHLQHQNVTCEKEKLLERQQQLQEELQCHEAELQHLRDTVASFKESNEKDTETHAQLQEMKQLYQASKDELERQKHMYDQLEQDLLLCQLELKELKASHPIPEDKGKCANKCDTLLSRLTELQEKYKASQKEMGQLQMEQCELLEDQRRMQEEQGQLQEELHRLTLPLPKSGLLLKSQELLTKLEDLCELQLLYQGMQEEQKKLIQNQDCVLKEQLEIHEELRRFKESHFQEVLENPDDSKLAKSSKCNRNKQSKLLMEQMQALQVMYDAGQAKQELLQQEQGRLLEERKRLQADLQLCLEEMQLLQVQSPSIKMSLESYGKSYGSMVPSNENCRKTYDTTVDDNESYYKSYTSTQTSSKSFLKSYDSSTSASEAYGKSYCTTSNSSITYKKSYGSTSSSDTCQKSFVSSCTDEEPAEPEDMERFEEMVVKVLIKLQAVQAMYQISQEEHSQLQEQMEKLLAKQKDLKEELDACEREFKECMECLEKPMAPQNDKNEIKELQTKLRELQLQYQASMDEQGRLLVVQEQLEGQLQCCQEELRQLREKRPSVVKEARGKNANKNMNKNANGVKMKKVTKPCSDTSESDLETRKSLEVVLYYKASQRKLDGLAKEEEKKEEMEEEKKQVKEEAKEQCGDELVAEPADPEEAKSTEDQEENEEDKEEEEKEEDSEEEEDDADSSLESPEENNPLRLSESKKSSPTPNPPIFSLPLVGLVVISALLWCWWAETSS

SEQ ID NO: 49131 - protein, 2724 aa, Homo sapiens
MNNSGYSDAGLGLGDETDEMPSTEKDLAEDAPWKKIQQNTFTRWCNEHLKCVGKRLTDLQRDLSDGLRLIALLEVLSQKRMYRKFHPRPNFRQMKLENVSVALEFLEREHIKLVSIDSKAIVDGNLKLILGLIWTLILHYSISMPMWEDEDDEDARKQTPKQRLLGWIQNKVPQLPITNFNRDWQDGKALGALVDNCAPGLCPDWEAWDPNQPVENAREAMQQADDWLGVPQVIAPEEIVDPNVDEHSVMTYLSQFPKAKLKPGAPVRSKQLNPKKAIAYGPGIEPQGNTVLQPAHFTVQTVDAGVGEVLVYIEDPEGHTEEAKVVPNNDKDRTYAVSYVPKVAGLHKVTVLFAGQNIERSPFEVNVGMALGDANKVSARGPGLEPVGNVANKPTYFDIYTAGAGTGDVAVVIVDPQGRRDTVEVALEDKGDSTFRCTYRPAMEGPHTVHVAFAGAPITRSPFPVHVSEACNPNACRASGRGLQPKGVRVKEVADFKVFTKGAGSGELKVTVKGPKGTEEPVKVREAGDGVFECEYYPVVPGKYVVTITWGGYAIPRSPFEVQVSPEAGVQKVRAWGPGLETGQVGKSADFVVEAIGTEVGTLGFSIEGPSQAKIECDDKGDGSCDVRYWPTEPGEYAVHVICDDEDIRDSPFIAHILPAPPDCFPDKVKAFGPGLEPTGCIVDKPAEFTIDARAAGKGDLKLYAQDADGCPIDIKVIPNGDGTFRCSYVPTKPIKHTIIISWGGVNVPKSPFRVNVGEGSHPERVKVYGPGVEKTGLKANEPTYFTVDCSEAGQGDVSIGIKCAPGVVGPAEADIDFDIIKNDNDTFTVKYTPPGAGRYTIMVLFANQEIPASPFHIKVDPSHDASKVKAEGPGLNRTGVEVGKPTHFTVLTKGAGKAKLDVQFAGTAKGEVVRDFEIIDNHDYSYTVKYTAVQQGNMAVTVTYGGDPVPKSPFVVNVAPPLDLSKIKVQGLNSKVAVGQEQAFSVNTRGAGGQGQLDVRMTSPSRRPIPCKLEPGGGAEAQAVRYMPPEEGPYKVDITYDGHPVPGSPFAVEGVLPPDPSKVCAYGPGLKGGLVGTPAPFSIDTKGAGTGGLGLTVEGPCEAKIECQDNGDGSCAVSYLPTEPGEYTINILFAEAHIPGSPFKATIRPVFDPSKVRASGPGLERGKVGEAATFTVDCSEAGEAELTIEILSDAGVKAEVLIHNNADGTYHITYSPAFPGTYTITIKYGGHPVPKFPTRVHVQPAVDTSGVKVSGPGVEPHGVLREVTTEFTVDARSLTATGGNHVTARVLNPSGAKTDTYVTDNGDGTYRVQYTAYEEGVHLVEVLYDEVAVPKSPFRVGVTEGCDPTRVRAFGPGLEGGLVNKANRFTVETRGAGTGGLGLAIEGPSEAKMSCKDNKDGSCTVEYIPFTPGDYDVNITFGGRPIPGSPFRVPVKDVVDPGKVKCSGPGLGAGVRARVPQTFTVDCSQAGRAPLQVAVLGPTGVAEPVEVRDNGDGTHTVHYTPATDGPYTVAVKYADQEVPRSPFKIKVLPAHDASKVRASGPGLNASGIPASLPVEFTIDARDAGEGLLTVQILDPEGKPKKANIRDNGDGTYTVSYLPDMSGRYTITIKYGGDEIPYSPFRIHALPTGDASKCLVTVSIGGHGLGACLGPRIQIGQETVITVDAKAAGEGKVTCTVSTPDGAELDVDVVENHDGTFDIYYTAPEPGKYVITIRFGGEHIPNSPFHVLACDPLPHEEEPSEVPQLRQPYAPPRPGARPTHWATEEPVVPVEPMESMLRPFNLVIPFAVQKGELTGEVRMPSGKTARPNITDNKDGTITVRYAPTEKGLHQMGIKYDGNHIPGSPLQFYVDAINSRHVSAYGPGLSHGMVNKPATFTIVTKDAGEGGLSLAVEGPSKAEITCKDNKDGTCTVSYLPTAPGDYSIIVRFDDKHIPGSPFTAKITGDDSMRTSQLNVGTSTDVSLKITESDLSQLTASIRAPSGNEEPCLLKRLPNRHIGISFTPKEVGEHVVSVRKSGKHVTNSPFKILVGPSEIGDASKVRVWGKGLSEGHTFQVAEFIVDTRNAGYGGLGLSIEGPSKVDINCEDMEDGTCKVTYCPTEPGTYIINIKFADKHVPGSPFTVKVTGEGRMKESITRRRQAPSIATIGSTCDLNLKIPGNWFQMVSAQERLTRTFTRSSHTYTRTERTEISKTRGGETKREVRVEESTQVGGDPFPAVFGDFLGRERLGSFGSITRQQEGEASSQDMTAQVTSPSGKVEAAEIVEGEDSAYSVRFVPQEMGPHTVAVKYRGQHVPGSPFQFTVGPLGEGGAHKVRAGGTGLERGVAGVPAEFSIWTREAGAGGLSIAVEGPSKAEIAFEDRKDGSCGVSYVVQEPGDYEVSIKFNDEHIPDSPFVVPVASLSDDARRLTVTSLQETGLKVNQPASFAVQLNGARGVIDARVHTPSGAVEECYVSELDSDKHTIRFIPHENGVHSIDVKFNGAHIPGSPFKIRVGEQSQAGDPGLVSAYGPGLEGGTTGVSSEFIVNTLNAGSGALSVTIDGPSKVQLDCRECPEGHVVTYTPMAPGNYLIAIKYGGPQHIVGSPFKAKVTGPRLSGGHSLHETSTVLVETVTKSSSSRGSSYSSIPKFSSDASKVVTRGPGLSQAFVGQKNSFTVDCSKAGTNMMMVGVHGPKTPCEEVYVKHMGNRVYNVTYTVKEKGDYILIVKWGDESVPGSPFKVKVP

SEQ ID NO: 49132 - protein, 289 aa, Homo sapiens [sequence omitted]

SEQ ID NO: 49133 - protein, 1669 aa, Homo sapiens
MIKIPSDTFTIIPDFDIYYVYGFSSGNFVYFLTLQPEMVSPPGSTTKEQVYTSKLVRLCKEDTAFNSYVEVPIGCERSGVEYRLLQAAYLSKAGAVLGRTLGVHPDDDLLFTVFSKGQKRKMKSLDESALCIFILKQINDRIKERLQSCYRGEGTLDLAWLKVKDIPCSSALLTIDDNFCGLDMNAPLGVSDMVRGIPVFTEDRDRMTSVIAYVYKNHSLAFVGTKSGKLKKIRVDGPRGNALQYETVQVVDPGPVLRDMAFSKDHEQLYIMSERQLTRVPVESCGQYQSCGECLGSGDPHCGWCVLHNTCTRKERCERSKEPRRFASEMKQCVRLTVHPNNISVSQYNVLLVLETYNVPELSAGVNCTFEDLSEMDGLVVGNQIQCYSPAAKEVPRIITENGDHHVVQLQLKSKETGMTFASTSFVFYNCSVHNSCLSCVESPYRCHWCKYRHVCTHDPKTCSFQEGRVKLPEDCPQLLRVDKILVPVEVIKPITLKAKNLPQPQSGQRGYECILNIQGSEQRVPALRFNSSSVQCQNTSYSYEGMEINNLPVELTVVWNGHFNIDNPAQNKVHLYKCGAMRESCGLCLKADPDFACGWCQGPGQCTLRQHCPAQESQWLELSGAKSKCTNPRITEIIPVTGPREGGTKVTIRGENLGLEFRDIASHVKVAGVECSPLVDGYIPAEQIVCEMGEAKPSQHAGFVEICVAVCRPEFMARSSQLYYFMTLTLSDLKPSRGPMSGGTQVTITGTNLNAGSNVVVMFGKQPCLFHRRSPSYIVCNTTSSDEVLEMKVSVQVDRAKIHQDLVFQYVEDPTIVRIEPEWSIVSGNTPIAVWGTHLDLIQNPQIRAKHGGKEHINICEVLNATEMTCQAPALALGPDHQSDLTERPEEFGFILDNVQSLLILNKTNFTYYPNPVFEAFGPSGILELKPGTPIILKGKNLIPPVAGGNVKLNYTVLVGEKPCTVTVSDVQLLCESPNLIGRHKVMARVGGMEYSPGMVYIAPDSPLSLPAIVSIAVAGGLLIIFIVAVLIAYKRKSRESDLTLKRLQMQMDNLESRVALECKEAFAELQTDIHELTSDLDGAGIPFLDYRTYTMRVLFPGIEDHPVLRDLEVPGYRQERVEKGLKLFAQLINNKVFLLSFIRTLESQRSFSMRDRGNVASLIMTVLQSKLEYATDVLKQLLADLIDKNLESKNHPKLLLRRTESVAEKMLTNWFTFLLYKFLKECAGEPLFSLFCAIKQQMEKGPIDAITGEARYSLSEDKLIRQQIDYKTLVLSCVSPDNANSPEVPVKILNCDTITQVKEKILDAIFKNVPCSHRPKAADMDLEWRQGSGARMILQDEDITTKIENDWKRLNTLAHYQVPDGSVVALVSKQVTAYNAVNNSTVSRTSASKYENMIRYTGSPDSLRSRTPMITPDLESGVKMWHLVKNHEHGDQKEGDRGSKMVSEIYLTRLLATKGTLQKFVDDLFETIFSTAHRGSALPLAIKYMFDFLDEQADKHGIHDPHVRHTWKSNCLPLRFWVNMIKNPQFVFDIHKNSITDACLSVVAQTFMDSCSTSEHRLGKDSPSNKLLYAKDIPSYKNWVERYYSDIGKMPAISDQDMNAYLAEQSRMHMNEFNTMSALSEIFSYVGKYSEEILGPLDHDDQCGKQKLAYKLEQVITLMSLDS

SEQ ID NO: 49134 - protein, 263 aa, Homo sapiens
MVTMFFTVSVVNNYALNLNIAMPLHMIFRSGSLIANMILGIIILKKRYSIFKYTSIALVSVGIFICTFMSAKQVTSQSSLSENDGFQAFVWWLLGIGALTFALLMSARMGIFQETLYKRFGKHSKEALFYNHALPLPGFVFLASDIYDHAVLFNKSELYEIPVIGVTLPIMWFYLLMNIITQYVCIRGVFILTTECASLTVTLVVTLRKFVSLIFSILYFQNPFTLWHWLGTLFVFIGTLMYTEVWNNLGTTKSEPQKDSKKN

SEQ ID NO: 49135 - protein, 182 aa, Homo sapiens
MPEDGLSDDKKPFKCFTPKGSSLKIEERAEFLNKSVQKSSGVKSTHQAAIVSKIDSRLEQYTSAIEGTKSAKPTKPAASDLPVPAEGVRNIKSMWEKGNVFSSPTAAGTPNKETAGLKVGVSSRINEWLTKTPDGNKSPAPKPSDLRPGDVSSKRNLWEKQSVDKVTSPTKEPVSKETHAVK

SEQ ID NO: 49136 - protein, 307 aa, Homo sapiens [sequence omitted]

SEQ ID NO: 49137 - protein, 437 aa, Homo sapiens [sequence omitted]

SEQ ID NO: 49138 - protein, 440 aa, Homo sapiens
MQCPKPDCMYLHELGDEAASFTKEEMQAGKHQEYEQKLLQELYKLNPNFLQLSTGSVDKNKNKVTPLQRYDTPIDKPSDSLSIGNGDNSQQISNSDTPSPPPGLSKSNPVIPISSSNHSARSPFEGAVTESQSLFSDNFRHPNPIPSGLPPFPSSPQTSSDWPTAPEPQSLFTSETIPVSSSTDWQAAFGFGSSKQPEDDLGFDPFDVTRKALADLIEKELSVQDQPSLSPTSLQNSSSHTTTAKGPGSGFLHPAAATNANSLNSTFSVLPQRFPQFQQHRAVYNSFSFPGQAARYPWMAFPRNSIMHLNHTANPTSNSNFLDLNLPPQHNTGLGGIPVAGIPASSGNSLDSLQDDNPPHWLKSLQALTEMDGPSAAPSQTHHSAPFSTQIPLHRASWNPYPPPSNPSSFHSPPPGFQTAFRPPSKTPTDLLQSSTLDRH

SEQ ID NO: 49139 - protein, 508 aa, Homo sapiens
MQCPKPDCMYLHELGDEAASFTKEEMQAGKHQEYEQKLLQELYKLNPNFLQLSTGSVDKNKNKVTPLQSPIDKPSDSLSIGNGDNSQQISNSDTPSPPPGLSKSNPVIPISSSNHSARSPFEGAVTESQSLFSDNFRHPNPIPSGLPPFPSSPQTSSDWPTAPEPQSLFTSETIPVSSSTDWQAAFGFGSSKQPEDDLGFDPFDVTRKALADLIEKELSVQDQPSLSPTSLQNSSSHTTTAKGPGSGFLHPAAATNANSLNSTFSVLPQRFPQFQQHRAVYNSFSFPGQAARYPWMAFPRNSIMHLNHTANPTSNSNFLDLNLPPQHNTGLGGIPVADNSSSVESLNMKEWQDGLRALLPNININFGGLPNSSSPSNANHSAPTSNTATTDSLSWDSPGSWTDPAIITGIPASSGNSLDSLQDDNPPHWLKSLQALTEMDGPSAAPSQTHHSAPFSTQIPLHRASWNPYPPPSNPSSFHSPPPGFQTAFRPPSKTPTDLLQSSTLDRH

SEQ ID NO: 49140 - protein, 511 aa, Homo sapiens
MQCPKPDCMYLHELGDEAASFTKEEMQAGKHQEYEQKLLQELYKLNPNFLQLSTGSVDKNKNKVTPLQRYDTPIDKPSDSLSIGNGDNSQQISNSDTPSPPPGLSKSNPVIPISSSNHSARSPFEGAVTESQSLFSDNFRHPNPIPSGLPPFPSSPQTSSDWPTAPEPQSLFTSETIPVSSSTDWQAAFGFGSSKQPEDDLGFDPFDVTRKALADLIEKELSVQDQPSLSPTSLQNSSSHTTTAKGPGSGFLHPAAATNANSLNSTFSVLPQRFPQFQQHRAVYNSFSFPGQAARYPWMAFPRNSIMHLNHTANPTSNSNFLDLNLPPQHNTGLGGIPVADNSSSVESLNMKEWQDGLRALLPNININFGGLPNSSSPSNANHSAPTSNTATTDSLSWDSPGSWTDPAIITGIPASSGNSLDSLQDDNPPHWLKSLQALTEMDGPSAAPSQTHHSAPFSTQIPLHRASWNPYPPPSNPSSFHSPPPGFQTAFRPPSKTPTDLLQSSTLDRH

SEQ ID NO: 49141 - protein, 373 aa, Homo sapiens
MQCPKPDCMYLHELGDEAASFTKEEMQAGKHQEYEQKLLQELYKLNPNFLQLSTGSVDKNKNKVTPLQRYDTPIDKPSDSLSIGNGDNSQQISNSDTPSPPPGLSKSNPVIPISSSNHSARSPFEGAVTESQSLFSDNFRHPNPIPSGLPPFPSSPQTSSDWPTAPEPQSLFTSETIPVSSSTDWQAAFGFGSSKQPEDDLGFDPFDVTRKALADLIEKELSVQDQPSLSPTSLQNSSSHTTTAKGPGSGFLHPAAATNANSLNSTFSVLPQRFPQFQQHRAVYNSFSFPGQAARYPWMAFPRNSIMHLNHTANPTSNSNFLDLNLPPQHNTGLGGIPVAGEEEVKVSTMPLSTSSHSLQQGQQPTSLHTTVA

SEQ ID NO: 49142 - protein, 370 aa, Homo sapiens
MQCPKPDCMYLHELGDEAASFTKEEMQAGKHQEYEQKLLQELYKLNPNFLQLSTGSVDKNKNKVTPLQSPIDKPSDSLSIGNGDNSQQISNSDTPSPPPGLSKSNPVIPISSSNHSARSPFEGAVTESQSLFSDNFRHPNPIPSGLPPFPSSPQTSSDWPTAPEPQSLFTSETIPVSSSTDWQAAFGFGSSKQPEDDLGFDPFDVTRKALADLIEKELSVQDQPSLSPTSLQNSSSHTTTAKGPGSGFLHPAAATNANSLNSTFSVLPQRFPQFQQHRAVYNSFSFPGQAARYPWMAFPRNSIMHLNHTANPTSNSNFLDLNLPPQHNTGLGGIPVAGEEEVKVSTMPLSTSSHSLQQGQQPTSLHTTVA

SEQ ID NO: 49143 - protein, 778 aa, Homo sapiens
MLHHIEEPCSLGAHAAVIVPPTWIIKVKKPQNSLKASNRKKKRTSFKRKASKRGMEQENKGRPFVIKPISSPLMKPLLVFVNPKSGGNQGTKVLQMFMWYLNPRQVFDLSQEGPKDALELYRKVPNLRILACGGDGTVGWILSILDELQLSPQPPVGVLPLGTGNDLARTLNWGGGYTDEPVSKILCQVEDGTVVQLDRWNLHVERNPDLPPEELEDGVCKLPLNVFNNYFSLGFDAHVTLEFHESREANPEKFNSRFRNKMFYAGAAFSDFLQRSSRDLSKHVKVVCDGTDLTPKIQELKFQCIVFLNIPRYCAGTMPWGNPGDHHDFEPQRHDDGYIEVIGFTMASLAALQVGGHGERLHQCREVMLLTYKSIPMQVDGEPCRLAPAMIRISLRNQANMVQKSKRRTSMPLLNDIHQVQTADLRRVSAPPGSFTIPQSVPDRLRIRVNKISLQDYEGFHYDKEKLREASIPLGILVVRGDCDLETCRMYIDRLQEDLQSVSSGSQRVHYQDHETSFPRALSAQRLSPRWCFLDATSADRFYRIDRSQEHLHFVMEISQDEIFILDPDMVVSQPAGTPPGMPDLVVEQASGISDWWNPALRKRMLSDSGLGMIAPYYEDSDLKDLSHSRVLQSPVSSEDHAILQAVIAGDLMKLIESYKNGGSLLIQGPDHCSLLHYAAKTGNGEIVKYILDHGPSELLDMADSETGETALHKAACQRNRAVCQLLVDAGASLRKTDSKGKTPQERAQQAGDPDLAAYLESRQNYKVIGHEDLETAV

SEQ ID NO: 49144 - protein, 15 aa, Homo sapiens
MRAGLLPSFWMHIPL

SEQ ID NO: 49145 - protein, 956 aa, Homo sapiens
MLGSAETPPPVPAPGSPVSGSSPFATQVGVIRCPVCSQECAERHIIDNFFVKDTTEVPSSTVEKSNQVCTSCEDNAEANGFCVECVEWLCKTCIRAHQRVKFTKDHTVRQKEEVSPEAVGVTSQRPVFCPFHKKEQLKLYCETCDKLTCRDCQLLEHKEHRYQFIEEAFQNQKVIIDTLITKLMEKTKYIKFTGNQIQNRIIEVNQNQKQVEQDIKVAIFTLMVEINKKGKALLHQLESLAKDHRMKLMQQQQEVAGLSKQLEHVMHFSKWAVSSGSSTALLYSKRLITYRLRHLLRARCDASPVTNNTIQFHCDPSFWAQNIINLGSLVIEDKESQPQMPKQNPVVEQNSQPPSGLSSNQLSKFPTQISLAQLRLQHMQQQVMAQRQQVQRRPAPVGLPNPRMQGPIQQPSISHQQPPPRLINFQNHSPKPNGPVLPPHPQQLRYPPNQNIPRQAIKPNPLQMAFLAQQAIKQWQISSGQGTPSTTNSTSSTPSSPTITSAAGYDGKAFGSPMIDLSSPVGGSYNLPSLPDIDCSSTIMLDNIVRKDTNIDHGQPRPPSNRTVQSPNSSVPSPGLAGPVTMTSVHPPIRSPSASSVGSRGSSGSSSKPAGADSTHKVPVVMLEPIRIKQENSGPPENYDFPVVIVKQESDEESRPQNANYPRSILTSLLLNSSQSSTSEETVLRSDAPDSTGDQPGLHQDNSSNGKSEWLDPSQKSPLHVGETRKEDDPNEDWCAVCQNGGELLCCEKCPKVFHLSCHVPTLTNFPSGEWICTFCRDLSKPEVEYDCDAPSHNSEKKKTEGLVKLTPIDKRKCERLLLFLYCHEMSLAFQDPVPLTVPDYYKIIKNPMDLSTIKKRLQEDYSMYSKPEDFVADFRLIFQNCAEFNEPDSEVANAGIKLENYFEELLKNLYPEKRFPKPEFRNESEDNKFSDDSDDDFVQPRKKRLKSIEERQLLK

SEQ ID NO: 49146 - protein, 1264 aa, Homo sapiens
MSLQREPPRPEPPPPFPPLPLQPPPPRESASRAEQPPRPPRETVRLELVLKDPTDESCVEFSYPELLLCGEQRKKLIHTEDPFNDEHQERQEVEMLAKKFEMKYGGKPRKHRKDRLQDLIDIGFGYDETDPFIDNSEAYDELVPASLTTKYGGFYINTGTLQFRQASDTEEDDITDNQKHKPPKVPKIKEDDIEMKKRKRKEEGEKEKKPRKKVPKQLGVVALNSHKSEKKKKRYKDSLSLAAMIRKFQKEKDALKKESNPKVPVTLSTPSLNKPPCAAAALGNDVPDLNLSSGDPDLPIFVSTNEHELFQEAENALEMLDDFDFDRLLDAASDGSPLSESGGENGTTTQPTYTSQVMPKVVPTLPEGLPVLLEKRIEDLRVAAKLFDEEGRKKFFTQDMNNILLDIELQLQELGPVIRSGVYSHLEAFVPCNKETLVKRLKKLHLNVQDDRLREPLQKLKLAVSNVMPEQLFKYQEDCQARSQAKCAKLQTDEEREKNGSEEDDDEKPGKRVIGPRKKFHWDDTIRTLLCNLVEIKLGCYELEPNKSQSAEDYLKSFMETEVKPLWPKGWMQARMLFKESRSVHNHLTSAPAKKKVIPAPKPKVKEVMVKTLPLHSFPTMLKECSPKKDQKTPTSLVASVSGPPTSSSTAAIAAASSSSAPAQETICLDDSLDEDLSFHSPSLDLVSEALAVINNGNKGPPVGSRISMPTTKPRPGLREEKLASIMSKLPLATPKKLDSTQTTHSSSLIAGHTGPVPKKPQDLAHTGISSGLIAGSSIQNPKVSLEPLPARLLQQGLQRSSQIHTSSSSQTHVSSSSQAQIAASSHALGTSEAQDASSLTQVTKVHQHSAVQQNYVSPLQATISKSQTNPVVKLSNNPQLSCSSSLIKTSDKPLMYRLPLSTPSPGNGSQGSHPLVSRTVPSTTTSSNYLAKAMVSQISTQGFKSPFSMAASPKLAASPKPATSPKPLPSPKPSASPKPSLSAKPSVSTKLISKSNPTPKPTVSPSSSSPNALVAQGSHSSTNSPVHKQPSGMNISRQSPTLNLLPSSRTSGLPPTKNLQAPSKLTNSSSTGTVGKNSLSGIAMNVPASRGSNLNSSGANRTSLSGGTGSGTQGATKPLSTPHRPSTASGSSVVTASVQSTAGASLLANASPLTLMTSPLSVTNQNVTPFGMLGGLVPVTMPFQFPLEIFGFGTDTAGVTTTSGSTSAAFHHSLTQNLLKGLQPGGAQHAATLSHSPLPAHLQQAFHDGGQSKGDTKLPRKSQ

SEQ ID NO: 49147 - protein, 383 aa, Homo sapiens
MLDQLMGTSRDGDTTRQRIKFSDDRVCKSHLLNCCPHDVLSGTRMDLGECLKVHDLALRADYEIASKEQDFFFELDAMDHLQSFIADCDRRTEVAKKRLAETQEEISAEVAAKAERVHELNEEIGKLLAKVEQLGAEGNVEESQKVMDEVEKARAKKREAEEVYRNSMPASSFQQQKLRVCEVCSAYLGLHDNDRRLADHFGGKLHLGFIEIREKLEELKRVVAEKQEKRNQERLKRREEREREEREKLRRSRSHSKNPKRSRSREHRRHRSRSMSRERKRRTRSKSREKRHRHRSRSSSRSRSRSHQRSRHSSRDRSRERSKRRSSKERFRDQDLASCDRDRSSRDRSPRDRDRKDKKRSYESANGRSEDRRSSEEREAGEI

SEQ ID NO: 49148 - protein, 715 aa, Homo sapiens
MIKLTQEHIEALLDKFGGEHNPPSIYLEAYEEYTSKLDALQQREQQLLESLGNGTDFSVSSSASMDTVTSSSSSSLSVLPSSLSVFQNPTDVARSNPKSPQKPIVRVFLPNKQRTVVPARCGVTVRDSLKKALMMRGLIPECCAVYRIQDGEKKPIGWDTDISWLTGEELHVEVLENVPLTTHNFVRKTFFTLAFCDFCRKLLFQGFRCQTCGYKFHQRCSTEVPLMCVNYDQLDLLFVSKFFEHHPIPQEEASLAETALTSGSSPSAPASDSIGPQILTSPSPSKSIPIPQPFRPADEDHRNQFGQRDRSSSAPNVHINTIEPVNIDDLIRDQGFRGDGGSTTGLSATPPASLPGSLTNVKALQKSPGPQRERKSSSSSEDRNRMKTLGRRDSSDDWEIPDGQITVGQRIGSGSFGTVYKGKWHGDVAVKMLNVTAPTPQQLQAFKNEVGVLRKTRHVNILLFMGYSTKPQLAIVTQWCEGSSLYHHLHIIETKFEMIKLIDIARQTAQGMDYLHAKSIIHRDLKSNNIFLHEDLTVKIGDFGLATVKSRWSGSHQFEQLSGSILWMAPEVIRMQDKNPYSFQSDVYAFGIVLYELMTGQLPYSNINNRDQIIFMVGRGYLSPDLSKVRSNCPKAMKRLMAECLKKKRDERPLFPQILASIELLARSLPKIHRSASEPSLNRAGFQTEDFSLYACASPKTPIQAGGYGEFAAFK

SEQ ID NO: 49149 - protein, 345 aa, Homo sapiens [sequence omitted]

SEQ ID NO: 49150 - protein, 556 aa, Homo sapiens
MGLAQPRLLSGPSQESPQTLGKESRGLRQQGTSVAQSGAQAPGRAHRCAHCRRHFPGWVALWLHTRRCQARLPLPCPECGRRFRHAPFLALHRQVHAAATPDLGFACHLCGQSFRGWVALVLHLRAHSAAKRPIACPKCERRFWRRKQLRAHLRRCHPPAPEARPFICGNCGRSFAQWDQLVAHKRVHVAEALEEAAAKALGPRPRGRPAVTAPRPGGDAVDRPFQCACCGKRFRHKPNLIAHRRVHTGERPHQCPECGKRFTNKPYLTSHRRIHTGEKPYPCKECGRRFRHKPNLLSHSKIHKRSEGSAQAAPGPGSPQLPAGPQESAAEPTPAVPLKPAQEPPPGAPPEHPQDPIEAPPSLYSCDDCGRSFRLERFLRAHQRQHTGERPFTCAECGKNFGKKTHLVAHSRVHSGERPFACEECGRRFSQGSHLAAHRRDHAPDRPFVCPDCGKAFRHKPYLAAHRRIHTGEKPYVCPDCGKAFSQKSNLVSHRRIHTGERPYACPDCDRSFSQKSNLITHRKSHIRDGAFCCAICGQTFDDEERLLAHQKKHDV

SEQ ID NO: 49151 - protein, 757 aa, Homo sapiens
MAAGQNLQSSERSEMIATWSPAVRTLRNITNNADIQQMNRPSNVAHILQTLSAPTKNLEQQVNHSQQGHTNANAVLFSQVKVTPETHMLQQQQQAQQQQQQHPVLHLQPQQIMQLQQQQQQQISQQPYPQQPPHPFSQQQQQQQQAHPHQFSQQQLQFPQQQLHPPQQLHRPQQQLQPFQQQHALQQQFHQLQQHQLQQQQLAQLQQQHSLLQQQQQQQIQQQQLQRMHQQQQQQQMQSQTAPHLSQTSQALQHQVPPQQPPQQQQQQQPPPSPQQHQLFGHDPAVEIPEEGFLLGCVFAIADYPEQMSDKQLLATWKRIIQAHGGTVDPTFTSRCTHLLCESQVSSAYAQAIRERKRCVTAHWLNTVLKKKKMVPPHRALHFPVAFPPGGKPCSQHIISVTGFVDSDRDDLKLMAYLAGAKYTGYLCRSNTVLICKEPTGLKYEKAKEWRIPCVNAQWLGDILLGNFEALRQIQYSRYTAFSLQDPFAPTQHLVLNLLDAWRVPLKVSAELLMSIRLPPKLKQNEVANVQPSSKRARIEDVPPPTKKLTPELTPFVLFTGFEPVQVQQYIKKLYILGGEVAESAQKCTHLIASKVTRTVKFLTAISVVKHIVTPEWLEECFRCQKFIDEQNYILRDAEAEVLFSFSLEESLKRAHVSPLFKAKYFYITPGICPSLSTMKAIVECAGGKVLSKQPSFRKLMEHKQNSSLSEIILISCENDLHLCREYFARGIDVHNAEFVLTGVLTQTLDYESYKFN

SEQ ID NO: 49152 - protein, 1020 aa, Homo sapiens
MDLPEHKEPRCRDPDQDARSRDRVAEVHTAKESPRGERDRDRQRERRRDAKDREKEKLKEKHREAEKSHSRGKDREKEKDRRARKEELRQTVAHHNLLGQETRDRQLLERAERKGRSVSKVRSEEKDEDSERGDEDRERRYRERKLQYGDSKDNPLKYWLYKEEGERRHRKPREPDRDNKHREKSSTREKREKYSKEKSNSFSDKGEERHKEKRHKEGFHFDDERHQSNVDRKEKSAKDEPRKRESQNGEHRNRGASSKRDGTSSQHAENLVRNHGKDKDSRRKHGHEEGSSVWWKLDQRPGGEETVEIEKEETDLENARADAYTASCEDDFEDYEDDFEVCDGDDDESSNEPESREKLEELPLAQKKEIQEIQRAINAENERIGELSLKLFQKRGRTEFEKEPRTDTNSSPSRASVCGIFVDFASASHRQKSRTQALKQKMRSTKLLRLIDLDFSFTFSLLDLPPVNEYDMYIRNFGKKNTKQAYVQCNEDNVERDIQTEEIETREVWTQHPGESTVVSGGSEQRDTSDAVVMPKIDTPRLCSFLRAACQVMAVLLEEDRLAAEPSWNLRAQDRALYFSDSSSQLNTSLPFLQNRKVSSLHTSRVQRQMVVSVHDLPEKSFVPLLDSKYVLCVWDIWQPSGPQKVLICESQVTCCCLSPLKAFLLFAGTAHGSVVVWDLREDSRLHYSVTLSDGFWTFRTATFSTDGILTSVNHRSPLQAVEPISTSVHKKQSFVLSPFSTQEEMSGLSFHIASLDESGVLNVWVVVELPKADIAGSISDLGLMPGGRVKLVHSALIQLGDSLSHKGNEFWGTTQTLNVKFLPSDPNHFIIGTDMGLISHGTRQDLRVAPKLFKPQQHGIRPVKVNVIDFSPFGEPIFLAGCSDGSIRLHQLSSAFPLLQWDSSTDSHAVTGLQWSPTRPAVFLVQDDTSNIYIWDLLQSDLGPVAKQQVSPNRLVAMAAVGEPEKAGGSFLALVLARASGSIDIQHLKRRWAAPEVDECNRLRLLLQEALWPEGKLHK

SEQ ID NO: 49153 - protein, 469 aa, Homo sapiens
MLENISHLVSIGKQLCKSVVLSQLEQVEKLSTQRISLLQGREVGIKHQEIPFIQHIYQKGTSTISTMRSHTQEDPFLCNDLGEDFTQHIALTQNVITYMRTKHFVSKKFGKIFSDWLSFNQHKEIHTKCKSYGSHLFDYAFIQNSALRPHSVTHTREITLECRVCGKTFSKNSNLRRHEMIHTGEKPHGCHLCGKAFTHCSDLRKHERTHTGEKPYGCHLCGKAFSKSSNLRRHEMIHTREKAQICHLCGKAFTHCSDLRKHERTHLGDKPYGCLLCGKAFSKCSYLRQHERTHNGEKPYECHLCGKAFSHCSHLRQHERSHNGEKPHGCHLCGKAFTESSVLKRHERIHTGEKPYECHVCGKAFTESSDLRRHERTHTGEKPYECHLCGKAFNHSSVLRRHERTHTGEKPYECNICGKAFNRSYNFRLHRRVHTGEKPYVCPLCGKAFSKFFNLRQHERTHTKKAMNM

SEQ ID NO: 49154 - protein, 199 aa, Homo sapiens [sequence omitted]

SEQ ID NO: 49155 - protein, 218 aa, Homo sapiens
MVDYDEGTDVFQQLNMNSAPTFMHFPPKGRPKRADTFDLQRIGFAAEQLAKWIADRTDVHIRVFRPPNYSGTIALALLVSLVGGLLYLRRNNLEFIYNKTGWAMVSLCIVFAMTSGQMWNHIRGPPYAHKNPHNGQVSYIHGSSQAQFVAESHIILVLNAAITMGMVLLNEAATSKGDVGKRRIICLVGLGLVVFFFSFLLSIFRSKYHGYPYSFLIK

SEQ ID NO: 49156 - protein, 219 aa, Homo sapiens
MVDYDEGTDVFQQLNMNSAPTFMHFPPKGRPKRADTFDLQRIGFAAEQLAKWIADRTDVHIRVFRPPNYSGTIALALLVSLVGGLLYLRRNNLEFIYNKTGWAMVSLCIVFAMTSGQMWNHIRGPPYAHKNPHNGQVSYIHGSSQAQFVAESHIILVLNAAITMGMVLLNEAATSKGDVGKRRIICLVGLGLVVFFFSFLLSIFRSKYHGYPYSDLDFE

SEQ ID NO: 49157 - protein, 17 aa, Homo sapiens
MWEDCIQSSSWLPAEIT

SEQ ID NO: 49158 - protein, 665 aa, Homo sapiens
MYTIERNAERTATAGRLLYDMFVNFPDQPVVWREISIITSALRNDSQDKQTQFLRSLFETLPGRVQCEMLLKVTEQCFNTLERSEMLLLLLRRFPETVVQHGVGLGEALLEAETIEEQESPVNCFRKLFVCDVLPLIINNHDVRLPANLLYKYLNKAAEFYINYVTRSTQIENQHQGAQDTSDLMSPSKRSSQKYIIEGLTEKSSQIVDPWERLFKILNVVGMRCEWQMDKGRRSYGDILHRMKDLCRYMNNFDSEAHAKYKNQVVYSTMLVFFKNAFQYVNSIQPSLFQGPNAPSQVPLVLLEDVSNVYGDVEIDRNKHIHKKRKLAEGREKTMSSDDEDCSAKGRNRHIVVNKAELANSTEVLESFKLARESWELLYSLEFLDKEFTRICLAWKTDTWLWLRIFLTDMIIYQGQYKKAIASLHHLAALQGSISQPQITGQGTLEHQRALIQLATCHFALGEYRMTCEKVLDLMCYMVLPIQDGGKSQEEPSKVKPKFRKGSDLKLLPCTSKAIMPYCLHLMLACFKLRAFTDNRDDMALGHVIVLLQQEWPRGENLFLKAVNKICQQGNFQYENFFNYVTNIDMLEEFAYLRTQEGGKIHLELLPNQGMLIKHHTVTRGITKGVKEDFRLAMERQVSRCGENLMVVLHRFCINEKILLLQTLT

SEQ ID NO: 49159 - protein, 253 aa, Homo sapiens
MICRLVVLVFGMLCPAYASYKAVKTKNIREYVRWMMYWIVFALFMAAEIVTDIFISWFPFYYEIKMAFVLWLLSPYTKGASLLYRKFVHPSLSRHEKEIDAYIVQAKERSYETVLSFGKRGLNIAASAAVQAATKSQGALAGRLRSFSMQDLRSISDAPAPAYHDPLYLEDQVSHRRPPIGYRAGGLQDSDTEDECWSDTEAVPRAPARPREKPLIRSQSLRVVKRKPPVREGTSRSLKVRTRKKTVPSDVDS

SEQ ID NO: 49160 - protein, 169 aa, Homo sapiens
MICRLVVLVFGMLCPAYASYKAVKTKNIREYVRWMMYWIVFALFMAAEIVTDIFISWFPFYYEIKMAFVLWLLSPYTKGASLLYRKFVHPSLSRHEKEIDAYIVQAKERSYETVLSFGKRGLNIAASAAVQAATKGTGPGACRTATPRMSVGQILRQSPGRQPGPERSP

SEQ ID NO: 49161 - protein, 841 aa, Homo sapiens
MAETSVGWSRTLGRGSSDASLLPLGRAAGGISREVDKPPCTFSTPSRGPPQLSSPPALPQSPLHSPDRPLVLTVEHKEKELIVKQGSKGTPQSLGLNLVKIQCHNEAVYQYHVTFSPNVECKSMRFGMLKDHQAVTGNVTAFDGSILYLPVKLQQVLELKSQRKTDSAEISIKIQMTKILEPCSDLCIPFYNVVFRRVMKLLDMKLVGRNFYDPTSAMVLQQHRLQIWPGYAASIRRTDGGLFLLADVSHKVIRNDCVLDVMHAIYQQNKEHFQDECTKLLVGNIVITRYNNRTYRIDDVDWNKTPKDSFTMSDGKEITFLEYYSKNYGITVKEEDQPLLIHRPSERQDNHGMLLKGEILLLPELSFMTGIPEKMKKDFRAMKDLAQQINLSPKQHHSALECLLQRIAKNEAATNELMRWGLRLQKDVHKIEGRVLPMERINLKNTSFITSQELNWVKEVTRDPSILTIPMHFWALFYPKRAMDQARELVNMLEKIAGPIGMRMSPPAWVELKDDRIETYVRTIQSTLGAEGKIQMVVCIIMGPRDDLYGAIKKLCCVQSPVPSQVVNVRTIGQPTRLRSVAQKILLQINCKLGGELWGVDIPLKQLMVIGMDVYHDPSRGMRSVVGFVASINLTLTKWYSRVVFQMPHQEIVDSLKLCLVGSLKKFYEVNHCLPEKIVVYRDGVSDGQLKTVANYEIPQLQKCFEAFENYQPKMVVFVVQKKISTNLYLAAPQNFVTPTPGTVVDHTITSCEWVDFYLLAHHVRQGCGIPTHYVCVLNTANLSPDHMQRLTFKLCHMYWNWPGTIRVPAPCKYAHKLAFLSGHILHHEPAIQLCENLFFL

SEQ ID NO: 49162 - protein, 429 aa, Homo sapiens
MIEVDAPITVCGDIHGQFFDLMKLFEVGGSPSNTRYLFLGDYVDRGYFSIECVLYLWSLKINHPKTLFLLRGNHECRHLTDYFTFKQECRIKYSEQVYDACMETFDCLPLAALLNQQFLCVHGGMSPEITSLDDIRKLDRFTEPPAFGPVCDLLWSDPSEDYGNEKTLEHYTHNTVRGCSYFYSYPAVCEFLQNNNLLSIIRAHEAQDAGYRMYRKSQATGFPSLITIFSAPNYLDVYNNKAAVLKYENNVMNIRQFNCSPHPYWLPNFMDVFTWSLPFVGEKVTEMLVNVLNICSDDELISDDEAEGSTTVRKEIIRNKIRAIGKMARVFSILRQESESVLTLKGLTPTGTLPLGVLSGGKQTIETAIRGFSLQHKIRSFEEARGLDRINERMPPRKDSIHAGGPMKSVTSAHSHAAHRSDQGKKAHS

SEQ ID NO: 49163 - protein, 31 aa, Homo sapiens
MRGHFWVGDELYCEKHARQRYSAPATLSSRA

SEQ ID NO: 49164 - protein, 124 aa, Homo sapiens
MFEVFHRGFSFPVNYKSLKTALQVYDKEVQWTLGAILYRTRFLPLSHRRPEPPPLLEKGAQRRRKRRGTTVESAVPARPLRIPETKKIGMLIIPCSGGCPKLCCAVWQPPPYGATKHLQCAAWN

SEQ ID NO: 49165 - protein, 848 aa, Homo sapiens
MTDLTRKEGLSACQQSGFPAVLSSKRRRISYQRDSDENLTDAEGKVIGLQIFNIDTDRACAVETSVDLSEISSKLGSTQSGFLVEESLPLSELTETSNALKVADCVVGKGSSDAVSPDTFTAEVSSDAVPDVRSPATPACRRDLPTPKTFVLRSVLKKPSVKMCLESLQEHCNNLYDDDGTHPSLISNLPNCCKEKEAEDEENFEAPAFLNMRKRKRVTFGEDLSPEVFDESLPANTPLRKGGTPVCKKDFSGLSSLLLEQSPVPEPLPQPDFDDKGENLENIEPLQVSFAVLSSPNKSSISETLSGTDTFSSSNNHEKISSPKVGRITRTSNRRNQLVSVVEESVCNLLNTEVQPCKEKKINRRKSQETKCTKRALPKKSQVLKSCRKKKGKGKKSVQKSLYGERDIASKKPLLSPIPELPEVPEMTPSIPSIRRLGSGYFSSNGKLEEVKTPKNPVKRKDLLRHDPDLHMHQGYDKYDVSEFCSYIKSSSSLGNATSDEDPNTNIMNINENKNIPKAKNKSESENEPKAGTDSPVSCASVTEERVASDSPKPALTLQQGQEFSAGGQNAENLCQFFKISPDLNIKCERKDDFLGAAEGKLQCNRLMPNSQKDCHCLGDVLIENTKESKSQSEDLGRKPMESSSVVSCRDRKDRRRSMCYSDGRSLHLEKNGNHTPSSSVGSSVEISLENSELFKDLSDAIEQTFQRRNSETKVRRSTRLQKDLENEGLVWISLPLPSTSQKAKRRTICTFDSSGFESMSPIKETVSSRQKPQMAPPVSDPENSQGPAAGSSDEPGKRRKSFCISTLANTKATSQFKGYRRRSSLNGKGESSLTALERIEHNGERKQ

SEQ ID NO: 49166 - protein, 553 aa, Homo sapiens [sequence omitted]

SEQ ID NO: 49167 - protein, 406 aa, Homo sapiens
MTKHEILHALETLDRLDQEHSDKFGRRSSYGGSSYGNSTNNVPASSSTATASTQTQHSGMSPSPSNSYDTSPQPCTTNQNGRENNERLSTSNGKMSPTRYHANSMGQRSYSFEASEEDLDVDDKVEELMRRDSSVIKEEIKAFLANRRISQAVVAQVTGISQSRISHWLLQQGSDLSEQKKRAFYRWYQLEKTNPGATLSMRPAPIPIEDPEWRQTPPPVSATSGTFRLRRGSRFTWRKECLAVMESYFNENQYPDEAKREEIANACNAVIQKPGKKLSDLERVTSLKVYNWFANRRKEIKRRANIAAILESHGIDVQSPGGHSNSDDVDGNDYSEQDTWQVRNGEEEEGRSSEGGREAEKDDSTSHSDHQDPISLAVEMAAVNHTILALARQGANEIKTEALDDD

SEQ ID NO: 49168 - protein, 151 aa, Homo sapiens
MFLMLGCALPIYNKYWPLFVLFFYILSPIPYCIARRLVDDTDAMSNACKELAIFLTTGIVVSAFGLPIVFARAHLMGRLPFFSKMGTAESEGRETLTQQLPLPAAAMRRLLPASRVSTQPVLRLADSAESLLGRPALWALGFLLCPPSQAQ

SEQ ID NO: 49169 - protein, 207 aa, Homo sapiens
MKTRHQRGDTHPLTLDEILDETQHLDIGLKQKQWLMTEALVNNPKIEVIDGKYAFKPKYNVRDKKALLRLLDQHDQRGLGGILLEDIEEALPNSQKAVKALGDQILFVNRPDKKKILFFNDKSCQFSVDEEFQKLWRSVTVDSMDEEKIEEYLKRQGISSMQESGPKKVAPIQRRKKPASQKKRRFKTHNEHLAGVLKDYSDITSSK

SEQ ID NO: 49170 - protein, 162 aa, Homo sapiens
MKLRKLEERFYQMTGEAWKLSSGHKLGGDEGTSQTSFETSNREAAKSQNLPKPLTEFPSPAEQPTCKEIPDLPEEPSQTAEEVVTVALRCPSGNVLRRRFLKSYSSQVLFDWMTRIGYHISLYSLSTSFPRRPLAVEGGQSLEDIGITVDTVLILEEKEQTN

SEQ ID NO: 49171 - protein, 596 aa, Homo sapiens
MKSQESAAGSKLVLRCETSSEYSSLRFKWFKNGNELNRKNKPQNIKIQKKPGKSELRINKASLADSGEYMCKVISKLGNDSASANITIVESNEIITGMPASTEGAYVSSESPIRISVSTEGANTSSSTSTSTTGTSHLVKCAEKEKTFCVNGGECFMVKDLSNPSRYLCKCPNEFTGDRCQNYVMASFYKAEELYQKRVLTITGICIALLVVGIMCVVAYCKTKKQRKKLHDRLRQSLRSERNNMMNIANGPHHPNPPPENVQLVNQYVSKNVISSEHIVEREAETSFSTSHYTSTAHHSTTVTQTPSHSWSNGHTESILSESHSVIVMSSVENSRHSSPTGGPRGRLNGTGGPRECNSFLRHARETPDSYRDSPHSERYVSAMTTPARMSPVDFHTPSSPKSPPSEMSPPVSSMTVSMPSMAVSPFMEEERPLLLVTPPRLREKKFDHHPQQFSSFHHNPAHDSNSLPASPLRIVEDEEYETTQEYEPAQEPVKKLANSRRAKRTKPNGHIANRLEVDSNTSSQSSNSESETEDERVGEDTPFLGIQNPLAASLEATPAFRLADSRTNPAGRFSTQEEIQARLSSVIANQDPIAV

SEQ ID NO: 49172 - protein, 599 aa, Homo sapiens
MKSQESAAGSKLVLRCETSSEYSSLRFKWFKNGNELNRKNKPQNIKIQKKPGKSELRINKASLADSGEYMCKVISKLGNDSASANITIVESNEIITGMPASTEGAYVSSESPIRISVSTEGANTSSSTSTSTTGTSHLVKCAEKEKTFCVNGGECFMVKDLSNPSRYLCKCQPGFTGARCTENVPMKVQNQEKAEELYQKRVLTITGICIALLVVGIMCVVAYCKTKKQRKKLHDRLRQSLRSERNNMMNIANGPHHPNPPPENVQLVNQYVSKNVISSEHIVEREAETSFSTSHYTSTAHHSTTVTQTPSHSWSNGHTESILSESHSVIVMSSVENSRHSSPTGGPRGRLNGTGGPRECNSFLRHARETPDSYRDSPHSERYVSAMTTPARMSPVDFHTPSSPKSPPSEMSPPVSSMTVSMPSMAVSPFMEEERPLLLVTPPRLREKKFDHHPQQFSSFHHNPAHDSNSLPASPLRIVEDEEYETTQEYEPAQEPVKKLANSRRAKRTKPNGHIANRLEVDSNTSSQSSNSESETEDERVGEDTPFLGIQNPLAASLEATPAFRLADSRTNPAGRFSTQEEIQARLSSVIANQDPIAV

SEQ ID NO: 49173 - protein, 421 aa, Homo sapiens
MKSQESAAGSKLVLRCETSSEYSSLRFKWFKNGNELNRKNKPQNIKIQKKPGKSELRINKASLADSGEYMCKVISKLGNDSASANITIVESNEIITGMPASTEGAYVSSESPIRISVSTEGANTSSSTSTSTTGTSHLVKCAEKEKTFCVNGGECFMVKDLSNPSRYLCKCQPGFTGARCTENVPMKVQNQEKAEELYQKRVLTITGICIALLVVGIMCVVAYCKTKKQRKKLHDRLRQSLRSERNNMMNIANGPHHPNPPPENVQLVNQYVSKNVISSEHIVEREAETSFSTSHYTSTAHHSTTVTQTPSHSWSNGHTESILSESHSVIVMSSVENSRHSSPTGGPRGRLNGTGGPRECNSFLRHARETPDSYRDSPHSERHNLIAELRRNKAHRSKCMQIQLSATHLRSSSIPHLGFIL

SEQ ID NO: 49174 - protein, 604 aa, Homo sapiens
MKSQESAAGSKLVLRCETSSEYSSLRFKWFKNGNELNRKNKPQNIKIQKKPGKSELRINKASLADSGEYMCKVISKLGNDSASANITIVESNEIITGMPASTEGAYVSSESPIRISVSTEGANTSSSTSTSTTGTSHLVKCAEKEKTFCVNGGECFMVKDLSNPSRYLCKCPNEFTGDRCQNYVMASFYKHLGIEFMEAEELYQKRVLTITGICIALLVVGIMCVVAYCKTKKQRKKLHDRLRQSLRSERNNMMNIANGPHHPNPPPENVQLVNQYVSKNVISSEHIVEREAETSFSTSHYTSTAHHSTTVTQTPSHSWSNGHTESILSESHSVIVMSSVENSRHSSPTGGPRGRLNGTGGPRECNSFLRHARETPDSYRDSPHSERYVSAMTTPARMSPVDFHTPSSPKSPPSEMSPPVSSMTVSMPSMAVSPFMEEERPLLLVTPPRLREKKFDHHPQQFSSFHHNPAHDSNSLPASPLRIVEDEEYETTQEYEPAQEPVKKLANSRRAKRTKPNGHIANRLEVDSNTSSQSSNSESETEDERVGEDTPFLGIQNPLAASLEATPAFRLADSRTNPAGRFSTQEEIQARLSSVIANQDPIAV

SEQ ID NO: 49175 - protein, 418 aa, Homo sapiens
MKSQESAAGSKLVLRCETSSEYSSLRFKWFKNGNELNRKNKPQNIKIQKKPGKSELRINKASLADSGEYMCKVISKLGNDSASANITIVESNEIITGMPASTEGAYVSSESPIRISVSTEGANTSSSTSTSTTGTSHLVKCAEKEKTFCVNGGECFMVKDLSNPSRYLCKCPNEFTGDRCQNYVMASFYKAEELYQKRVLTITGICIALLVVGIMCVVAYCKTKKQRKKLHDRLRQSLRSERNNMMNIANGPHHPNPPPENVQLVNQYVSKNVISSEHIVEREAETSFSTSHYTSTAHHSTTVTQTPSHSWSNGHTESILSESHSVIVMSSVENSRHSSPTGGPRGRLNGTGGPRECNSFLRHARETPDSYRDSPHSERHNLIAELRRNKAHRSKCMQIQLSATHLRSSSIPHLGFIL

SEQ ID NO: 49176 - protein, 400 aa, Homo sapiens
MPETLGQVAKALEKYAAPSKEEEGGGDGHSEAAEKAAQVGLLFLKLLGKVETAKNSLVGPAWQTGLHHLAGPVYIFAITHSLEQPWTTPRSREVAREVLTSLLQVTECGSVAGFLHGENEDEKGRLSVILGLLKPDLYKESWKNNPAIKHVFSWTLQQVTRPWLSQHLERVLPASLVISDDYQTENKILGVHCLHHIVLNVAVLLCLLDLFPILEKTLHWKGDGARPTTHCDEVLRLILTHMEPEHRLLLRRTYARNLPAFVNRLGILTVRHLKRLERVIIGYLEVYDGPEEEARLKILETLKLLMQHTWPRVSCRLVVLLKALLKLICDVARDPNLTPESVKSALLQEATDCLILLDRCSQGRVKGLLAKIPQSCEDRKVVNYIRKVQQVSEGAPYNGT

SEQ ID NO: 49177 - protein, 431 aa, Homo sapiens [sequence omitted]

SEQ ID NO: 49178 - protein, 243 aa, Homo sapiens
MTLPHYPYGDGNRSVPQSGPTVRPQEDAWASPGAYGMGGRYPWPSSAPSAPPGNLYMTESTSPWPSSGSPQSPPSPPVQQPKDSSYPYSQSDQSMNRHNFPCSVHQYESSGTVNNDDSDLLDSQVQYSAEPQLYGNATSDHPNNQDQSSSLPEECVPSDESTPPSIKKIIHVLEKVQYLEQEVEEFVGKKTDKAYWLLEEMLTKELLELDSVETGGQDSVRQARKEAVCKIQAILEKLEKKGL

SEQ ID NO: 49179 - protein, 681 aa, Homo sapiens [sequence omitted]

SEQ ID NO: 49180 - protein, 565 aa, Homo sapiens
MEKKLHAVPAAKTVKFKCPSSGTPNPTLRWLKNGKEFKPDHRIGGYKTAGVNTTDKEMEVLHLRNVSFEDAGEYTCLAGNSIGLSHHSAWLTVLEALEERPAVMTSPLYLEIIIYCTGAFLISCMVGSVIVYKMKSGTKKSDFHSQMAVHKLAKSIPLRRQVSADSSASMNSGVLLVRPSRLSSSGTPMLAGVSEYELPEDPRWELPRDRLVLGKPLGEGCFGQVVLAEAIGLDKDKPNRVTKVAVKMLKSDATEKDLSDLISEMEMMKMIGKHKNIINLLGACTQDGPLYVIVEYASKGNLREYLQARRPPGLEYCYNPSHNPEEQLSSKDLVSCAYQVARGMEYLASKKCIHRDLAARNVLVTEDNVMKIADFGLARDIHHIDYYKKTTNGRLPVKWMAPEALFDRIYTHQSDVWSFGVLLWEIFTLGGSPYPGVPVEELFKLLKEGHRMDKPSNCTNELYMMMRDCWHAVPSQRPTFKQLVEDLDRIVALTSNQVLHPDLTTHLLPLRCFWKVRKRRCLLRGQEPHPCSRGAGQRVKAQQPSTMDGFLQGNRWGWAGEGAPT

SEQ ID NO: 49181 - protein, 85 aa, Homo sapiens
MVLGGCPVSYLLLCGQAALLLGNLLLLHCVSRSHSQNATAEPELTSAGAAQPEGPGGAASWEYGDPHSPVILCSYLITPFFNISF

SEQ ID NO: 49182 - protein, 565 aa, Homo sapiens [sequence omitted]

SEQ ID NO: 49183 - protein, 100 aa, Homo sapiens
MGDDGSIDYTVHEAWNEATNVYLIVILVSFGLFMYAKRNKRRIMRIFSVPPTEETLSEPNFYDTISKIRLRQQLEMYSISRKYDYQQPQNQADSVQLSLE

SEQ ID NO: 49184 - protein, 329 aa, Homo sapiens [sequence omitted]

SEQ ID NO: 49185 - protein, 154 aa, Homo sapiens
MNYITAIIEEQPKNYQVWHHRRVLVEWLRDPSQELEFIADILNQDAKNYHAWQHRQWVIQEFKLWDNELQYVDQLLKEDVRNNSVWNQRYFVISNTTGYNDRAVLEREVQLVISFTCSFVTNMFACLPYLRHWGYSRSRSYPMELKEDRVLSGT

SEQ ID NO: 49186 - protein, 218 aa, Homo sapiens
MYDDESAIDFSAYIDSMAAVPTLELCHDELFADLFNSNHKAGGAGPLELLPGGPARPLGPGPAAPRLLKREPDWGDGDAPGSLLPAQVAACAQTVVSLAAAGQPTPPTSPEPPRSSPRQTPAPGPAREKSAGKRGPDRGSPEYRQRRERNNIAVRKSRDKAKRRNQEMQQKLVELSAENEKLHQRVEQLTRDLAGLRQFFKQLPSPPFLPAAGTADCR

SEQ ID NO: 49187 - protein, 230 aa, Homo sapiens [sequence omitted]

SEQ ID NO: 49188 - protein, 285 aa, Homo sapiens
MEALKLQPGLSFLNLGSGTGYLSTMVGLILGPFGINHGIELHSDVVEYAKEKLESFIKNSDSFDKFEFCEPAFVVGNCLQIASDSHQYDRIYCGAGVQKDHENYMKILLKVGGILVMPIEDQLTQIMRTGQNTWESKNILAVSFAPLVQPSKNDNGKPDSVGLPPCAVRNLQDLARIYIRRTLRNFINDEMQAKGIPQRAPPKRKRKRVKQRINTYVFVGNQLIPQPLDSEEDEKMEEDNKEEEEKDHNEAMKPEEPPQNLLREKIMKLPLPESLKAYLTYFRDK

SEQ ID NO: 49189 - protein, 241 aa, Homo sapiens [sequence omitted]

SEQ ID NO: 49190 - protein, 255 aa, Homo sapiens [sequence omitted]

SEQ ID NO: 49191 - protein, 270 aa, Homo sapiens [sequence omitted]

SEQ ID NO: 49192 - protein, 212 aa, Homo sapiens [sequence omitted]

SEQ ID NO: 49193 - protein, 227 aa, Homo sapiens
MVIALLGVWTSVAVVWFDLVDYEEVLAKAKDFRYNLSEVLQGKLGIYDADGDGDFDVDDAKVLLGLKERSTSEPAVPPEEAEPHTEPEEQVPVEAEPQNIEDEAKEQIQSLLHEMVHAEHETEHSYHVEETVSQDCNQDMEEMMSEQENPDSSEPVVEDERLHHDTDDVTYQVYEEQAVYEPLENEGIEITEVTAPPEDNPVEDSQVIVEEVSIFPVEEQQEVPPDT

SEQ ID NO: 49194 - protein, 279 aa, Homo sapiens [sequence omitted]

SEQ ID NO: 49195 - skipped

SEQ ID NO: 49196 - protein, 316 aa, Homo sapiens
MQEAQSIDEIYKYDKKQQQEILAAKPWTKDHHYFKYCKISALALLKMVMHARSGGNLEVMGLMLGKVDGETMIIMDSFALPVEGTETRVNAQAAAYEYMAAYIENAKQVGRLENAIGWYHSHPGYGCWLSGIDVSTQMLNQQFQEPFVAVVIDPTRTISAGKVNLGAFRTYPKGYKPPDEGPSEYQTIPLNKIEDFGVHCKQYYALEVSYFKSSLDRKLLELLWNKYWVNTLSSSSLLTNADYTTGQVFDLSEKLEQSEAQLGRGSFMLGLETHDRKSEDKLAKATRDSCKTTIEAIHGLMSQVIKDKLFNQINIS

SEQ ID NO: 49197 - protein, 1154 aa, Homo sapiens
MKGKLSAKLSENSKILISMAKENIPPNSQQTRGSLGIDYGLSLPLGEDYERKKHKLKEELRQDYRRYLTQERLKLERNKEYNQFLRGKEESSEKFRQVEKSTEPKSQRNKKPIGQVKPDLTSQIQTSCENSEGPRKDVLTPSEAYEELLNQRRLEEDRYRQLDDEIELRNRRIIKKANEEVGISNLKHQRFASKAGIPDRRFHRFNEDRVFDRRYHRPDQDPEVSEEMDERFRYESDFDRRLSRVYTNDRMHRNKRGNMPPMEHDGDVIEQSNIRISSAENKSAPDNETSKSANQDTCSPFAGMLFGGEDRELIQRRKEKYRLELLEQMAEQQRNKRREKDLELRVAASGAQDPEKSPDRLKQFSVAPRHFEEMIPPERPRIAFQTPLPPLSAPSVPPIPSVHPVPSQNEDLRSGLSSALGEMVSPRIAPLPPPPLLPPLATNYRTPYDDAYYFYGSRNTFDPSLAYYGSGMMGVQPAAYVSAPVTHQLAQPVVNTVGQNELKITSDQVINSGLIFEDKPKPSKQSLQSYQEALQQQIREREERRKKEREEKEEYEAKLEAEMRTYNPWGKGGGGAPLRDAKGNLITDLNRMHRQNIDAYHNPDARTYEDKRAVVSLDPNLATSNAENLEDAANKSSGHMQTQSSPFARGNVFGEPPTELQIKQQELYKNFLRFQIEEKKQREEAERERLRIAEEKEERRLAEQRARIQQEYEEEQEKKREKEEEQRLKNEEHIRLAEERQKEAERKKKEEEEKYNLQLQHYCERDNLIGEETKHMRQPSPIVPALQNKIASKLQRPPSVDSIIRSFIHESSMSRAQSPPVPARKNQLRAEEEKKNVIMELSEMRKQLRSEERRLQERLLHMDSDDEIPIRKKERNPMDIFDMARHRLQAPVRRQSPKGLDAATFQNVHDFNELKDRDSETRVDLKFMYLDPPRDHHTLEIQQQALLREQQKRLNRIKMQEGAKVDLDAIPSAKVREQRMPRDDTSDFLKNSLLESDSAFIGAYGETYPAIEDDVLPPPSQLPSARERRRNKWKGLDIDSSRPNVAPDGLSLKSISSVNVDELRVRNEERMRRLNEFHNKPINTDDESSLVDPDDIMKHIGDDGSNSVATEPWLRPGTSETLKRFMAEQLNQEQQQIPGKPGTFTWQGLSTAHG

SEQ ID NO: 49198 - protein, 1238 aa, Homo sapiens
MQCFAVSQPKSIKEEGEDLQSCLICVARRVPMKERPVLPSSESFTTRQDLQGKITSLDTSTMRAAMKPGWEDLVRRCIQKFHAQHEGESVSYAKRHHHEVLRQGLAFSQIYRFSLSDGTLVAAQTKSKLIRSQTTNEPQLVISLHMLHREQNVCVMNPDLTGQTMGKPLNPISSNSPAHQALCSGNPGQDMTLSSNINFPINGPKEQMGMPMGRFGGSGGMNHVSGMQATTPQGSNYALKMNSPSQSSPGMNPGQPTSMLSPRHRMSPGVAGSPRIPPSQFSPAGSLHSPVGVCSSTGNSHSYTNSSLNALQALSEGHGVSLGSSLASPDLKMGNLQNSPVNMNPPPLSKMGSLDSKDCFGLYGEPSEGTTGQAESSCHPGEQKETNDPNLPPAVSSERADGQSRLHDSKGQTKLLQLLTTKSDQMEPSPLASSLSDTNKDSTGSLPGSGSTHGTSLKEKHKILHRLLQDSSSPVDLAKLTAEATGKDLSQESSSTAPGSEVTIKQEPVSPKKKENALLRYLLDKDDTKDIGLPEITPKLERLDSKTDPASNTKLIAMKTEKEEMSFEPGDQPGSELDNLEEILDDLQNSQLPQLFPDTRPGAPAGSVDKQAIINDLMQLTAENSPVTPVGAQKTALRISQSTFNNPRPGQLGRLLPNQNLPLDITLQSPTGAGPFPPIRNSSPYSVIPQPGMMGNQGMIGNQGNLGNSSTGMIGNSASRPTMPSGEWAPQSSAVRVTCAATTSAMNRPVQGGMIRNPAASIPMRPSSQPGQRQTLQSQVMNIGPSELEMNMGGPQYSQQQAPPNQTAPWPESILPIDQASFASQNRQPFGSSPDDLLCPHPAAESPSDEGALLDQLYLALRNFDGLEEIDRALGIPELVSQSQAVDPEQFSSQDSNIMLEQKAPVFPQQYASQAQMAQGSYSPMQDPNFHTMGQRPSYATLRMQPRPGLRPTGLVQNQPNQLRLQLQHRLQAQQNRQPLMNQISNVSNVNLTLRPGVPTQAPINAQMLAQRQREILNQHLRQRQMHQQQQVQQRTLMMRGQGLNMTPSMVAPSGMPATMSNPRIPQANAQQFPFPPNYGISQQPDPGFTGATTPQSPLMSPRMAHTQSPMMQQSQANPAYQAPSDINGWAQGNMGGNSMFSQQSPPHFGQQANTSMYSNNMNINVSMATNTGGMSSMNQMTGQISMTSVTSVPTSGLSSMGPEQVNDPALRGGNLFPNQLPGMDMIKQEGDTTRKYC

SEQ ID NO: 49199 - protein, 263 aa, Homo sapiens
MVRHIYRDLEAADAAALQAGNGEEEILPHCNLQVFTYTCDVGKRENVYLTAERVRKEVGEVSVLVNNAGVVSGHHLLECPDELIERTMMVNCHAHFWTTKAFLPTMLEINHGHIVTVASSLGLFSTAGVEDYCASKFGVVGFHESLSHELKAAEKDGIKTTLVCPYLVDTGMFRGCRIRKEIEPFLPPLKPDYCVKQAMKAILTDQPMICTPRLMYIVTFMKSILPFEAVVCMYRFLGADKCMYPFIAQRKQATNNNEAKNGI

SEQ ID NO: 49200 - protein, 68 aa, Homo sapiens
MLSGPGQFAENETNEVNFREIPSHVLSKVCMYFTYKVRYTNSSTEIPEFPIAPEIALELLMAANFLDC

SEQ ID NO: 49201 - protein, 115 aa, Homo sapiens
MNRELLWHGFAEFLIFLLPLINVQKLKAKLSSWCIPLTGAPNSDNTLATSGKECALCGEWPTMPHTIGCEHIFCYFCAKSSFLFDVYFTCPKCGTEVHSLQPLKSGIEMSEVNAL

SEQ ID NO: 49202 - protein, 269 aa, Homo sapiens [sequence omitted]

SEQ ID NO: 49203 - protein, 532 aa, Homo sapiens
MQQFYGINMTGKVDRNTIDWMKKPRCGVPDQTRGSSKFHIRRKRYALTGQKWQHKHITYSIKNVTPKVGDPETRKAIRRAFDVWQNVTPLTFEEVPYSELENGKRDVDITIIFASGFHGDSSPFDGEGGFLAHAYFPGPGIGGDTHFDSDEPWTLGNPNHDGNDLFLVAVHELGHALGLEHSNDPTAIMAPFYQYMETDNFKLPNDDLQGIQKIYGPPDKIPPPTRPLPTVPPHRSIPPADPRKNDRPKPPRPPTGRPSYPGAKPNICDGNFNTLAILRREMFVFKDQWFWRVRNNRVMDGYPMQITYFWRGLPPSIDAVYENSDGNFVFFKGNKYWVFKDTTLQPGYPHDLITLGSGIPPHGIDSAIWWEDVGKTYFFKGDRYWRYSEEMKTMDPGYPKPITVWKGIPESPQGAFVHKENGFTYFYKGKEYWKFNNQILKVEPGYPRSILKDFMGCDGPTDRVKEGHSPPDDVDIVIKLDNTASTVKAIAIVIPCILALCLLVLVYTVFQFKRKGTPRHILYCKRSMQEWV

SEQ ID NO: 49204 - protein, 403 aa, Homo sapiens
MTPPLLHHDLKTQNILLDNEFHVKIADFGLSKWRMMSLSQSRSSKSAPEGGTIIYMPPENYEPGQKSRASIKHDIYSYAVITWEVLSRKQPFEDVTNPLQIMYSVSQGHRPVINEESLPYDIPHRARMISLIESGWAQNPDERPSFLKCLIELEPVLRTFEEITFLEAVIQLKKTKLQSVSSAIHLCDKKKMELSLNIPVNHGPQEESCGSSQLHENSGSPETSRSLPAPQDNDFLSRKAQDCYFMKLHHCPGNHSWDSTISGSQRAAFCDHKTTPCSSAIINPLSTAGNSERLQPGIAQQWIQSKREDIVNQMTEACLNQSLDALLSRDLIMKEDYELVSTKPTRTSKVRQLLDTTDIQGEEFAKVIVQKLKDNKQMGLQPYPEILVVSRSPSLNLLQNKSM

SEQ ID NO: 49205 - protein, 923 aa, Homo sapiens
MQKTIEMKRTDRVGRGRPGSGTSGVDSLSNFIESVKEEASNSGYGSSINQDAGFHTNGTGHGNLRPRKTRPLKAENPYLFLRGLPYLVNEDDVRVFFSGLCVDGVIFLKHHDGRNNGDAIVKFASCVDASGGLKCHRSFMGSRFIEVMQGSEQQWIEFGGNAVKEGDVLRRSEEHSPPRGINDRHFRKRSHSKSPRRTRSRSPLGFYVHLKNLSLSIDERDLRNFFRGTDLTDEQIRFLYKDENRTRYAFVMFKTLKDYNTALSLHKTVLQYRPVHIDPISRKQMLKFIARYEKKRSGSLERDRPGHVSQKYSQEGNSGQKLCIYIRNFPFDVTKVEVQKFFADFLLAEDDIYLLYDDKGVGLGEALVKFKSEEQAMKAERLNRRRFLGTEVLLRLISEAQIQEFGVNFSVMSSEKMQARSQSRERGDHSHLFDSKDPPIYSVGAFENFRHQLEDLRQLDNFKHPQRDFRQPDRHPPEDFRHSSEDFRFPPEDFRHSPEDFRRPREEDFRRPSEEDFRRPWEEDFRRPPEDDFRHPREEDWRRPLEEDWRRPLEEDFRRSPTEDFRQLPEEDFRQPPEEDLRWLPEEDFRRPPEEDWRRPPEEDFRRPLQGEWRRPPEDDFRRPPEEDFRHSPEEDFRQSPQEHFRRPPQEHFRRPPPEHFRRPPPEHFRRPPPEHFRRPPPEHFRRPPPEHFRRPPPEHFRRPPQEHFRRPPQEHFRRSREEDFRHPPDEDFRGPPDEDFRHPPDEDFRSPQEEDFRCPSDEDFRQLPEEDLREAPEEDPRLPDNFRPPGEDFRSPPDDFRSHRPFVNFGRPEGGKFDFGKHNMGSFPEGRFMPDPKINCGSGRVTPIKIMNLPFKANVNEILDFFHGYRIIPDSVSIQYNEQGLPTGEAIVAMINYNEAMAAIKDLNDRPVGPRKVKLTLL

SEQ ID NO: 49206 - protein, 1806 aa, Homo sapiens [sequence omitted]

SEQ ID NO: 49207 - protein, 1141 aa, Homo sapiens
MELLFLDTFKHPSAEQSSHIDVVRFPCVVYINEVRVIPPGVRAHSSLPDNRAYGETSPHTFQLDLFFNNVSKPSAPVFDRLGSLEYDENTSIIFRPNSKVNTDGLVLRGWYNCLTLAIYGSVDRVISHDRDSPPPPPPPPPPPQPQPSLKRNPKHADGEKEDQFNGSPPRPQPRGPRTPPGPPPPDDDEDDPVPLPVSGDKEEDAPHREDYFEPISPDRNSVPQEGQYSDEGEVEEEQQEEGEEDEDDVDVEEEEDEDEDDRRTVDSIPEEEEEDEEEEGEEDEEGEGDDGYEQISSDEDGIADLERETFKYPNFDVEYTAEDLASVPPMTYDPYDRELVPLLYFSCPYKTTFEIEISRMKDQGPDKENSGAIEASVKLTELLDLYREDRGAKWVTALEEIPSLIIKGLSYLQLKNTKQDSLGQLVDWTMQALNLQVALRQPIALNVRQLKAGTKLVSSLAECGAQGVTGLLQAGVISGLFELLFADHVSSSLKLNAFKALDSVISMTEGMEAFLRGRQNEKSGYQKLLELILLDQTVRVVTAGSAILQKCHFYEVLSEIKRLGDHLAEKTSSLPNHSEPDHDTDAGLERTNPEYENEVEASMDMDLLESSNISEGEIERLINLLEEVFHLMETAPHTMIQQPVKSFPTMARITGPPERDDPYPVLFRYLHSHHFLELVTLLLSIPVTSAHPGVLQATKDVLKFLAQSQKGLLFFMSEYEATNLLIRALCHFYDQDEEEGLQSDGVIDDAFALWLQDSTQTLQCITELFSHFQRCTASEETDHSDLLGTLHNLYLITFNPVGRSAVGHVFSLEKNLQSLITLMEYYSKEALGDSKSKKSVAYNYACILILVVVQSSSDVQMLEQHAASLLKLCKADENNAKLQELGKWLEPLKNLRFEINCIPNLIEYVKQNIDNLMTPEGVGLTTALRVLCNVACPPPPVEGQQKDLKWNLAVIQLFSAEGMDTFIRVLQKLNSILTQPWRLHVNMGTTLHRVTTISMARCTLTLLKTMLTELLRGGSFEFKDMRVPSALVTLHMLLCSIPLSGRLDSDEQKIQNDIIDILLTFTQGVNEKLTISEETLANNTWSLMLKEVLSSILKVPEGFFSGLILLSELLPLPLPMQTTQVSLPYNMHLINDCSNTF

SEQ ID NO: 49208 - protein, 934 aa, Homo sapiens
MLAGCFLLILGQIVLLPAEARERSRGRSISRGRHARTHPQTALLESSCENKRADLVFIIDSSRSVNTHDYAKVKEFIVDILQFLDIGPDVTRVGLLQYGSTVKNEFSLKTFKRKSEVERAVKRMRHLSTGTMTGLAIQYALNIAFSEAEGARPLRENVPRVIMIVTDGRPQDSVAEVAAKARDTGILIFAIGVGQVDFNTLKSIGSEPHEDHVFLVANFSQIETLTSVFQKKLCTAHMCSTLEHNCAHFCINIPGSYVCRCKQGYILNSDQTTCRIQDLCAMEDHNCEQLCVNVPGSFVCQCYSGYALAEDGKRCVAVDYCASENHGCEHECVNADGSYLCQCHEGFALNPDKKTCTKIDYCASSNHGCQHECVNTDDSYSCHCLKGFTLNPDKKTCRRINYCALNKPGCEHECVNMEESYYCRCHRGYTLDPNGKTCSRVDHCAQQDHGCEQLCLNTEDSFVCQCSEGFLINEDLKTCSRVDYCLLSDHGCEYSCVNMDRSFACQCPEGHVLRSDGKTCAKLDSCALGDHGCEHSCVSSEDSFVCQCFEGYILREDGKTCRRKDVCQAIDHGCEHICVNSDDSYTCECLEGFRLAEDGKRCRRKDVCKSTHHGCEHICVNNGNSYICKCSEGFVLAEDGRRCKKCTEGPIDLVFVIDGSKSLGEENFEVVKQFVTGIIDSLTISPKAARVGLLQYSTQVHTEFTLRNFNSAKDMKKAVAHMKYMGKGSMTGLALKHMFERSFTQGEGARPLSTRVPRAAIVFTDGRAQDDVSEWASKAKANGITMYAVGVGKAIEEELQEIASEPTNKHLFYAEDFSTMDEISEKLKKGICEALEDSDGRQDSPAGELPKTVQQPTVQHRYLFEEDNLLRSTQKLSHSTKPSGSPLEEKHDQCKCENLIMFQNLANEEVRKLTQRLEEMTQRMEALENRLRYR

SEQ ID NO: 49209 - protein, 44 aa, Homo sapiens [sequence omitted]

SEQ ID NO: 49210 - protein, 528 aa, Homo sapiens
MHAFGMYNYLHCDSWYQDSVYYIDTLGRIMNLTVMLDTALGKPREVFRLPTDLTACDNRLCASIHFSSSTWVTLSDGTGRLYVIGTGERGNSASEKWEIMFNEELGDPFIIIHSISLLNAEEHSIATLLLRIEKEELDMKGSGFYVSLEWVTISKKNQDNKKYEIIKRDILRGKSVPHYAAIEPDGNGLMIVSYKSLTFVQAGQDLEENMDEDISEKIKEPLYYWQQTEDDLTVTIRLPEDSTKEDIQIQFLPDHINIVLKDHQFLEGKLYSSIDHESSTWIIKESNSLEISLIKKNEGLTWPELVIGDKQGELIRDSAQCAAIAERLMHLTSEELNPNPDKEKPPCNAQELEECDIFFEESSSLCRFDGNTLKTTHVVNLGSNQYLFSVIVDPKEMPCFCLRHDVDALLWQPHSSKQDDMWEHIATFNALGYVQASKRDKKFFACAPNYSYAALCECLRRVFIYRQPAPMSTVLYNRKEGRQVGQVAKQQVASLETNDPILGFQATNERLFVLTTKNLFLIKVNTEN

SEQ ID NO: 49211 - protein, 42 aa, Homo sapiens
MRAAINQKLIETGERERLKELLRAKLIECGWKDQLKAHCKGN

SEQ ID NO: 49212 - protein, 90 aa, Homo sapiens
MRAAINQKLIETGERERLKELLRAKLIECGWKDQLKAHCKEVIKEKGLEHVTVDDLVAEITPKGRALVPDSVKKELLQRIRTFLAQHASL

SEQ ID NO: 49213 - protein, 45 aa, Homo sapiens
MRAAINQKLIETGERERLKELLRAKLIECGWKDQLKAHCKDNDFK

SEQ ID NO: 49214 - protein, 1240 aa, Homo sapiens [sequence omitted]

SEQ ID NO: 49215 - protein, 685 aa, Homo sapiens
MKKGSKVMPNIEKLRSCGTHSPYMRPVYPTKTFPNLYTLATGLYPESHGIVGNSMYDPVFDATFHLRGREKFNHRWWGGQPLWITATKQGVKAGTFFWSVVIPHERRILTILQWLTLPDHERPSVYAFYSEQPDFSGHKYGPFGPEMTNPLREIDKIVGQLMDGLKQLKLHRCVNVIFVGDHGMEDVTCDRTEFLSNYLTNVDDITLVPGTLGRIRSKFSNNAKYDPKAIIANLTCKKPDQHFKPYLKQHLPKRLHYANNRRIEDIHLLVERRWHVARKPLDVYKKPSGKCFFQGDHGFDNKVNSMQTVFVGYGSTFKYKTKVPPFENIELYNVMCDLLGLKPAPNNGTHGSLNHLLRTNTFRPTMPEEVTRPNYPGIMYLQSDFDLGCTCDDKVEPKNKLDELNKRLHTKGSTEERHLLYGRPAVLYRTRYDILYHTDFESGYSEIFLMPLWTSYTVSKQAEVSSVPDHLTSCVRPDVRVSPSFSQNCLAYKNDKQMSYGFLFPPYLSSSPEAKYDAFLVTNMVPMYPAFKRVWNYFQRVLVKKYASERNGVNVISGPIFDYDYDGLHDTEDKIKQYVEGSSIPVPTHYYSIITSCLDFTQPADKCDGPLSVSSFILPHRPDNEESCNSSEDESKWVEELMKMHTARVRDIEHLTSLDFFRKTSRSYPEILTLKTYLHTYESEI

SEQ ID NO: 49216 - protein, 737 aa, Homo sapiens
MKKGSKVMPNIEKLRSCGTHSPYMRPVYPTKTFPNLYTLATGLYPESHGIVGNSMYDPVFDATFHLRGREKFNHRWWGGQPLWITATKQGVKAGTFFWSVVIPHERRILTILQWLTLPDHERPSVYAFYSEQPDFSGHKYGPFGPEESSYGSPFTPAKRPKRKVAPKRRQERPVAPPKKRRRKIHRMDHYAAETRQDKMTNPLREIDKIVGQLMDGLKQLKLHRCVNVIFVGDHGMEDVTCDRTEFLSNYLTNVDDITLVPGTLGRIRSKFSNNAKYDPKAIIANLTCKKPDQHFKPYLKQHLPKRLHYANNRRIEDIHLLVERRWHVARKPLDVYKKPSGKCFFQGDHGFDNKVNSMQTVFVGYGSTFKYKTKVPPFENIELYNVMCDLLGLKPAPNNGTHGSLNHLLRTNTFRPTMPEEVTRPNYPGIMYLQSDFDLGCTCDDKVEPKNKLDELNKRLHTKGSTEERHLLYGRPAVLYRTRYDILYHTDFESGYSEIFLMPLWTSYTVSKQAEVSSVPDHLTSCVRPDVRVSPSFSQNCLAYKNDKQMSYGFLFPPYLSSSPEAKYDAFLVTNMVPMYPAFKRVWNYFQRVLVKKYASERNGVNVISGPIFDYDYDGLHDTEDKIKQYVEGSSIPVPTHYYSIITSCLDFTQPADKCDGPLSVSSFILPHRPDNEESCNSSEDESKWVEELMKMHTARVRDIEHLTSLDFFRKTSRSYPEILTLKTYLHTYESEI

SEQ ID NO: 49217 - protein, 710 aa, Homo sapiens
MKKGSKVMPNIEKLRSCGTHSPYMRPVYPTKTFPNLYTLATGLYPESHGIVGNSMYDPVFDATFHLRGREKFNHRWWGGQPLWITATKQGVKAGTFFWSVVIPHERRILTILQWLTLPDHERPSVYAFYSEQPDFSGHKYGPFGPEMTNPLREIDKIVGQLMDGLKQLKLHRCVNVIFVGDHGMEDVTCDRTEFLSNYLTNVDDITLVPGTLGRIRSKFSNNAKYDPKAIIANLTCKKPDQHFKPYLKQHLPKRLHYANNRRIEDIHLLVERRWHVARKPLDVYKKPSGKCFFQGDHGFDNKVNSMQTVFVGYGSTFKYKTKVPPFENIELYNVMCDLLGLKPAPNNGTHGSLNHLLRTNTFRPTMPEEVTRPNYPGIMYLQSDFDLGCTCDDKVEPKNKLDELNKRLHTKGSTEAETRKFRGSRNENKENINGNFEPRKERHLLYGRPAVLYRTRYDILYHTDFESGYSEIFLMPLWTSYTVSKQAEVSSVPDHLTSCVRPDVRVSPSFSQNCLAYKNDKQMSYGFLFPPYLSSSPEAKYDAFLVTNMVPMYPAFKRVWNYFQRVLVKKYASERNGVNVISGPIFDYDYDGLHDTEDKIKQYVEGSSIPVPTHYYSIITSCLDFTQPADKCDGPLSVSSFILPHRPDNEESCNSSEDESKWVEELMKMHTARVRDIEHLTSLDFFRKTSRSYPEILTLKTYLHTYESEI

SEQ ID NO: 49218 - protein, 323 aa, Homo sapiens
MLTKNPPFTKNMESPLCNEALVDQLWKLMNSGTSHDWRLRCGAVDLYFTLFGLSRPSCLPLPELGLVLNLKEKKAVLNPTIIPESVAGNQEAANNPSSHPQLVGFQNPEDDHLAKEASCNISAHQQGVKRKSDTPLGSPLEPGQILEKNEDSSKVKLKIRFSSSQDEEEIDMDTVHDSQAFISHHLNMLERPSTPGLSKYRPASSRSALIPQHSAGCDSTPTTKPQWSLELARKGTGKEQAPLEMSMHPAASAPLSVFTKESTASKHSDHHHHHHHEHKKKKKKHKHKHKHKHKHDSKEKDKEPFTFSSPASGRSIRSPSLSD

SEQ ID NO: 49219 - protein, 862 aa, Homo sapiens [sequence omitted]

SEQ ID NO: 49220 - protein, 692 aa, Homo sapiens
MATNTRGGTREIGSALTRMCMRHRSIEAKLRQFSSALIDCLINPLQEQMEEWKKVANQLDKDHAKEYKKARQEIKKKSSDTLKLQKKAKKGRGDIQPQLDSALQDVNDKYLLLEETEKQAVRKALIEERGRFCTFISMLRPVIEEEISMLGEITHLQTISEDLKSLTMDPHKLPSSSEQVILDLKGSDYSWSYQTPPSSPSTTMSRKSSVCSSLNSVNSSDSRSSGSHSHSPSSHYRYRSSNLAQQAPVRLSSVSSHDSGFISQDAFQSKSPSPMPPEAPNQLSNGFSHYSLSSESHVGPTGAGLFPHCLPASRLLPRVTSVHLPDYAHYYTIGPGMFPSSQIPSWKDWAKPGPYDQPLVNTLQRRKEKREPDPNGGGPTTASGPPAAAEEAQRPRSMTVSAATRPGEEMEACEELALALSRGLQLDTQRSSRDSLQCSSGYSTQTTTPCCSEDTIPSQVSDYDYFSVSGDQEADQQEFDKSSTIPRNSDISQSYRRMFQAKRPASTAGLPTTLGPAMVTPGVATIRRTPSTKPSVRRGTIGAGPIPIKTPVIPVKTPTVPDLPGVLPAPPDGPEERGEHSPESPSVGEGPQGVTSMPSSMWSGQASVNPPLPGPKPSIPEEHRQAIPESEAEDQEREPPSATVSPGQIPESDPADLSPRDTPQGEDMLNAIRRGVKLKKTTTNDRSAPRFS

SEQ ID NO: 49221 - protein, 949 aa, Homo sapiens [sequence omitted]

SEQ ID NO: 49222 - protein, 243 aa, Homo sapiens
MLVHFERWSHRYDEWIYWDSNRLRPLERPALRKEGLKDEEDFFDFKAGEEVLARWTDCRYYPAKIEAINKEGTFTVQFYDGVIRCLKRMHIKAMPEDAKGQDWIALVKAAAAAAAKNKTGSKPRTSANSNKDKDKDERKWFKVPSKKEETSTCIATPDVEKKEDLPTSSETFGLHVENVPKMVFPQPESTLSNKRKNNQGNSFQAKRARLNKITGLLASKAVGVDGAEKKEDYNETAPMLEQV

SEQ ID NO: 49223 - protein, 269 aa, Homo sapiens
MLVHFERWSHRYDEWIYWDSNRLRPLERPALRKEGLKDEEDFFDFKAGEEVLARWTDCRYYPAKIEAINKEGTFTVQFYDGVIRCLKRMHIKAMPEDAKGQVKSQHPLSWCCPIDPAGSCNQSMGSEDWIALVKAAAAAAAKNKTGSKPRTSANSNKDKDKDERKWFKVPSKKEETSTCIATPDVEKKEDLPTSSETFGLHVENVPKMVFPQPESTLSNKRKNNQGNSFQAKRARLNKITGLLASKAVGVDGAEKKEDYNETAPMLEQV

SEQ ID NO: 49224 - protein, 975 aa, Homo sapiens
MLVHFERWSHRYDEWIYWDSNRLRPLERPALRKEGLKDEEDFFDFKAGEEVLARWTDCRYYPAKIEAINKEGTFTVQFYDGVIRCLKRMHIKAMPEDAKGQVKSQHPLSWCCPIDPAGSCNQSMGSEDWIALVKAAAAAAAKNKTGSKPRTSANSNKDKDKDERKWFKVPSKKEETSTCIATPDVEKKEDLPTSSETFGLHVENVPKMVFPQPESTLSNKRKNNQGNSFQAKRARLNKITGLLASKAVGVDGAEKKEDYNETAPMLEQAISPKPQSQKKNEADISSSANTQKPALLSSTLSSGKARSKKCKHESGDSSGCIKPPKSPLSPELIQVEDLTLVSQLSSSVINKTSPPQPVNPPRPFKHSERRRRSQRLATLPMPDDSVEKVSSPSPATDGKVFSISSQNQQESSVPEVPDVAHLPLEKLGPCLPLDLSRGSEVTAPVASDSSYRNECPRAEKEDTQMLPNPSSKAIADGRGAPAAAGISKTEKKVKLEDKSSTAFGKRKEKDKERREKRDKDHYRPKQKKKKKKKKKSKQHDYSDYEDSSLEFLERCSSPLTRSSGSSLASRSMFTEKTTTYQYPRAILSVDLSGENLSDVDFLDDSSTESLLLSGDEYNQDFDSTNFEESQDEDDALNEIVRCICEMDEENGFMIQCEECLCWQHSVCMGLLEESIPEQYICYICRDPPGQRWSAKYRYDKEWLNNGRMCGLSFFKENYSHLNAKKIVSTHHLLADVYGVTEVLHGLQLKIGILKNKHHPDLHLWACSGKRKDQDQIIAGVEKKIAQDTVNREEKKYVQNHKEPPRLPLKMEGTYITSEHSYQKPQSFGQDCKSLADPGSSDDDDVSSLEEEQEFHMRSKNSLQYSAKEHGMPEKNPAEGNTVFVYNDKKGTEDPGDSHLQWQLNLLTHIENVQNEVTSRMDLIEKEVDVLESWLDFTGELEPPDPLARLPQLKRHIKQLLIDMGKVQQIATLCSV

SEQ ID NO: 49225 - protein, 986 aa, Homo sapiens
MKSSRLGPTQLKIFTCEYCNKVFKFKHSLQAHLRIHTNEKPYKCPQCSYASAIKANLNVHLRKHTGEKFACDYCSFTCLSKGHLKVHIERVHKKIKQHCRFCKKKYSDVKNLIKHIRDAHDPQDKKVKEALDELCLMTREGKRQLLYDCHICERKFKNELDRDRHMLVHGDKWPFACELCGHGATKYQALELHVRKHPFVYVCAVCRKKFVSSIRLRTHIKEVHGAAQEALVFTSSINQSFCLLEPGGDIQQEALGDQLQLVEEEFALQGVNALKEEACPGDTQLEEGRKEPEAPGEMPAPAVHLASPQAESTALPPCELETTVVSSSDLHSQEVVSDDFLLKNDTSSAEAHAAPEKPPDMQHRSSVQTQGEVITLLLSKAQSAGSDQESHGAQSPLGEGQNMAVLSAGDPDPSRCLRSNPAEASDLLPPVAGGGDTITHQPDSCKAAPEHRSGITAFMKVLNSLQKKQMNTSLCERIRKVYGDLECEYCGKLFWYQVHFDMHVRTHTREHLYYCSQCHYSSITKNCLKRHVIQKHSNILLKCPTDGCDYSTPDKYKLQAHLKVHTALDKRSYSCPVCEKSFSEDRLIKSHIKTNHPEVSMSTISEVLGRRVQLKGLIGKRAMKCPYCDFYFMKNGSDLQRHIWAHEGVKPFKCSLCEYATRSKSNLKAHMNRHSTEKTHLCDMCGKKFKSKGTLKSHKLLHTADGKQFKCTVCDYTAAQKPQLLRHMEQHVSFKPFRCAHCHYSCNISGSLKRHYNRKHPNEEYANVGTGELAAEVLIQQGGLKCPVCSFVYGTKWEFNRHLKNKHGLKVVEIDGDPKWETATEAPEEPSTQYLHITEAEEDVQGTQAAVAALQDLRYTSESGDRLDPTAVNILQQIIELGAETHDATALASVVAMAPGTVTVVKQVTEEEPSSNHTVMIQETVQQASVELAEQHHLVVSSDDVEGIETVTVYTQGGEASEFIVYVQEAMQPVEEQAVEQPAQEL

SEQ ID NO: 49226 - protein, 951 aa, Homo sapiens
MGVSSVREKYELAHPPEEWKYELRIRYLPKGFLNQFTEDKPTLNFFYQQVKSDYMLEIADQVDQEIALKLGCLEIRRSYWEMRGNALEKKSNYEVLEKDVGLKRFFPKSLLDSVKAKTLRKLIQQTFRQFANLNREESILKFFEILSPVYRFDKECFKCALGSSWIISVELAIGPEEGISYLTDKGCNPTHLADFTQVQTIQYSNSEDKDRKGMLQLKIAGAPEPLTVTAPSLTIAENMADLIDGYCRLVNGTSQSFIIRPQKEGERALPSIPKLANSEKQGMRTHAVSVSETDDYAEIIDEEDTYTMPSTRDYEIQRERIELGRCIGEGQFGDVHQGIYMSPENPALAVAIKTCKNCTSDSVREKFLQEALTMRQFDHPHIVKLIGVITENPVWIIMELCTLGELRSFLQVRKYSLDLASLILYAYQLSTALAYLESKRFVHRDIAARNVLVSSNDCVKLGDFGLSRYMEDSTYYKASKGKLPIKWMAPESINFRRFTSASDVWMFGVCMWEILMHGVKPFQGVKNNDVIGRIENGERLPMPPNCPPTLYSLMTKCWAYDPSRRPRFTELKAQLSTILEEEKAQQEERMRMESRRQATVSWDSGGSDEAPPKPSRPGYPSPRSSEGFYPSPQHMVQTNHYQVSGYPGSHGITAMAGSIYPGQASLLDQTDSWNHRPQEIAMWQPNVEDSTVLDLRGIGQVLPTHLMEERLIRQQQEMEEDQRWLEKEERFLKPDVRLSRGSIDREDGSLQGPIGNQHIYQPVGKPDPAAPPKKPPRPGAPGHLGSLASLSSPADSYNEGVKLQPQEISPPPTANLDRSNDKVYENVTGLVKAVIEMSSKIQPAPPEEYVPMVKEVGLALRTLLATVDETIPLLPASTHREIEMAQKLLNSDLGELINKMKLAQQYVMTSLQQEYKKQMLTAAHALAVDAKNLLDVIDQARLKMLGQTRPH

SEQ ID NO: 49227 - protein, 568 aa, Homo sapiens
MLPRPQECRVTMRQFDHPHIVKLIGVITENPVWIIMELCTLGELRSFLQVRKYSLDLASLILYAYQLSTALAYLESKRFVHRDIAARNVLVSSNDCVKLGDFGLSRYMEDSTYYKASKGKLPIKWMAPESINFRRFTSASDVWMFGVCMWEILMHGVKPFQGVKNNDVIGRIENGERLPMPPNCPPTLYSLMTKCWAYDPSRRPRFTELKAQLSTILEEEKAQQEERMRMESRRQATVSWDSGGSDEAPPKPSRPGYPSPRSSEGFYPSPQHMVQTNHYQVSGYPGSHGITAMAGSIYPGQASLLDQTDSWNHRPQEIAMWQPNVEDSTVLDLRGIGQVLPTHLMEERLIRQQQEMEEDQRWLEKEERFLIGNQHIYQPVGKPDPAAPPKKPPRPGAPGHLGSLASLSSPADSYNEGVKLQPQEISPPPTANLDRSNDKVYENVTGLVKAVIEMSSKIQPAPPEEYVPMVKEVGLALRTLLATVDETIPLLPASTHREIEMAQKLLNSDLGELINKMKLAQQYVMTSLQQEYKKQMLTAAHALAVDAKNLLDVIDQARLKMLGQTRPH

SEQ ID NO: 49228 - protein, 748 aa, Homo sapiens
MVKSVGSVGDSPREPRRTVSESVIAVKASFPSSALPPRTGVALGRKLGSHSVASCAPQLLGDRRVDAGHTDQPVPSGSVGGPARPASGPRQAREASLVVTCRTNKFRKNNYKWVAASSKSPRVARRALSPRVAAENVCKASAGMANKVEKPQLIADPEPKPRKPATSSKPGSAPSKYKWKASSPSASSSSSFRWQSEASSKDHASQLSPVLSRSPSGDRPAVGHSGLKPLSGETPLSAYKVKSRTKIIRRRSSTSLPGDKKSGTSPAATAKSHLSLRRRQALRGKSSPVLKKTPNKGLVQVTTHRLCRLPPSRAHLPTKEASSLHAVRTAPTSKVIKTRYRIVKKTPASPLSAPPFPLSLPSWRARRLSLSRSLVLNRLRPVASGGGKAQPGSPWWRSKGYRCIGGVLYKVSANKLSKTSGQPSDAGSRPLLRTGRLDPAGSCSRSLASRAVQRSLAIIRQARQRREKRKEYCMYYNRFGRCNRGERCPYIHDPEKVAVCTRFVRGTCKKTDGTCPFSHHVSKEKMPVCSYFLKGICSNSNCPYSHVYVSRKAEVCSDFLKGYCPLGAKCKKKHTLLCPDFARRGACPRGAQCQLLHRTQKRHSRRAATSPAPGPSDATARSRVSASHGPRKPSASQRPTRQTPSSAALTAAAVAAPPHCPGGSASPSSSKASSSSSSSSSPPASLDHEAPSLQEAALAAACSNRLCKLPSFISLQSSPSPGAQPRVRAPRAPLTKDSGKPLHIKPRL

SEQ ID NO: 49229 - protein, 327 aa, Homo sapiens
MLRATDMGEPQGSMRILVTGGSGLVGKAIQKVVADGAGLPGEDWVFVSSKDADLTDTAQTRALFEKVQPTHVIHLAAMVGGLFRNIKYNLDFWRKNVHMNDNVLHSAFEVGARKVVSCLSTCIFPDKTTYPIDETMIHNGPPHNSNFGYSYAKRMIDVQNRAYFQQYGCTFTAVIPTNVFGPHDNFNIEDGHVLPGLIHKVHLAKSSGSALTVWGTGNPRRQFIYSLDLAQLFIWVLREYNEVEPIILSVGEEDEVSIKEAAEAVVEAMDFHGEVTFDTTKSDGQFKKTASNSKLRTYLPDFRFTPFKQAVKETCAWFTDNYEQARK

SEQ ID NO: 49230 - protein, 343 aa, Homo sapiens [sequence omitted]

SEQ ID NO: 49231 - protein, 221 aa, Homo sapiens
MAGDDKHMFKQFCQEGQPHVLEALSPPQTSGLSPSRLSKSQGGEEEGPLSDKCSRKTLFYLIATLNESFRPDYDFSTARSHEFSREPSLSWVVNAVNCSLFSAVREDFKDLKPQLWNAVDEEICLAECDIYSYNPDLDSDPFGEDGSLWSFNYFFYNKRLKRIVFFSCRSISGSTYTPSEAGNELDMELGEEEVEEESRSGGSGAEETSTMEEDRVPVICI

SEQ ID NO: 49232 - protein, 251 aa, Homo sapiens
MAGDDKHMFKQFCQEGQPHVLEALSPPQTSGLSPSRLSKSQGGEEEGPLSDKCSRKTLFYLIATLNESFRPDYDFSTARSHEFSREPSLSWVVNAVNCSLFSAVREDFKDLKPQLWNAVDEEICLAECDIYRWAGIPADGLQASRFVGHLAPHTTCHPILPSYNPDLDSDPFGEDGSLWSFNYFFYNKRLKRIVFFSCRSISGSTYTPSEAGNELDMELGEEEVEEESRSGGSGAEETSTMEEDRVPVICI

SEQ ID NO: 49233 - protein, 558 aa, Homo sapiens
MTGRDLRLTDEQVALVRRLQSGQFGDVGFNPYEPAVDFFSGDVMIHPVTNRPADKRSFIPSLVEKEKVSRMVHAIKMGWIQPRRPRDPTPSFYDLWAQEDPNAVLGRHKMHVPAPKLALPGHAESYNPPPEYLLSEEERLAWEQQEPGERKLSFLPRKFPSLRAVPAYGRFIQERFERCLDLYLCPRQRKMRVNVDPEDLIPKLPRPRDLQPFPTCQALVYRGHSDLVRCLSVSPGGQWLVSGSDDGSLRLWEVATARCVRTVPVGGVVKSVAWNPSPAVCLVAAAVEDSVLLLNPALGDRLVAGSTDQLLSAFVPPEEPPLQPARWLEASEEERQVGLRLRICHGKPVTQVTWHGRGDYLAVVLATQGHTQVLIHQLSRRRSQSPFRRSHGQVQRVAFHPARPFLLVASQRSVRLYHLLRQELTKKLMPNCKWVSSLAVHPAGDNVICGSYDSKLVWFDLDLSTKPYRMLRHHKKALRAVAFHPRYPLFASGSDDGSVIVCHGMVYNDLLQNPLLVPVKVLKGHVLTRDLGVLDVIFHPTQPWVFSSGADGTVRLFT

SEQ ID NO: 49234 - protein, 283 aa, Homo sapiens
MVESTAVVSFLEEAGSRMRKLWLTYSSQTTAILGALLGSCCPQLQVLEVSTGINRNSIPLQLPVEALQKGCPQLQVLRLLNLMWLPKPPGRGVAPGPGFPSLEELCLASSTCNFVSNEVLGRLLHGSPNLRLLDLRGCARITPAGLQDLPCRELEQLHLGLYGTSDRLTLAKEGSPFLTQKWCHTLRELDLSGQGFSEKDLEQALAAFLSTPGGSHPALCSLNLRGTRVTPSTVSSVISGCPGLLYLNLESCRCLPRGLKRAYRGLEEVQWCLEQLLTSPSPS

SEQ ID NO: 49235 - protein, 425 aa, Homo sapiens
MGSWAAVNGIWVELPVVVKELPEGWSLPSYVSVLVALGNLGLLVVTLWRRLAPGKDEQVPIRVVQVLGMVGTALLASLWHHVAPVAGQLHSVAFLALAFVLALACCASNVTFLPFLSHLPPRFLRSFFLGQGLSALLPCVLALVQGVGRLECPPAPINGTPGPPLDFLERFPASTFFWALTALLVASAAAFQGLLLLLPPPPSVPTGELGSGLQVGAPGAEEEVEESSPLQEPPSQAAGTTPGPDPKAYQLLSARSACLLGLLAATNALTNGVLPAVQSFSCLPYGRLAYHLAVVLGSAANPLACFLAMGVLCRSLAGLGGLSLLGVFCGGYLMALAVLSPCPPLVGTSAGVVLVVLSWVLCLGVFSYVKVAASSLLHGGGRPALLAAGVAIQVGSLLGAVAMFPPTSIYHVFHSRKDCADPCDS

SEQ ID NO: 49236 - protein, 203 aa, Homo sapiens [sequence omitted]

SEQ ID NO: 49237 - protein, 670 aa, Homo sapiens
MELSVPGPSPWTPAAQARVRDAPAVTHPGSAACGTPCCSDTELEAICPHYQQPDCDTRTEDKEFLHKEDIHEDLESQAEISENYAGDVSQVPELGDLCDDVSERDWGVPEGRRLPQSLSQEGDFTPAAMGLLRGPLGEKDLDCNGFDSRFSLSPNLMACQEIPTEERPHPYDMGGQSFQHSVDLTGHEGVPTAESPLICNECGKTFQGNPDLIQRQIVHTGEASFMCDDCGKTFSQNSVLKNRHRSHMSEKAYQCSECGKAFRGHSDFSRHQSHHSSERPYMCNECGKAFSQNSSLKKHQKSHMSEKPYECNECGKAFRRSSNLIQHQRIHSGEKPYVCSECGKAFRRSSNLIKHHRTHTGEKPFECGECGKAFSQSAHLRKHQRVHTGEKPYECNDCGKPFSRVSNLIKHHRVHTGEKPYKCSDCGKAFSQSSSLIQHRRIHTGEKPHVCNVCGKAFSYSSVLRKHQIIHTGEKPYRCSVCGKAFSHSSALIQHQGVHTGDKPYACHECGKTFGRSSNLILHQRVHTGEKPYECTECGKTFSQSSTLIQHQRIHNGLKPHECNQCGKAFNRSSNLIHHQKVHTGEKPYTCVECGKGFSQSSHLIQHQIIHTGERPYKCSECGKAFSQRSVLIQHQRIHTGVKPYDCAACGKAFSQRSKLIKHQLIHTRE

SEQ ID NO: 49238 - protein, 39 aa, Homo sapiens
MKAAQRRKNKRIRRKRGTGPLWQMEARRPQRNSPQKKFP

SEQ ID NO: 49239 - protein, 4 aa, Homo sapiens
MVIN

SEQ ID NO: 49240 - protein, 1181 aa, Homo sapiens [sequence omitted]

SEQ ID NO: 49241 - protein, 909 aa, Homo sapiens
MVSGHHIPAIRAHSGTPGPSPCGSTSSPTMASLANNLHLKMPSGGGMAPQNNVAESRIHLPALSPRRQMLTNGKPRFQVTQAGGMSGSHTLKPKQQEFGSPFPPNPGKGALGFGPQCKSIGKGSCNNLVVTSSPMMVQRLGLISPPASQVSTACNQISPSLQRAMNAANLNIPPSDTRSLISRESLASTTLSLTESQSASSMKQEWSQGYRALPSLSNHGSQNGLDLGDLLSLPPGTSMSSNSVSNSLPSYLFGTESSHSPYPSPRHSSTRSHSARSKKRALSLSPLSDGIGIDFNTIIRTSPTSLVAYINGSRASPANLSPQPEVYGHFLGVRGSCIPQPRPVPGSQKGVLVAPGGLALPAYGEDGALEHERMQQLEHGGLQPGLVNHMVVQHGLPGPDSQSAGLFKTERLEEFPGSTVDLPPAPPLPPLPPPPGPPPPYHAHAHLHHPELGPHAQQLALPQATLDDDGEMDGIGGKHCCRWIDCSALYDQQEELVRHIEKVHIDQRKGEDFTCFWAGCPRRYKPFNARYKLLIHMRVHSGEKPNKCTFEGCEKAFSRLENLKIHLRSHTGEKPYLCQHPGCQKAFSNSSDRAKHQRTHLDTKPYACQIPGCTKRYTDPSSLRKHVKAHSSKEQQARKKLRSSTELHPDLLTDCLTVQSLQPATSPRDAAAEGTVGRSPGPGPDLYSAPIFSSNYSSRSGTAAGAVPPPHPVSHPSPGHNVQGSPHNPSSQLPPLTAVDAGAERFAPSAPSPHHISPRRVPAPSSILQRTQPPYTQQPSGSHLKSYQPETNSSFQPNGIHVHGFYGQLQKFCPPHYPDSQRIVPPVSSCSVVPSFEDCLVPTSMGQASFDVFHRAFSTHSGITVYDLPSSSSSLFGESLRSGAEDATFLQISTVDRCPSQLSSVYTEG

SEQ ID NO: 49242 - protein, 55 aa, Homo sapiens
MPRVQPPRLCLLLPLPPLPSQTRAHTRHLGRVSALRPPVWMGVFISEGGTARGAL

SEQ ID NO: 49243 - protein, 265 aa, Homo sapiens
MKHPLKIVLRGVTNDQVDPSVDVLKATALPLLKQFGIDGESFELKIVRRGMPPGGGGEVVFSCPVRKVLKPIQLTDPGKIKRIRGMAYSVRVSPQMANRIVDSARSILNKFIPDIYIYTDHMKGVNSGKSPGFGLSLVAETTSGTFLSAELASNPQGQGAAVLPEDLGRNCARLLLEEIYRGGCVDSTNQSLALLLMTLGQQDVSKVLLGPLSPYTIEFLRHLKSFFQIMFKIETKPCGEELKGGDKVLMTCVGIGFSNLSKTLK

SEQ ID NO: 49244 - protein, 1122 aa, Homo sapiens
MEGTSTSSIYQNGDISGNANSMKQIDPVLQVYLYHSLGKSEADYLTFPSGEYVAEEICIAASKACGITPVYHNMFALMSETERIWYPPNHVFHIDESTRHNVLYRIRFYFPRWYCSGSNRAYRHGISRGAEAPLLDDFVMSYLFAQWRHDFVHGWIKVPVTHETQEECLGMAVLDMMRIAKENDQTPLAIYNSISYKTFLPKCIRAKIQDYHILTRKRIRYRFRRFIQQFSQCKATARNLKLKYLINLETLQSAFYTEKFEVKEPGSGPSGEEIFATIIITGNGGIQWSRGKHKESETLTEQDLQLYCDFPNIIDVSIKQANQEGSNESRVVTIHKQDGKNLEIELSSLREALSFVSLIDGYYRLTADAHHYLCKEVAPPAVLENIQSNCHGPISMDFAISKLKKAGNQTGLYVLRCSPKDFNKYFLTFAVERENVIEYKHCLITKNENEEYNLSGTKKNFSSLKDLLNCYQMETVRSDNIIFQFTKCCPPKPKDKSNLLVFRTNGVSDVPTSPTLQRPTHMNQMVFHKIRNEDLIFNESLGQGTFTKIFKGVRREVGDYGQLHETEVLLKVLDKAHRNYSESFFEAASMMSKLSHKHLVLNYGVCVCGDENILVQEFVKFGSLDTYLKKNKNCINILWKLEVAKQLAWAMHFLEENTLIHGNVCAKNILLIREEDRKTGNPPFIKLSDPGISITVLPKDILQERIPWVPPECIENPKNLNLATDKWSFGTTLWEICSGGDKPLSALDSQRKLQFYEDRHQLPAPKWAELANLINNCMDYEPDFRPSFRAIIRDLNSLFTPDYELLTENDMLPNMRIGALGFSGAFEDRDPTQFEERHLKFLQQLGKGNFGSVEMCRYDPLQDNTGEVVAVKKLQHSTEEHLRDFEREIEILKSLQHDNIVKYKGVCYSAGRRNLKLIMEYLPYGSLRDYLQKHKERIDHIKLLQYTSQICKGMEYLGTKRYIHRDLATRNILVENENRVKIGDFGLTKVLPQDKEYYKVKEPGESPIFWYAPESLTESKFSVASDVWSFGVVLYELFTYIEKSKSPPAEFMRMIGNDKQGQMIVFHLIELLKNNGRLPRPDGCPDEIYMIMTECWNNNVNQRPSFRDLALRVDQIRDNMAG

SEQ ID NO: 49245 - protein, 267 aa, Homo sapiens
MLSLELQLHQIAALFTVTVPKELYIIEHGSNVTLECNFDTGSHVNLGAITASLQKVENDTSPHRERATLLEEQLPLGKASFHIPQVQVRDEGQYQCIIIYGVAWDYKYLTLKVKASYRKINTHILKVPETDEVELTCQATGYPLAEVSWPNVSVPANTSHSRTPEGLYQVTSVLRLKPPPGRNFSCVFWNTHVRELTLASIDLQSQMEPRTHPTWLLHIFIPFCIIAFIFIATVIALRKQLCQKLYSSKDTTKRPVTTTKREVNSAI

SEQ ID NO: 49246 - protein, 1034 aa, Homo sapiens [sequence omitted]

SEQ ID NO: 49247 - protein, 327 aa, Homo sapiens
MQVEQNLSDHIKLSGNSCLSTSVTEDIKTEDDKAYAYRSVPSISSEADDSIPLSSGYEKPEKSDPSELSWPKSPESCSSVAESNGVLTEGEESDVESHGNGLEPGEIPAVPSGERNSFKVPSIAEGENKTSKSWRHPLSRPPARSPMTLVKQQAPSDEELPEVLSIEEEVEETESWAKPLIHLWQTKSPNFAAEQEYNATVARMKPHCAICTLLMPYHKPDSSNEENDARWETKLDEVVTSEGKTKPLIPEMCFIYSEENIEYSPPNAFLEEDGTSLLISCAKCCVRVHASKWIYNSSITGFSAFHIIFISHFFGTCQICCMDYWHS

SEQ ID NO: 49248 - protein, 1081 aa, Homo sapiens
MDCSDLLRRQTSELEFSTQREERLRKEFEATTLRVRKLEENIEAERAAHLESKFNSEIIQLRIRDLEGALQVEKASQAEAVADLEIIKNEFKEVESAYEREKHNAQESFAKLNLLEKEYFSKNKKLNEDIEEQKKVIIDLSKRLQYNEKSCSELQEELVMAKKHQAFLVETCENNVKELESILDSFTVSGQWTSGIHKDKDKPPSFSVVLERLRRTLTDYQNKLEDASNEEKACNELDSTKQKIDSHTKNIKELQDKLADVNKELSHLHTKCADREALISTLKVELQNVLHCWEKEKAQAAQSESELQKLSQAFHKDAEEKLTFLHTLYQHLVAGCVLIKQPEGMLDKFSWSELCAVLQENVDALIADLNRANEKIRHLEYICKNKSDTMRELQQTQEDTFTKVAEQIKAQESCWHRQKKELELQYSELFLEVQKRAQKFQEIAEKNMEKLNHIEKSHEQLVLENSHFKKLLSQTQREQMSLLAACALMAGALYPLYSRSCALSTQRDFLQEQVNTFELFKLEIRTLAQALSTVEEKKQEEAKMKKKTFKGLIRIFRKGVIAVLAANRLKILGQSCASLFTWMESFKEGIGMLVCTGEPQDKHKFPKHQKEQLRCLQALSWLTSSDLLAAIISSMAELQDVIGKADPNSRICGHLLIGAAKNSFAKLMDKISLVMECIPLHSSRSITYVEKDSLVQRLAHGLHKVNTLALKYGLRGHVPITKSTASLQKQILGFTQRLHAAEVERRSLRLEVTEFKRSVNEMKKELDKAQGLQMQLNEFKQSKLITHEKFESACEELNNALLREEQAQMLLNEQAQQLQELNYKLELHSSEEADKNQTLGEAVKSLSEAKMELRRKDQSLRQLNRHLTQLEQDKRRLEENIHDAESALRMAAKDKECVANHMRAVENTLHKVRDQISLSWSAASRNDFTLQLPKLHLETFAMEGLKGGPEVVACQAMIKSFMDVYQLASTRIMTLEKEMTSHRSHIAALKSELHTACLRENASLQSIGSRDHSNLSIPSRAPLPADTTGIGDFLPLKAELDTTYTFLKETFINTVPHALTSSHSSPVTMSANANRPTQIGL

SEQ ID NO: 49249 - protein, 369 aa, Homo sapiens
MKEHKEKPSKDSREHKSAFKEPSRDHNKSSKESSKKPKENKPLKEEKIVPKMAFKEPKPMSKEPKPDSNLLTITSGQDKKAPSKRPPISDSEELSAKKRKKSSSEALFKSFSSAPPLILTCSADKKQIKDKSHVKMGKVKIESETSEKKKSTLPPFDDIVDPNDSDVEENISSKSDSEQPSPASSSSSSSSSFTPSQTRQQGPLRSIMKDLHSDDNEEESDEVEDNDNDSEMERPVNRGGSRSRRVSLSDGSDSESSSASSPLHHEPPPPLLKTNNNQILEVKSPIKQSKSDKQIKNGECDKAYLDELVELHRRLMTLRERHILQQIVNLIEETGHFHITNTTFDFDLCSLDKTTVRKLQSYLETSGTS

SEQ ID NO: 49250 - protein, 1691 aa, Homo sapiens
MQALKEGQGGEKNIQSIYTIRNHPHPLITVLEHRPDCWPVFLQQLTAFFQQCPERLEVSCIQIMAPFLWYLYCEPSQLQEYAKLRLALLKVLLQPQVLCDKDQPSILEQQILQLCCDIVPCLQVKDLIQTTEAMMFIEEVCLSLLRHPVFWKIQLTQMSLQLLCVSEVSLKITGECSSSIHLLEHSVELLKEDFPVELVIIGIALLLLQTPASQQKPILNLALKLLSVTEDQKIPKSSLLLVMPILQILSSTALEDCISVDEEGPSRQQLALNLLEMIQQECYRDDHQKLSYKLVCPVTSMYGTIFTAWRILEVMTDSSAASDWLASVESLLPITAVIPAPAFLLLAHLLVEDKGQNLHQILKVTTELAQADSSQVPNLIPVLMFKLGRPLEPILYNDILYTLPKLGVHKVCIGQILRIIQLLGTTPRLRAVTLRLLTSLWEKQDRVYPELQRFMAVSDVPSLSVGKEVQWEKLIAKAASIRDICKQRPYQHGADMLAAISQVLNECTKPDQATPAALVLQGLHALCQAEVVCIRSTWNALSPKLSCDTRPLILKTLSELFSLVPSLTVNTTEYENFKVQVLSFLWTHTQNKDPIVANAAYRSLANFSAGEHTILHLPEKIRPEIPIPEELDDDEDVEDVDLSVPGSCYLKLLSLTPPLVLPALEEFFTSLVKQEMVNMPRGIYHSALKGGARSDQGKTVAGIPNFILKMYETNKQPGLKPGLAGGMLFCYDVSMYQSKDGKPLNRLMASRGRSFKQTSLALVHEVHIQLSEWHRAIFLPQAWLAYMNRAYHAILQGRLGELELQLKHGKEEPEEVQYKKSTAWLWVRDMLTDEITKAAAKESPVVKGNALLALSSLAVVVSRHEASLSSDSDGLLEVQPNFLSMKEWVSMVLDTLLVIVDSHYQPRGQLLSWFYYKSYSGENTASAIARSAAATALSLLVPVFIISCKEKVEEILNMLTARLPGKPSADESQAVQIHMGLALGMFLSRLCEEKLSDISGQEMNLLLMKSLDALENCCFDTSLEYNTGCILGVGLVLSLMSHSSQMQSRVHVAALLRKLSAHVDDSGSQSRTFQEVLAYTLSCVCTSAFSAGIIEATEAEDVMNKLRLLVENSQQTSGFALALGNIVHGLSVCGHGKAEDLGSKLLPAWIRIVLTEGTPTMLCLAALHGMVALVGSEGDVMQLKSEAIQTSHFQGRLNEVIRTLTQVISVSGVIGLQSNAVWLLGHLHLSTLSSSQSRASVPTDYSYLPESSFIGAAIGFFITGGKKGPESVPPSLLKVVMKPIATVGESYQYPPVNWAALLSPLMRLNFGEEIQQLCLEIMVTQAQSSQNAAALLGLWVTPPLIHSLSLNTKRYLLISAPLWIKHISDEQILGFVENLMVAVFKAASPLGSPELCPSALHGLSQAMKLPSPAHHLWSLLSEATGKIFDLLPNKIRRKDLELYISIAKCLLEMTDDDANRIAQVTKSNIEKAAFVKLYLVSQGRFPLVNLTDMLSVAVQHREKEVLAWMILHSLYQARIVSHANTGVLKRMEWLLELMGYIRNVAYQSTSFHNTALDKALDFFLLIFATAVVAWADHTAPLLLGLSASWLPWHQENGPAGPVPSFLGRSPMHRVTLQEVLTLLPNSMALLLQKEPWKEQTQKFIDWLFSIMESPKEALSAQSRDLLKATLLSLRVLPEFKKKAVWTRAYGW

SEQ ID NO: 49251 - protein, 608 aa, Homo sapiens [sequence omitted]

SEQ ID NO: 49252 - protein, 206 aa, Homo sapiens
MRGGATRRGSCCGGDGAADGRGPGRSGRARGGGSPSGGGGGVGWRGRADGARQQLEERFADLAASHLEAIRARDEWDRQNARLRQENARLRLENRRLKRENRSLFRQALRLPGEGGNGTPAEARRVPEEASTNRRARDSGREDEPGSPRALRARLEKLEAMYRRALLQLHLEQRGPRPSGDKEEQPLQEPDSGLRSRDSEPSGPWL

SEQ ID NO: 49253 - protein, 521 aa, Homo sapiens
MKTGTKGPQRQILDKSYYLGLLRSKISELTTEVNKLQKGIEMYNQENSVYLSYEKRAETLAVEIKELQGQLADYNMLVDKLNTNTEMEEVMNDYNMLKAQNDRETQSLDVIFTERQAKEKQIRSVEEEIEQEKQATDDIIKNMSFENQVKYLEMKTTNEKLLQELDTLQQQLDSQNMKKESLEAEIAHSQVKQEAVLLHEKLYELESHRDQMIAEDKSIGSPMEEREKLLKQIKDDNQEIASMERQLTDTKEKINQFIEEIRQLDMDLEEHQGEMNQKYKELKKREEHMDTFIETFEETKNQELKRKAQIEANIVALLEHCSRNINRIEQISSITNQELKMMQDDLNFKSTEVQKSQSTAQNLTSDIQRLQLDLQKMELLESKMTEEQHSLKSKIKQMTTDLEIYNDLPALKSSGEEKIKKLHQERMILSTHRNAFKKIMEKQNIEYEALKTQLQENETHSQLTNLERKWQHLEQNNFAMKEFIATKSQESDYQPIKKNVTKQIAEYNKTIVDALHSTSGN

SEQ ID NO: 49254 - protein, 201 aa, Homo sapiens
MKTGTKGPQRQILDKSYYLGLLRSKISELTTEVNKLQKGIEMYNQENSVYLSYEKRAETLAVEIKELQGQLADYNMLVDKLNTNTEMEEVMNDYNMLKAQNDRETQSLDVIFTERQAQKLKLRTTIGQVQWLMPVIPALLEAEVGGSPEVRSSRPAWAMWRNSVSTKNIKISWVRWQVPVIPATQEAEARESLEPRRRRVQ

SEQ ID NO: 49255 - protein, 1101 aa, Homo sapiens
MDLILINSLPLVSDAETSLTCIASGWRPHEPITIGRDFEALMNQHQDPLEVTQDVTREWAKKVVWKREKASKINGAYFCEGRVRGEAIRIRTMKMRQQASFLPATLTMTVDKGDNVNISFKKVLIKEEDAVIYKNGSFIHSVPRHEVPDILEVHLPHAQPQDAGVYSARYIGGNLFTSAFTRLIVRRCEAQKWGPECNHLCTACMNNGVCHEDTGECICPPGFMGRTCEKACELHTFGRTCKERCSGQEGCKSYVFCLPDPYGCSCATGWKGLQCNEACHPGFYGPDCKLRCSCNNGEMCDRFQGCLCSPGWQGLQCEREGIQRMTPKIVDLPDHIEVNSGKFNPICKASGWPLPTNEEMTLVKPDGTVLHPKDFNHTDHFSVAIFTIHRILPPDSGVWVCSVNTVAGMVEKPFNISVKVLPKPLNAPNVIDTGHNFAVINISSEPYFGDGPIKSKKLLYKPVNHYEAWQHIQVTNEIVTLNYLEPRTEYELCVQLVRRGEGGEGHPGPVRRFTTASIGLPPPRGLNLLPKSQTTLNLTWQPIFPSSEDDFYVEVERRSVQKSDQQNIKVPGNLTSVLLNNLHPREQYVVRARVNTKAQGEWSEDLTAWTLSDILPPQPENIKISNITHSSAVISWTILDGYSISSITIRYKVQGKNEDQHVDVKIKNATITQYQLKGLEPETAYQVDIFAENNIGSSNPAFSHELVTLPESQAPADLGGGKMLLIAILGSAGMTCLTVLLAFLIILQLKRANVQRRMAQAFQNVREEPAVQFNSGTLALNRKVKNNPDPTIYPVLDWNDIKFQDVIGEGNFGQVLKARIKKDGLRMDAAIKRMKEYASKDDHRDFAGELEVLCKLGHHPNIINLLGACEHRGYLYLAIEYAPHGNLLDFLRKSRVLETDPAFAIANSTASTLSSQQLLHFAADVARGMDYLSQKQFIHRDLAARNILVGENYVAKIADFGLSRGQEVYVKKTMGRLPVRWMAIESLNYSVYTTNSDVWSYGVLLWEIVSLGGTPYCGMTCAELYEKLPQGYRLEKPLNCDDEVYDLMRQCWREKPYERPSFAQILVSLNRMLEERKTYVNTTLYEKFTYAGIDCSAEEAA

SEQ ID NO: 49256 - protein, 585 aa, Homo sapiens [sequence omitted]

SEQ ID NO: 49257 - protein, 978 aa, Homo sapiens [sequence omitted]

SEQ ID NO: 49258 - protein, 8 aa, Homo sapiens
MDFGVSGC

SEQ ID NO: 49259 - protein, 69 aa, Homo sapiens
MVHGVYKKSIFVFTHVLVPVWIIHYYMKYHVSEKPYGIVEKKSRIFPGDTILETGEVIPPMKEFPDQHH

SEQ ID NO: 49260 - protein, 160 aa, Homo sapiens
MVKQKALRVLKQKRMYEQQRDNLAQQSFNMEQANYTIQSLKDTKTTVDAMKLGVKEMKKAYKQVKIDQIEDLQDQLEDMMEDANEIQEALSRSYGTPELDEDDLEAELDALGDELLADEDSSYLDEAASAPAIPEGVPTDTKNKDGVLVDEFGLPQIPAS

SEQ ID NO: 49261 - protein, 1081 aa, Homo sapiens
MRLAQVIFDKNDSDFEAKVKQLMEVTGKNQDECIVALHDCNGDVNKAINILLEGNSDTTSWETVGCKKKNFAKENSENKENREKKSEKESSRGRGNNNRKGRGGNRGREFRGEENGIDCNQVDKPSDRGKRARGRGFGRGRGRGAGRFSTQGMGTFNPADYSDSTSTDVCGTKLVVWEAAQNGADEGTELASNTHNIAQDLSNKSSYGLKGAWKNSVEEWTTEDWTEDLSETKVFTASSAPAENHILPGQSIDLVALLQKPVPHSQASEANSFETSQQQGFGQALVFTNSQHNNQMAPGTGSSTAVNSCSPQSLSSVLGSGFGELAPPKMANITSSQILDQLKAPSLGQFTTTPSTQQNSTSHPTTTTSWDLKPPTSQSSVLSHLDFKSQPEPSPVLSQLSQRQQHQSQAVTVPPPGLESFPSQAKLRESTPGDSPSTVNKLLQLPSTTIENISVSVHQPQPKHIKLAKRRIPPASKIPASAVEMPGSADVTGLNVQFGALEFGSEPSLSEFGSAPSSENSNQIPISLYSKSLSEPLNTSLSMTSAVQNSTYTTSVITSCSLTSSSLNSASPVAMSSSYDQSSVHNRIPYQSPVSSSESAPGTIMNGHGGGRSQQTLDTPKTTGPPSALPSVSSLPSTTSCTALLPSTSQHTGDLTSSPLSQLSSSLSSHQSSLSAHAALSSSTSHTHASVESASSHQSSATFSTAATSVSSSASSGASLSSSMNTANSLCLGGTPASASSSSSRAAPLVTSGKAPPNLPQGVPPLLHNQYLVGPGGLLPAYPIYGYDELQMLQSRLPVDYYGIPFAAPTALASRDGSLANNPYPGDVTKFGRGDSASPAPATTPAQPQQSQSQTHHTAQQPFVNPALPPGYSYTGLPYYTGMPSAFQYGPTMFVPPASAKQHGVNLSTPTPPFQQASGYGQHGYSTGYDDLTQGTAAGDYSKGGYAGSSQAPNKSAGSGPGKGVSVSSSTTGLPDMTGSVYNKTQTFDKQGFHAGTPPPFSLPSVLGSTGPLASGAAPGYAPPPFLHILPAHQQPHSQLLHHHLPQDAQSGSGQRSQPSSLQPKSQASKPAYGNSPYWTN

SEQ ID NO: 49262 - protein, 1537 aa, Homo sapiens
MVGTVWIALKTIRQSDEEGPGEWSTLEAETLMKDDEICGTRNPTPHKILLDTRFELPFDIPEEEARYWTYKWEQINALGADNEYSSQEESQRKPLPTAAAQCSFEDPDSAVDDRDSDYRSETSNSFPPPYHTASQPNASVHQFPVPVRSPQQLLLQGSSRDSCNDSMQSYDLDYPERRAISPTSSSRYGSSCNVSQGSSQLSELDQYHEQDDDHRETDSIHSCHSSHSLSRDGQAGFGEQEKPLEVTGQAEKEAACEPKEMKEDATTHPPPDLVLQKDHFLGPQESFPEENASSPFTQARAHWIRAVTKVRLQLQEIPDDGDPSLPQWLPEGPAGGLYGIDSMPDLRRKKPLPLVSDLSLVQSRKAGITSAMATRTSLKDEELKSHVYKKTLQALIYPISCTTPHNFEVWTATTPTYCYECEGLLWGIARQGMRCSECGVKCHEKCQDLLNADCLQRAAEKSCKHGAEDRTQNIIMAMKDRMKIRERNKPEIFEVIRDVFTVNKAAHVQQMKTVKQSVLDGTSKWSAKITITVVCAQGLQAKDKTGSSDPYVTVQVSKTKKRTKTIFGNLNPVWEEKFHFECHNSSDRIKVRVWDEDDDIKSRVKQRLKRESDDFLGQTIIEVRTLSGEMDVWYNLEKRTDKSAVSGAIRLQISVEIKGEEKVAPYHVQYTCLHENLFHYLTDIQGSGGVRIPEARGDDAWKVYFDETAQEIVDEFAMRYGIESIYQAMTHFACLSSKYMCPGVPAVMSTLLANINAYYAHTTASTNVSASDRFAASNFGKERFVKLLDQLHNSLRIDLSTYRNNFPAGSPERLQDLKSTVDLLTSITFFRMKVQELQSPPRASQVVKDCVKACLNSTYEYIFNNCHDLYSRQYQLKQELPPEEQGPSIRNLDFWPKLITLIVSIIEEDKNSYTPVLNQFPQELNVGKVSAEVMWHLFAQDMKYALEEHEKDHLCKSADYMNLHFKVKWLHNEYVRDLPVLQGQVPEYPAWFEQFVLQWLDENEDVSLEFLRGALERDKKDGFQQTSEHALFSCSVVDVFTQLNQSFEIIRKLECPDPSILAHYMRRFAKTIGKVLMQYADILSKDFPAYCTKEKLPCILMNNVQQLRVQLEKMFEAMGGKELDLEAADSLKELQVKLNTVLDELSMVFGNSFQVRIDECVRQMADILGQVRGTGNASPDARASAAQDADSVLRPLMDFLDGNLTLFATVCEKTVLKRVLKELWRVVMNTMERMIVLPPLTDQTGTQLIFTAAKELSHLSKLKDHMVREETRNLTPKQCAVLDLALDTIKQYFHAGGNGLKKTFLEKSPDLQSLRYALSLYTQTTDTLIKTFVRSQTTQVHDGKGIRFTANEDIRPEKGSGVDDPVGEVSIQVDLFTHPGTGEHKVTVKVVAANDLKWQTAGMFRPFVEVTMVGPHQSDKKRKFTTKSKSNNWAPKYNETFHFLLGNEEGPESYELQICVKDYCFAREDRVLGLAVMPLRDVTAKGSCACWCPLGRKIHMDETGLTILRILSQRSNDEVAREFVKLKSESRSTEEGS

SEQ ID NO: 49263 - protein, 1339 aa, Homo sapiens [sequence omitted]

SEQ ID NO: 49264 - protein, 851 aa, Homo sapiens
MGYQVPPFGWRICLAHEFTEKRKPFQANNVSLSNMIKHIGMGLRYLQWWYRKTHVEKKTPFIDMINSVPLRQIYGCPLGGIGGGTITRGWRGQFCRWQLNPGMYQHRTVIADQFTVCLRREGQTVYQQVLSLERPSVLRSWNWGLCGYFAFYHALYPRAWTVYQLPGQNVTLTCRQITPILPHDYQDSSLPVGVFVWDVENEGDEALDVSIMFSMRNGLGGGDDAPGGLWNEPFCLERSGETVRGLLLHHPTLPNPYTMAVAARVTAATTVTHITAFDPDSTGQQVWQDLLQDGQLDSPTGQSTPTQKGVGIAGAVCVSSKLRPRGQCRLEFSLAWDMPRIMFGAKGQVHYRRYTRFFGQDGDAAPALSHYALCRYAEWEERISAWQSPVLDDRSLPAWYKSALFNELYFLADGGTVWLEVLEDSLPEELGRNMCHLRPTLRDYGRFGYLEGQEYRMYNTYDVHFYASFALIMLWPKLELSLQYDMALATLREDLTRRRYLMSGVMAPVKRRNVIPHDIGDPDDEPWLRVNAYLIHDTADWKDLNLKFVLQVYRDYYLTGDQNFLKDMWPVCLAVMESEMKFDKDHDGLIENGGYADQTYDGWVTTGPSAYCGGLWLAAVAVMVQMAALCGAQDIQDKFSSILSRGQEAYERLLWNGRYYNYDSSSRPQSRSVMSDQCAGQWFLKACGLGEGDTEVFPTQHVVRALQTIFELNVQAFAGGAMGAVNGMQPHGVPDKSSVQSDEVWVGVVYGLAATMIQEGLTWEGFQTAEGCYRTVWERLGLAFQTPEAYCQQRVFRSLAYMRPLSIWAMQLALQQQQHKKASWPKVKQGTGLRTGPMFGPKEAMANLSPE

SEQ ID NO: 49265 - protein, 74 aa, Homo sapiens
MGSVCCSYAGHHTNCREYCQAIFRTDSSPGPSQIKAVENYCASISPQLIHCVNNYTQSYPMRNPTDSRSVLSDI

SEQ ID NO: 49266 - protein, 527 aa, Homo sapiens
MKTADELFITIDTSYLSPVTVDQLLDYFYSGKVVISEQNVEELLRGAQYFNTPRLRVHCNDFLIKSICRANCLRYLFLAELFELKEVSDVAYSGIRDNFHYWASPEGSMHFMRCPPVIFGRLLRDENLHVLNEDQALSALINWVYFRKEDREKYFKKFFNYINLNAVSNKTLVFASNKLVGMENTSSHTTLIESVLMDRKQERPCSLLVYQRKGALLDSVVILGGQKAHGQFNDGVFAYIIQENLWMKLSDMPYRAAALSATSAGRYIYISGGTTEQISGLKTAWRYDMDDNSWTKLPDLPIGLVFHTMVTCGGTVYSVGGSIAPRRYVSNIYRYDERKEVWCLAGKMSIPMDGTAVITKGDRHLYIVTGRCLVKGYISRVGVVDCFDTSTGDVVQCITFPIEFNHRPLLSFQQDNILCVHSHRQSVEINLQKVKASKTTTSVPVLPNSCPLDVSHAICSIGDSKVFVCGGVTTASDVQTKDYTINPNAFLLDQKTGKWKTLAPPPEALDCPACCLAKLPCKILQRI

SEQ ID NO: 49267 - protein, 101 aa, Homo sapiens
MERLEALDANSRKQEAEWKEKAIKELEEWYARQDEQLQKTKANNRAAEEAFVNDIDESSPGTEWERVARLCDFNPKSSKQAKDVSRMRSVLISLKQAPLVH

SEQ ID NO: 49268 - protein, 597 aa, Homo sapiens
MNIRILHIEGGEVSGTIDDSIRHAITKLAHYHVCCTRSAEQHLISMCEDHDRILLAGCPSYDKLLSAKNKDYMSIIRMWLGDDVKSKDYIVALQHPVTTDIKHSIKMFELTLDALISFNKRTLVLFPNIDAGSKEMVRVMRKKGIEHHPNFRAVKHVPFDQFIQLVAHAGCMIGNSSCGVREVGAFGTPVINLGTRQIGRETGENVLHVRDADTQDKILQALHLQFGKQYPCSKIYGDGNAVPRILKFLKSIDLQEPLQKKFCFPPVKENISQDIDHILETLSALAVDLGGTNLRVAIVSMKGEIVKKYTQFNPKTYEERINLILQMCVEAAAEAVKLNCRILGVGISTGGRVNPREGIVLHSTKLIQEWNSVDLRTPLSDTLHLPVWVDNDGNCAALAERKFGQGKGLENFVTLITGTGIGGGIIHQHELIHGSSFCAAELGHLVVSLDGPDCSCGSHGCIEAYASGMALQREAKKLHDEDLLLVEGMSVPKDEAVGALHLIQAAKLGNAKAQSILRTAGTALGLGVVNILHTMNPSLVILSGVLASHYIHIVKDVIRQQALSSVQDVDVVVSDLVDPALLGAASMVLDYTTRRIY

SEQ ID NO: 49269 - protein, 568 aa, Homo sapiens
MVLEYCPGGELFDYIISQDRLSEEETRVVFRQIVSAVAYVHSQGYAHRDLKPENLLFDEYHKLKLIDFGLCAKPKGNKDYHLQTCCGSLAYAAPELIQGKSYLGSEADVWSMGILLYVLMCGFLPFDDDNVMALYKKIMRGKYDVPKWLSPSSILLLQQMLQVDPKKRISMKNLLNHPWIMQDYNYPVEWQSKNPFIHLDDDCVTELSVHHRNNRQTMEDLISLWQYDHLTATYLLLLAKKARGKPVRLRLSSFSCGQASATPFTDIKSNNWSLEDVTASDKNYVAGLIDYDWCEDDLSTGAATPRTSQFTKYWTESNGVESKSLTPALCRTPANKLKNKENVYTPKSAVKNEEYFMFPEPKTPVNKNQHKREILTTPNRYTTPSKARNQCLKETPIKIPVNSTGTDKLMTGVISPERRCRSVELDLNQAHMEETPKRKGAKVFGSLERGLDKVITVLTRSKRKGSARDGPRRLKLHYNVTTTRLVNPDQLLNEIMSILPKKHVDFVQKGYTLKCQTQSDFGKVTMQFELEVCQLQKPDVVGIRRQRLKGDAWVYKRLVEDILSSCKV

SEQ ID NO: 49270 - protein, 248 aa, Homo sapiens
MSVGIDHLALDEIKKRGIRVGYTPDVLTDTTAELAVSLLLTTCRRLPEAIEEVKNGGWTSWKPLWLCGYGLTQSTVGIIGLGRIGQAIARRLKPFGVQRFLYTGRQPRPEEAAEFQAEFVSTPELAAQSDFIVVACSLTPATEGLCNKDFFQKMKETAVFINISRGDVVNQDDLYQALASGKIAAAGLDVTSPEPLPTNHPLLTLKNCVILPHIGSATHRTRNTMSLLAANNLLAGLRGEPMPSELKL

SEQ ID NO: 49271 - protein, 614 aa, Homo sapiens
MIQLDSEVVTAEAFAALIDMMYTSTLMLGESNVMDVLLAASHLHLNSVVKACKHYLTTRTLPMSPPSERVQEQSARMQRSFMLQQLGLSIVSSALNSSQNGEEQPAPMSSSMRSNLDQRTPFPMRRLHKRKQSAEERARQRLRPSIDESAISDVTPENGPSGVHSREEFFSPDSLKIVDNPKADGMTDNQEDSAIMFDQSFGTQEDAQVPSQSDNSAGNMAQLSMASRATQVETSFDQEAAPEKSSFQCENPEVGLGEKEHMRVVVKSEPLSSPEPQDEVSDVTSQAEGSESVEVEGVVVSAEKIDLSPESSDRSFSDPQSSTDRVGDIHILEVTNNLEHKSTFSISNFLNKSRGNNFTANQNNDDNIPNTTSDCRLESEAPYLLSPEAGPAGGPSSAPGSHVENPFSEPADSHFVRPMQEVMGLPCVQTSGYQGGEQFGMDFSRSGLGLHSSFSRVMIGSPRGGASNFPYYRRIAPKMPVVTSVRSSQIPENSTSSQLMMNGATSSFENGHPSQPGPPQLTRASADVLSKCKKALSEHNVLVVEGARKYACKICCKTFLTLTDCKKHIRVHTGEKPYACLKCGKRFSQSSHLYKHSKTTCLRWQSSNLPSTLL

SEQ ID NO: 49272 - protein, 1244 aa, Homo sapiens [sequence omitted]

SEQ ID NO: 49273 - protein, 353 aa, Homo sapiens
MFGVWEPLLEPLEIDQTEDFRPWNLGIKMKKKAKMAIVESDPEEENYKVPEYKTVISFHSKDQLNITLSKCGLVMLNNLVKAFTEAATGSSADFVKDLAPFMILNSLGLTISVSPSDSFSVLNIPMAKSYVLKNGESLSMDYIRTKDNDHFNAMTSLSSKLFFILLTPVNHSTADKIPLTKVGRRLYTVRHRESGVERSIVCQIDTVEGSKKVTIRSPVQIRNHFSVPLSVYEGDTLLGTASPENEFNIPLGSYRSFIFLKPEDENYQMCEGIDFEEIIKNDGALLKKKCRSKNPSKESFLINIVPEKDNLTSLSVYSEDGWDLPYIMHLWPPILLRNLLPYKIAYYIEVSAN

SEQ ID NO: 49274 - protein, 601 aa, Homo sapiens
MWLEACINWIQEENNNVNLSQAQMNKQVFEQWLLTDLRDLEHPLLPDGILEIPKGELNGFYALQINSLVDVSQPAYSQIQKLRGKNTTNDLVTAEAQVTPKPWEAKPSRMLMLQLTDGIVQIQGMEYQPIPILHSDLPPGTKILIYGNISFRLGVLLLKPENVKVLGGEVDALLEEYAQEKVLARLIGEPDLVVSVIPNNSNENIPRVTDVLDPALGPSDEELLASLDENDELTANNDTSSERCFTTGSSSNTIPTRQSSFEPEFVISPRPKEEPSNLSIHVMDGELDDFSLEEALLLEETVQKEQMETKELQPLTFNRNADRSIERFSHNPNTTNNFSLTCKNGNNNWSEKNVSEQMTNEDKSFGCPSVRDQNRSIFSVHCNVPLAHDFTNKEKNLETDNKIKQTSSSDSHSLNNKILNREVVNYVQKRNSQISNENDCNLQSCSLRSSENSINLSIAMDLYSPPFVYLSVLMASKPKEVTTVKVKAFIVTLTGNLSSSGGIWSITAKVSDGTAYLDVDFVDEILTSLIGFSVPEMKQSKKDPLQYQKFLEGLQKCQRDLIDLCCLMTISFNPSLSKAMVLALQDVNMEHLENLKKRLNK

SEQ ID NO: 49275 - protein, 723 aa, Homo sapiens [sequence omitted]

SEQ ID NO: 49276 - protein, 544 aa, Homo sapiens
MGDTAKPYFVKRTKDRGTMDDDDFRRGHPQQDYLIIDDHAKGHGSKMEKGLQKKKITPGNYGNTPRKGPCAVSSNPYAFKNPIYSQPAWMNDSHKDQSKRWLSDEHTGNSDNWREFKPGPRIPVINRQRKDSFQENEDGYRWQDTRGCRTVRRLFHKDLTSLETTSEMEAGSPENKKQRSRPRKPRKTRNEENEQDGDLEGPVIDESVLSTKELLGLQQAEERLKRDCIDRLKRRPRNYPTAKYTCRLCDVLIESIAFAHKHIKEKRHKKNIKEKQEEELLTTLPPPTPSQINAVGIAIDKVVQEFGLHNENLEQRLEIKRIMENVFQHKLPDCSLRLYGSSCSRLGFKNSDVNIDIQFPAIMSQPDVLLLVQECLKNSDSFIDVDADFHARVPVVVCREKQSGLLCKVSAGNENACLTTKHLTALGKLEPKLVPLVIAFRYWAKLCSIDRPEEGGLPPYVFALMAIFFLQQRKEPLLPVYLGSWIEGFSLSKLGNFNLQDIEKDVVIWEHTDSAAGDTGITKEEAPRETPIKRGQVVSSLLCR

SEQ ID NO: 49277 - protein, 276 aa, Homo sapiens
MIELHNQEYREGKHSFTMAMNAFGDMTSEEFRQVMNGFQNRKPRKGKVFQEPLFYEAPRSVDWREKGYVTPVKNQGQCGSCWAFSATGALEGQMFRKTGRLISLSEQNLVDCSGPQGNEGCNGGLMDYAFQYVQDNGGLDSEESYPYEATEESCKYNPKYSVANDTGFVDIPKQEKALMKAVATVGPISVAIDAGHESFLFYKEGIYFEPDCSSEDMDHGVLVVGYGFESTESDNNKYWLVKNSWGEEWGMGGYVKMAKDRRNHCGIASAASYPTV

SEQ ID NO: 49278 - protein, 236 aa, Homo sapiens
MKKRTSHKKHRSSVGPSKPVSQPRRNIVGCRIQHGWKEGNGPVTQWKGTVLDQVPVNPSLYLIKYDGFDCVYGLELNKDERVSALEVLPDRVATSRISDAHLADTMIGKAVEHMFETEDGSKDEWRGMVLARAPVMNTWFYITYEKDPVLYMYQLLDDYKEGDLRIMPDSNDSPPAEREPGEVVDSLVGKQVEYAKEDGSKRTGMVIHQVEAKPSVYFIKFDDDFHIYVYDLVKTS

SEQ ID NO: 49279 - protein, 486 aa, Homo sapiens [sequence omitted]

SEQ ID NO: 49280 - protein, 385 aa, Homo sapiens
MRAFLACMRSDTPAMLNPANVPTHLMVLCCVLRYMVQWPGARILRRQELDAFLAQALSPKLYEPDQLQELKIENLDPRGIQLSALFMSGVDMALFANDACGQPIPWEHCCPWMYFDGKLFQSKLLKASREKTPLIDLCDGQADQAAKVEKMRQSVLEGLSFSRQSHTLPFPPPPALPFYPASAYPRHFGPVPPSQGRGRGFAGVQPIPSQGGKLEIAGTVVGHWAGSRRGRGGRGPFPLQVVSVGGPARGRPRGVISTPVIRTFGRGGRYYGRGYKNQAAIQGRPPYAASAEEVAKELKSKSGESKSSAMSSDGSLAENGVMAEEKPAPQMNGSTGDARAPSHSESALNNDSKTCNTNPHLNALSTDSACRREAALEAAVLNKEE

SEQ ID NO: 49281 - protein, 544 aa, Homo sapiens
MTADQAIIFVRAKRPNSIQTRGQLLCVREFTQFLTPLRNIFSCCDPKAHAVTLPQYLIRQRHLLHGYEARLLKHVPKIIHLVCKLLLDLAENRPVMMKDVSEGPGLSAEIEKTMSEMVTMQLDKELLRHDSDVSNPPNPTAVAADFDNRGMIFSNEQQFDPLWKRRNVECLQPLTHLKRRLSYSDSDLKRAENLLEQGETPQTVPAQILVGHKPRQQKLISHCYIPQSPEPDLHKEALVRSTLSFWSQSKFGGLEGLKDNGSPIFHGRIIPKEAQQSGAFSADVSGSHSPGEPVSPSFANVHKDPNPAHQQVSHCQCKTHGVGSPGSVRQNSRTPRSPLDCGSSPKAQFLVEHETQDSKDLSEAASHSALQSELSAEARRILAAKALANLNESVEKEELKRKVEMWQKELNSRDGAWERICGERDPFILCSLMWSWVEQLKEPVITKEDVDMLVDRRADAAEALFLLEKGQHQTILCVLHCIVNLQTIPVDVEEAFLAHAIKAFTKVNFDSENGPTVYNTLKKIFKHTLEEKRKMTKDGPKPGL

SEQ ID NO: 49282 - protein, 1290 aa, Homo sapiens
MIQTPKEEGANVLTTEALLQHLDSALQASRVHVYMYNRQWKLEHLCYKSGELITETGYMDQIIEYLYPCLIITPLDCFWEGAKLQSGTAYLLGKPPLRWTNFDPLEFLEELKKINYQVDSWEEMLNKAEVGHGYMDRPCLNPADPDCPATAPNKNSTKPLDMALVLNGGCHGLSRKYMHWQEELIVGGTVKNSTGKLVSAHALQTMFQLMTPKQMYEHFKGYEYVSHINWNEDKAAAILEAWQRTYVEVVHQSVAQNSTQKVLSFTTTTLDDILKSFSDVSVIRVASGYLLMLAYACLTMLRWDCSKSQGAVGLAGVLLVALSVAAGLGLCSLIGISFNAATTQVLPFLALGVGVDDVFLLAHAFSETGQNKRIPFEDRTGECLKRTGASVALTSISNVTAFFMAALIPIPALRAFSLQAAVVVVFNFAMVLLIFPAILSMDLYRREDRRLDIFCCFTSPCVSRVIQVEPQAYTDTHDNTRYSPPPPYSSHSFAHETQITMQSTVQLRTEYDPHTHVYYTTAEPRSEISVQPVTVTQDTLSCQSPESTSSTRDLLSQFSDSSLHCLEPPCTKWTLSSFAEKHYAPFLLKPKAKVVVIFLFLGLLGVSLYGTTRVRDGLDLTDIVPRETREYDFIAAQFKYFSFYNMYIVTQKADYPNIQHLLYDLHRSFSNVKYVMLEENKQLPKMWLHYFRDWLQGLQDAFDSDWETGKIMPNNYKNGSDDGVLAYKLLVQTGSRDKPIDISQLTKQRLVDADGIINPSAFYIYLTAWVSNDPVAYAASQANIRPHRPEWVHDKADYMPETRLRIPAAEPIEYAQFPFYLNGLRDTSDFVEAIEKVRTICSNYTSLGLSSYPNGYPFLFWEQYIGLRHWLLLFISVVLACTFLVCAVFLLNPWTAGIIVMVLALMTVELFGMMGLIGIKLSAVPVVILIASVGIGVEFTVHVALAFLTAIGDKNRRAVLALEHMFAPVLDGAVSTLLGVLMLAGSEFDFIVRYFFAVLAILTILGVLNGLVLLPVLLSFFGPYPEVSPANGLNRLPTPSPEPPPSVVRFAMPPGHTHSGSDSSDSEYSSQTTVSGLSEELRHYEAQQGAGGPAHQVIVEATENPVFAHSTVVHPESRHHPPSNPRQQPHLDSGSLPPGRQGQQPRRDPPREGLWPPPYRPRRDAFEISTEGHSGPSNRARWGPRGARSHNPRNPASTAMGSSVPGYCQPITTVTASASVTVAVHPPPVPGPGRNPRGGLCPGYPETDHGLFEDPHVPFHVRCERRDSKVEVIELQDVECEERPRGSSSN

SEQ ID NO: 49283 - protein, 246 aa, Homo sapiens [sequence omitted]

SEQ ID NO: 49284 - protein, 799 aa, Homo sapiens [sequence omitted]

SEQ ID NO: 49285 - protein, 1374 aa, Homo sapiens [sequence omitted]

SEQ ID NO: 49286 - protein, 191 aa, Homo sapiens [sequence omitted]

SEQ ID NO: 49287 - protein, 304 aa, Homo sapiens
MENAIKSVQIDLLKLSQSHSNTGHIINKLFEKTRKVSAHIKDVKARVEKQQIHVKKVEVKQEEIMKKNKFRVVIFQEKFRCPTSLSVVKDRNLTENQEEDDDDIFDPPVDLSSDEEYYVEESRSARLRKSGKEHIDNIKKAFSKENMQKTRQNLDKKVNRIRTRIVTPERRERLRQSGERLRQSGERLRQSGERFKKSISNAAPSKEAFKMRSLRKGKDRTVAEGEECAREMGVDIIARSESLGPISELYSDELSEPEHEAARPVYPPHEGREIPTPEPLKVTFKSQVKVEDDESLLLDLKHSS

SEQ ID NO: 49288 - protein, 394 aa, Homo sapiens [sequence omitted]

SEQ ID NO: 49289 - protein, 2275 aa, Homo sapiens
MVKPLTKSRGNFCCEWCSYQTPRRERWCDHMMKKHRSMVKILSSLRQQQEGTNLPDVPNKSAPSPTSNSTYLTMNAASREIPNTTVSNFRGSMGNSIMRPNSSASKFSPMSYPQMKPKSPHNSGLVNLTERSRYGMTDMTNSSADLETNSMLNDSSSDEELNEIDSENGLSAMDHQTSGLSAEQLMGSDGNKLLETKGIPFRRFMNRFQCPFCPFLTMHRRSISRHIENIHLSGKTAVYKCDECPFTCKSSLKLGAHKQCHTGTTSDWDAVNSQSESISSSLNEGVVSYESSSINGRKSGVMLDPLQQQQPPQPPPPPPPPPPSQPQPLQQPQPPQLQPPHQVPPQPQTQPPPTQQPQPPTQAAPLHPYKCTMCNYSTTTLKGLRVHQQHKHSFCDNLPKFEGQPSSLPLENETDSHPSSSNTVKKSQTSILGLSSKNNFVAKASRKLANDFPLDLSPVKKRTRIDEIASNLQSKINQTKQQEDAVINVEDDEEEEEDNEVEIEVELDREEEPTEPIIEVPTSFSAQQIWVRDTSEPQKEPNFRNITHDYNATNGAEIELTLSEDEEDYYGSSTNLKDHQVSNTALLNTQTPIYGTEHNSENTDFGDSGRLYYCKHCDFNNKSARSVSTHYQRMHPYIKFSFRYILDPNDHSAVYRCLECYIDYTNFEDLQQHYGEHHPEAMNVLNFDHSDLIYRCRFCSYTSPNVRSLMPHYQRMHPTVKINNAMIFSSYVVEQQEGLNTESQTLREILNSAPKNMATSTPVARGGGLPATFNKNTPKTFTPECENQKDPLVNTVVVYDCDVCSFASPNMHSVLVHYQKKHPEEKASYFRIQKTMRMVSVDRGSALSQLSFEVGAPMSPKMSNMGSPPPPQPPPPDLSTELYYCKHCSYSNRSVVGVLVHYQKRHPEIKVTAKYIRQAPPTAAMMRGVEGPQGSPRPPAPIQQLNRSSSERDGPPVENEMFFCQHCDYGNRTVKGVLIHYQKKHRDFKANADVIRQHTATIRSLCDRNQKKPASCVLVSPSNLERDKTKLRALKCRQCSYTSPYFYALRKHIKKDHPALKATVTSIMRWAFLDGLIEAGYHCEWCIYSHTEPNGLLLHYQRRHPEHYVDYTYMATKLWAGPDPSPPSLTMPAEAKTYRCRDCVFEAVSIWDITNHYQAFHPWAMNGDESVLLDIIKEKDAVEKPILSSEELAGPVNCENSIPTPFPEQEAECPEDARLSPEKSLQLASANPAISSTPYQCTVCQSEYNNLHGLLTHYGKKHPGMKVKAADFAQDIDINPGAVYKCRHCPYINTRIHGVLTHYQKRHPSIKVTAEDFVHDVEQSADISQNDVEETSRIFKQGYGAYRCKLCPYTHGTLEKLKIHYEKYHNQPEFDVFSQSPPKLPVPLEPEMTTEVSPSQVSITEEEVGEEPVSTSHFSTSHLVSHTVFRCQLCKYFCSTRKGIARHYRIKHNNVRAQPEGKNNLFKCALCAYTNPIRKGLAAHYQKRHDIDAYYTHCLAASRTISDKPNKVIIPSPPKDDSPQLSEELRRAVEKKKCSLCSFQSFSKKGIVSHYMKRHPGVFPKKQHASKLGGYFTAVYADEHEKPTLMEEEERGNFEKAEVEGEAQEIEWLPFRCIKCFKLSFSTAELLCMHYTDHHSRDLKRDFIILGNGPRLQNSTYQCKHCDSKLQSTAELTSHLNIHNEEFQKRAKRQERRKQLLSKQKYADGAFADFKQERPFGHLEEVPKIKERKVVGYKCKFCVEVHPTLRAICNHLRKHVQYGNVPAVSAAVKGLRSHERSHLALAMFTREDKYSCQYCSFVSAFRHNLDRHMQTHHGHHKPFRCKLCSFKSSYNSRLKTHILKAHAGEHAYKCSWCSFSTMTISQLKEHSLKVHGKALTLPRPRIVSLLSSHSHHSSQKATPAEEVEDSNDSSYSEPPDVQQQLNHYQSAALARNNSRVSPVPLSGAAAGTEQKTEAVLHCEFCEFSSGYIQSIRRHYRDKHGGKKLFKCKDCSFYTGFKSAFTMHVEAGHSAVPEEGPKDLRCPLCLYHTKYKRNMIDHIVLHREERVVPIEVCRSKLSKYLQGVVFRCDKCTFTCSSDESLQQHIEKHNELKPYKCQLCYYETKHTEELDSHLRDEHKVSRNFELVGRVNLDQLEQMKEKMESSSSDDEDKEEEMNSKAEDRELMRFSDHGAALNTEKRFPCEFCGRAFSQGSEWERHVLRHGMALNDTKQVSREEIHPKEIMENSVKMPSIEEKEDDEAIGIDFSLKNETVAICVVTADKSLLENAEAKKE

SEQ ID NO: 49290 - protein, 470 aa, Homo sapiens
MAVSDALLPSFSTFASGPAGREKTLRQAGAPNNRWREELSHMKRLPPVLPGRPYDLAAATVATDLESGGAGAACGGSNLAPLPRRETEEFNDLLDLDFILSNSLTHPPESVAATVSSSASASSSSSPSSSGPASAPSTCSFTYPIRAGNDPGVAPGGTGGGLLYGRESAPPPTAPFNLADINDVSPSGGFVAELLRPELDPVYIPPQQPQPPGGGLMGKFVLKASLSAPGSEYGSPSVISVSKGSPDGSHPVVVAPYNGGPPRTCPKIKQEAVSSCTHLGAGPPLSNGHRPAAHDFPLGRQLPSRTTPTLGLEEVLSSRDCHPALPLPPGFHPHPGPNYPSFLPDQMQPQVPPLHYQELMPPGSCMPEEPKPKRGRRSWPRKRTATHTCDYAGCGKTYTKSSHLKAHLRTHTGEKPYHCDWDGCGWKFARSDELTRHYRKHTGHRPFQCQKCDRAFSRSDHLALHMKRHF

SEQ ID NO: 49291 - protein, 3468 aa, Homo sapiens
MFVRKLLSDFPVVPTATRVAIVTFSSKNYVVPRVDYISTRRARQHKCALLLQEIPAISYRGGGTYTKGAFQQAAQILLHARENSTKVVFLITDGYSNGGDPRPIAASLRDSGVEIFTFGIWQGNIRELNDMASTPKEEHCYLLHSFEEFEALARRALHEDLPSGSFIQDDMVHCSYLCDEGKDCCDRMGSCKCGTHTGHFECICEKGYYGKGLQYECTACPSGTYKPEGSPGGISSCIPCPDENHTSPPGSTSPEDCVCREGYRASGQTCELVHCPALKPPENGYFIQNTCNNHFNAACGVRCHPGFDLVGSSIILCLPNGLWSGSESYCRVRTCPHLRQPKHGHISCSTREMLYKTTCLVACDEGYRLEGSDKLTCQGNSQWDGPEPRCVERHCSTFQMPKDVIISPHNCGKQPAKFGTICYVSCRQGFILSGVKEMLRCTTSGKWNVGVQAAVCKDVEAPQINCPKDIEAKTLEQQDSANVTWQIPTAKDNSGEKVSVHVHPAFTPPYLFPIGDVAIVYTATDLSGNQASCIFHIKVIDAEPPVIDWCRSPPPVQVSEKVHAASWDEPQFSDNSGAELVITRSHTQGDLFPQGETIVQYTATDPSGNNRTCDIHIVIKGSPCEIPFTPVNGDFICTPDNTGVNCTLTCLEGYDFTEGSTDKYYCAYEDGVWKPTYTTEWPDCAKKRFANHGFKSFEMFYKAARCDDTDLMKKFSEAFETTLGKMVPSFCSDAEDIDCRLEENLTKKYCLEYNYDYENGFAIGPGGWGAANRLDYSYDDFLDTVQETATSIGNAKSSRIKRSAPLSDYKIKLIFNITASVPLPDERNDTLEWENQQRLLQTLETITNKLKRTLNKDPMYSFQLASEILIADSNSLETKKASPFCRPGSVLRGRMCVNCPLGTYYNLEHFTCESCRIGSYQDEEGQLECKLCPSGMYTEYIHSRNISDCKAQCKQGTYSYSGLETCESCPLGTYQPKFGSRSCLSCPENTSTVKRGAVNISACGVPCPEGKFSRSGLMPCHPCPRDYYQPNAGKAFCLACPFYGTTPFAGSRSITECSSFSSTFSAAEESVVPPASLGHIKKRHEISSQVFHECFFNPCHNSGTCQQLGRGYVCLCPLGYTGLKCETDIDECSPLPCLNNGVCKDLVGEFICECPSGYTGQRCEENINECSSSPCLNKGICVDGVAGYRCTCVKGFVGLHCETEVNECQSNPCLNNAVCEDQVGGFLCKCPPGFLGTRCGKNVDECLSQPCKNGATCKDGANSFRCLCAAGFTGSHCELNINECQSNPCRNQATCVDELNSYSCKCQPGFSGKRCETEQSTGFNLDFEVSGIYGYVMLDGMLPSLHALTCTFWMKSSDDMNYGTPISYAVDNGSDNTLLLTDYNGWVLYVNGREKITNCPSVNDGRWHHIAITWTSANGIWKVYIDGKLSDGGAGLSVGLPIPGGGALVLGQEQDKKGEGFSPAESFVGSISQLNLWDYVLSPQQVKSLATSCPEELSKGNVLAWPDFLSGIVGKVKIDSKSIFCSDCPRLGGSVPHLRTASEDLKPGSKVNLFCDPGFQLVGNPVQYCLNQGQWTQPLPHCERISCGVPPPLENGFHSADDFYAGSTVTYQCNNGYYLLGDSRMFCTDNGSWNGVSPSCLDVDECAVGSDCSEHASCLNVDGSYICSCVPPYTGDGKNCAEPIKCKAPGNPENGHSSGEIYTVGAEVTFSCQEGYQLMGVTKITCLESGEWNHLIPYCKAVSCGKPAIPENGCIEELAFTFGSKVTYRCNKGYTLAGDKESSCLANSSWSHSPPVCEPVKCSSPENINNGKYILSGLTYLSTASYSCDTGYSLQGPSIIECTASGIWDRAPPACHLVFCGEPPAIKDAVITGNNFTFRNTVTYTCKEGYTLAGLDTIECLADGKWSRSDQQCLAVSCDEPPIVDHASPETAHRLFGDIAFYYCSDGYSLADNSQLLCNAQGKWVPPEGQDMPRCIAHFCEKPPSVSYSILESVSKAKFAAGSVVSFKCMEGFVLNTSAKIECMRGGQWNPSPMSIQCIPVRCGEPPSIMNGYASGSNYSFGAMVAYSCNKGFYIKGEKKSTCEATGQWSSPIPTCHPVSCGEPPKVENGFLEHTTGRIFESEVRYQCNPGYKSVGSPVFVCQANRHWHSESPLMCVPLDCGKPPPIQNGFMKGENFEVGSKVQFFCNEGYELVGDSSWTCQKSGKWNKKSNPKCMPAKCPEPPLLENQLVLKELTTEVGVVTFSCKEGHVLQGPSVLKCLPSQQWNDSFPVCKIVLCTPPPLISFGVPIPSSALHFGSTVKYSCVGGFFLRGNSTTLCQPDGTWSSPLPECVPVECPQPEEIPNGIIDVQGLAYLSTALYTCKPGFELVGNTTTLCGENGHWLGGKPTCKAIECLKPKEILNGKFSYTDLHYGQTVTYSCNRGFRLEGPSALTCLETGDWDVDAPSCNAIHCDSPQPIENGFVEGADYSYGAIIIYSCFPGFQVAGHAMQTCEESGWSSSIPTCMPIDCGLPPHIDFGDCTKLKDDQGYFEQEDDMMEVPYVTPHPPYHLGAVAKTWENTKESPATHSSNFLYGTMVSYTCNPGYELLGNPVLICQEDGTWNGSAPSCISIECDLPTAPENGFLRFTETSMGSAVQYSCKPGHILAGSDLRLCLENRKWSGASPRCEAISCKKPNPVMNGSIKGSNYTYLSTLYYECDPGYVLNGTERRTCQDDKNWDEDEPICIPVDCSSPPVSANGQVRGDEYTFQKEIEYTCNEGFLLEGARSRVCLANGSWSGATPDCVPVRCATPPQLANGVTEGLDYGFMKEVTFHCHEGYILHGAPKLTCQSDGNWDAEIPLCKPVNCGPPEDLAHGFPNGFSFIHGGHIQYQCFPGYKLHGNSSRRCLSNGSWSGSSPSCLPCRCSTPVIEYGTVNGTDFDCGKAARIQCFKGFKLLGLSEITCEADGQWSSGFPHCEHTSCGSLPMIPNAFISETSSWKENVITYSCRSGYVIQGSSDLICTEKGVWSQPYPVCEPLSCGSPPSVANAVATGEAHTYESEVKLRCLEGYTMDTDTDTFTCQKDGRWFPERISCSPKKCPLPENITHILVHGDDFSVNRQVSVSCAEGYTFEGVNISVCQLDGTWEPPFSDESCSPVSCGKPESPEHGFVVGSKYTFESTIIYQCEPGYELEGNRERVCQENRQWSGGVAICKETRCETPLEFLNGKADIENRTTGPNVVYSCNRGYSLEGPSEAHCTENGTWSHPVPLCKPNPCPVPFVIPENALLSEKEFYVDQNVSIKCREGFLLQGHGIITCNPDETWTQTSAKCEKISCGPPAHVENAIARGVHYQYGDMITYSCYSGYMLEGFLRSVCLENGTWTSPPICRAVCRFPCQNGGICQRPNACSCPEGWMGRLCEEPICILPCLNGGRCVAPYQCDCPPGWTGSRCHTAVCQSPCLNGGKCVRPNRCHCLSSWTGHNCSRKRRTGF

SEQ ID NO: 49292 - protein, 340 aa, Homo sapiens
MLLAPLLPALLLVRPAGALVEGLYCGTRDCYEVLGVSRSAGKAEIARAYRQLARRYHPDRYRPQPGDEGPGRTPQSAEEAFLLVATAYETLKDEETRKDYDYMLDHPEEYYSHYYHYYSRRLAPKVDVRVVILVSVCAISVFQFFSWWNSYNKAISYLATVPKYRIQATEIAKQQGLLKKAKEKGKNKKSKEEIRDEEENIIKNIIKSKIDIKGGYQKPQICDLLLFQIILAPFHLCSYIVWYCRWIYNFNIKGKEYGEEERLYIIRKSMKMSKSQFDSLEDHQKETFLKRELWIKENYEVYKQEQEEELKKKLANDPRWKRYRRWMKNEGPGRLTFVDD

SEQ ID NO: 49293 - protein, 418 aa, Homo sapiens [sequence omitted]

SEQ ID NO: 49294 - protein, 118 aa, Homo sapiens
MALSVLVLLLLAVLYEGIKVGKAKLLNQVLVNLPTSISQQTIAETDGDSAGSDSFPVGRTHHRWYLCHFGQSLIHVIQVVIGYFIMLAVMSYNTWIFLGVVLGSAVGYYLAYPLLSTA

SEQ ID NO: 49295 - protein, 148 aa, Homo sapiens
MRRGRWPWRKGRGLVPRIPHPARSPLLARSFLQDKTFHPTRTPLLGRNPLPAKNHCPAKTQLPLKDPLQAQMLRPARMCHHARNPLQPKTSHPARTYLLVKNPCLTRTLYSPKTSLPSRNPPPGTFHPVKICLLARSPCQPRPLLRTP

SEQ ID NO: 49296 - protein, 365 aa, Homo sapiens [sequence omitted]

SEQ ID NO: 49297 - protein, 1560 aa, Homo sapiens
MPITYDNGFLFIHTDKPVYTPDQSVKVRVYSLNDDLKPAKRETVLTFIDPEGSEVDMVEEIDHIGIISFPDFKIPSNPRYGMWTIKAKYKEDFSTTGTAYFEVKEYVLPHFSVSIEPEYNFIGYKNFKNFEITIKARYFYNKVVTEADVYITFGIREDLKDDQKEMMQTAMQNTMLINGIAQVTFDSETAVKELSYYSLEDLNNKYLYIAVTVIESTGGFSEEAEIPGIKYVLSPYKLNLVATPLFLKPGIPYPIKVQVKDSLDQLVGGVPVTLNAQTIDVNQETSDLDPSKSVTRVDDGVASFVLNLPSGVTVLEFNVKTDAPDLPEENQAREGYRAIAYSSLSQSYLYIDWTDNHKALLVGEHLNIIVTPKSPYIDKITHYNYLILSKGKIIHFGTREKFSDASYQSINIPVTQNMVPSSRLLVYYIVTGEQTAELVSDSVWLNIEEKCGNQLQVHLSPDADAYSPGQTVSLNMATGMDSWVALAAVDSAVYGVQRGAKKPLERVFQFLEKSDLGCGAGGGLNNANVFHLAGLTFLTNANADDSQENDEPCKEILRPRRTLQKKIEEIAAKYKHSVVKKCCYDGACVNNDETCEQRAARISLGPRCIKAFTECCVVASQLRANISHKDMQLGRLHMKTLLPVSKPEIRSYFPESWLWEVHLVPRRKQLQFALPDSLTTWEIQGVGISNTGICVADTVKAKVFKDVFLEMNIPYSVVRGEQIQLKGTVYNYRTSGMQFCVKMSAVEGICTSESPVIDHQGTKSSKCVRQKVEGSSSHLVTFTVLPLEIGLHNINFSLETWFGKEILVKTLRVVPEGVKRESYSGVTLDPRGIYGTISRRKEFPYRIPLDLVPKTEIKRILSVKGLLVGEILSAVLSQEGINILTHLPKGSAEAELMSVVPVFYVFHYLETGNHWNIFHSDPLIEKQKLKKKLKEGMLSIMSYRNADYSYSVWKGGSASTWLTAFALRVLGQVNKYVEQNQNSICNSLLWLVENYQLDNGSFKENSQYQPIKLQGTLPVEARENSLYLTAFTVIGIRKAFDICPLVKIDTALIKADNFLLENTLPAQSTFTLAISAYALSLGDKTHPQFRSIVSALKREALVKGNPPIYRFWKDNLQHKDSSVPNTGTARMVETTAYALLTSLNLKDINYVNPVIKWLSEEQRYGGGFYSTQDTINAIEGLTEYSLLVKQLRLSMDIDVSYKHKGALHNYKMTDKNFLGRPVEVLLNDDLIVSTGFGSGLATVHVTTVVHKTSTSEEVCSFYLKIDTQDIEASHYRGYGNSDYKRIVACASYKPSREESSSGSSHAVMDISLPTGISANEEDLKALVEGVDQLFTDYQIKDGHVILQLNSIPSSDFLCVRFRIFELFEVGFLSPATFTVYEYHRPDKQCTMFYSTSNIKIQKVCEGAACKCVEADCGQMQEELDLTISAETRKQTACKPEIAYAYKVSITSITVENVFVKYKATLLDIYKTGEAVAEKDSEITFIKKVTCTNAELVKGRQYLIMGKEALQIKYNFSFRYIYPLDSLTWIEYWPRDTTCSSCQAFLANLDEFAEDIFLNGC

SEQ ID NO: 49298 - protein, 1039 aa, Homo sapiens
MEEEVVIKPVHSSILGQDYCFEVTTSSGSKCFSCRSAAERDKWMENLRRAVHPNKDNSRRVEHILKLWVIEAKDLPAKKKYLCELCLDDVLYARTTGKLKTDNVFWGEHFEFHNLPPLRTVTVHLYRETDKKKKKERNSYLGLVSLPAASVAGRQFVEKWYPVVTPNPKGGKGPGPMIRIKARYQTITILPMEMYKEFAEHITNHYLGLCAALEPILSAKTKEEMASALVHILQSTGKVKDFLTDLMMSEVDRCGDNEHLIFRENTLATKAIEEYLKLVGQKYLQDALGEFIKALYESDENCEVDPSKCSAADLPEHQGNLKMCCELAFCKIINSYCVFPRELKEVFASWRQECSSRGRPDISERLISASLFLRFLCPAIMSPSLFNLLQEYPDDRTARTLTLIAKVTQNLANFAKFGSKEEYMSFMNQFLEHEWTNMQRFLLEISNPETLSNTAGFEGYIDLGRELSSLHSLLWEAVSQLEQSIVSKLGPLPRILRDVHTALSTPGSGQLPGTNDLASTPGSGSSSISAGLQKMVIENDLSGLIDFTRLPSPTPENKDLFFVTRSSGVQPSPARSSSYSEANEPDLQMANGGKSLSMVDLQDARTLDGEAGSPAGPDVLPTDGQAAAAQLVAGWPARATPVNLAGLATVRRAGQTPTTPGTSEGAPGRPQLLAPLSFQNPVYQMAAGLPLSPRGLGDSGSEGHSSLSSHSNSEELAAAAKLGSFSTAAEELARRPGELARRQMSLTEKGGQPTVPRQNSAGPQRRIDQPPPPPPPPPPAPRGRTPPNLLSTLQYPRPSSGTLASASPDWVGPSTRLRQQSSSSKGDSPELKPRAVHKQGPSPVSPNALDRTAAWLLTMNAQLLEDEGLGPDPPHRDRLRSKDELSQAEKDLAVLQDKLRISTKKLEEYETLFKCQEETTQKLVLEYQARLEEGEERLRRQQEDKDIQMKGIISRLMSVEEELKKDHAEMQAAVDSKQKIIDAQEKRIASLDAANARLMSALTQLKERYSMQARNGISPTNPTKLQITENGEFRNSSNC

SEQ ID NO: 49299 - protein, 129 aa, Homo sapiens
MLCRWEEKDPRRCLEEGKLVNKCALDFFRQIKRHCAEPFTEYWTCIDYTGQQLFRHCRKQQAKFDECVLDKLGWVRPDLGELSKVTKVKTDRPLPENPYHSRPRPDPSPEIEGDLQPATHGSRFYFWTK

SEQ ID NO: 49300 - protein, 171 aa, Homo sapiens
MKSVIEALKDNFNKTLNIRTSPGSLDKIAVVTADGKLALNQISQISMKSPQLILVNMASFPECTAAAIKAIRESGMNLNPEVEGTLIRVPIPQVTREHREMLVKLAKQNTNKAKDSLRKVRTNSMNKLKKSKDTVSEDTIRLIEKQISQMADDTVAELDRHLAVKTKELLG

SEQ ID NO: 49301 - protein, 996 aa, Homo sapiens [sequence omitted]

SEQ ID NO: 49302 - protein, 784 aa, Homo sapiens
MLYERRILIICSKLSTLTACIHGSAAMLYPMYWQHVYIPVLPPHLLDYCCAPMPYLIGIHLSLMEKVRNMALDDVVILNVDTNTLETPFDDLQSLPNDVISSLKNRLKKVSTTTGDGVARAFLKAQAAFFGSYRNALKIEPKGSGAILNTVKTKANPAMKTVYKFAKDHAKMGIKEVKNRLKQKDIAENGCAPTPEEQLPKTAPSPLVEAKDPKLREDRRPITVHFGQVRPPRPHVVKRPKSNIAVEGRRTSVPSPEHLVKPLRHYAVFLSEDSSDDECQREEGPSSGFTESFFFSAPFEWPQPYRTLRESDSAEGDEAESPEQQVRKSTGPVPAPPDRAASIDLLEDVFSNLDMEAALQPLGQAKSLEDLRAPKDLREQPGTFDYQRLDLGGSERSRGVTVALKLTHPYNKLWSLGQDDMAIPSKPPAASPEKPSALLGNSLALPRRPQNRDSILNPSDKEEVPTPTLGSITIPRPQGRKTPELGIVPPPPIPRPAKLQAAGAALGDVSERLQTDRDRRAALSPGLLPGVVPQGPTELLQPLSPGPGAAGTSSDALLALLDPLSTAWSGSTLPSRPATPNVATPFTPQFSFPPAGTPTPFPQPPLNPFVPSMPAAPPTLPLVSTPAGPFGAPPASLGPAFASGLLLSSAGFCAPHRSQPNLSALSMPNLFGQMPMGTHTSPLQPLGPPAVAPSRIRTLPLARSSARAAETKQGLALRPGDPPLLPPRPPQGLEPTLQPSAPQQARDPFEDLLQKTKQDVSPSPALAPAPDSVEQLRKQWETFE

SEQ ID NO: 49303 - protein, 306 aa, Homo sapiens
MPHGGSSNNLCHTLGPVHPPDPQRHPNTLSFRCSLADFQIEKKIGRGQFSEVYKATCLLDRKTVALKKVQIFEMMDAKARQDCVKEIGLLKQLNHPNIIKYLDSFIEDNELNIVLELADAGDLSQMIKYFKKQKRLIPERTVWKYFVQLCSAVEHMHSRRVMHRDIKPANVFITATGVVKLGDLGLGRFFSSETTAAHSLVGTPYYMSPERIHENGYNFKSDIWSLGCLLYEMAALQSPFYGDKMNLFSLCQKIEQCDYPPLPGEHYSEKLRELVSMCICPDPHQRPDIGYVHQVAKQMHIWMSST

SEQ ID NO: 49304 - protein, 646 aa, Homo sapiens [sequence omitted]

SEQ ID NO: 49305 - protein, 5 aa, Homo sapiens
MKRRK

SEQ ID NO: 49306 - protein, 130 aa, Homo sapiens [sequence omitted]

SEQ ID NO: 49307 - protein, 333 aa, Homo sapiens
MTVAEIPVFLYTTFGQSAFSQLRLTPGLRKVLFATALGTVALALAAHQLKRRRRRKKQVGPEMGGEQLGTVPLPILLARKVPSVKKGYSSRRVQSPSSKSNDTLSGISSIEPSKHSGSSHSVASMMAVNSSSPTAACSGLWDARGMEESLTTSDGNAESLYMQGMELFEEALQKWEQALSVGQRGDSGSTPMPRDGLRNPETASEPLSEPESQRKEFAEKLESLLHRAYHLQEEFGSTFPADSMLLDLERTLMLPLTEGSLRLRADDEDSLTSEDSFFSATELFESLQTGDYPIPLSRPAAAYEEALQLVKEGRVPCRTLRAPKASWRATRRC

SEQ ID NO: 49308 - protein, 323 aa, Homo sapiens
MPASAADFGPLQLGGGGDAEAREPAARHQLHQLHQLHQLHLQQQLHQHQHPAPRGCAAAAAAGAPAGGAGALSELPGCAALQPPHGAPHRGQPLEPLQPGPAPLPLPLPPPAPAALCPRDPRAPAACSAPPGAAPPAAAASPPASPAPASSPGFYRGAYPTPSDFGLHCSSQTTVLDLDTHVVTTVENGYLHQDCCASAHCPCCGQGAPGPGLASAAGCKRKYYPGQEEEEDDEEDAGGLGAEPPGGAPFAPCKRARFEDFCPDSSPDASNISNLISIFGSGFSGLVSRQPDSSEQPPPLNGQLCAKQALASLGAWTRAIVAF

SEQ ID NO: 49309 - protein, 59 aa, Homo sapiens
MTAFGLGIPTFLVMQPSGSQPRFPALTQNGVALVRTPLTSVYLRVREPAHMTVWRKFFP

SEQ ID NO: 49310 - protein, 58 aa, Homo sapiens
MTAFGLGIPTFLVMQPSGSQPRFPALTQNGVALVRTPLTSVYLRVRICRVLGPRSQPS

SEQ ID NO: 49311 - protein, 91 aa, Homo sapiens
MTAFGLGIPTFLVMQPSGSQPRFPALTQNGVALVRTPLTSVYLRVRPILPAGLCLGVTLPELAPTTVATVMLMCDCCQEPAHMTVWRKFFP

SEQ ID NO: 49312 - protein, 346 aa, Homo sapiens
MAELGLTRAADVLLRHGANLNFEDPVTYYTALHIAVLRNQPDMVELLVHHGADVNRRDRIHESSPLDLASEEPERLPCLQRLLDLGADVNAADKHGKTALLHALASSDGVQIHNTENIRLLLEGGADVKATTKDGDTVFTCIIFLLGETVGGDKEEAQMINRFCFQVTRLLLAHGADPSECPAHESLTHICLKSFKLHFPLLRFLLESGAAYNCSLHGASCWSGFHIIFERLCSHPGCTEDESHADLLRKAETVLDLMVTNSQKLQLPENFDIHPVGSLAEKIQALHFSLRQLESYPPPLKHLCRVAIRLYLQPWPVDVKVKALPLPDRLKWYLLSEHSGSVEDDI

SEQ ID NO: 49313 - protein, 513 aa, Homo sapiens
MASQIIVDLARYVQELKQERKSNFHDGRKAQQHIETCWKQLESSKRRFERDCKEADRAQQYFEKMDADINVTKADVEKARQQAQIRHQMAEDSKADYSSILQKFNHEQHEYYHTHIPNIFQKIQEMEERRIVRMGESMKTYAEVDRQVIPIIGKCLDGIVKAAESIDQKNDSQLVIEAYKSGFEPPGDIEFEDYTQPMKRTVSDNSLSNSRGEGKPDLKFGGKSKGKLWPFIKKNKPPPPPPASASPSAVPNGPQSPKQQKEPLSHRFNEFMTSKPKIHCFRSLKRGGATPEDFSNLPPEQRRKKLQQKVDELNKEIQKEMDQRDAITKMKDVYLKNPQMGDPASLDHKLAEVSQNIEKLRVETQKFEAWLAEVEGRLPARSEQARRQSGLYDSQNPPTVNNCAQDRESPDGSYTEEQSQESEMKVLATDFDDEFDDEEPLPAIGTCKALYTFEGQNEGTISVVEGETLYVIEEDKGDGWTRIRRNEDEEGYVPTSYVEVCLDKNAKGAKTYI

SEQ ID NO: 49314 - protein, 2077 aa, Homo sapiens
MKDFQFRALKKVRIFDSPEELPKERSSLLAVSNKYGLVFAGGASGLQIFPTKNLLIQNKPGDDPNKIVDKVQGLLVPMKFPIHHLALSCDNLTLSACMMSSEYGSIIAFFDVRTFSNEAKQQKRPFAYHKLLKDAGGMVIDMKWNPTVPSMVAVCLADGSIAVLQVTETVKVCATLPSTVAVTSVCWSPKGKQLAVGKQNGTVVQYLPTLQEKKVIPCPPFYESDHPVRVLDVLWIGTYVFAIVYAAADGTLETSPDVVMALLPKKEEKHPEIFVNFMEPCYGSCTERQHHYYLSYIEEWDLVLAASAASTEVSILARQSDQINWESWLLEDSSRAELPVTDKSDDSLPMGVVVDYTNQVEITISDEKTLPPAPVLMLLSTDGVLCPFYMINQNPGVKSLIKTPERLSLEGERQPKSPGSTPTTPTSSQAPQKLDASAAAAPASLPPSSPAAPIATFSLLPAGGAPTVFSFGSSSLKSSATVTGEPPSYSSGSDSSKAAPGPGPSTFSFVPPSKASLAPTPAASPVAPSAASFSFGSSGFKPTLESTPVPSVSAPNIAMKPSFPPSTSAVKVNLSEKFTAAATSTPVSSSQSAPPMSPFSSASKPAASGPLSHPTPLSAPPSSVPLKSSVLPSPSGRSAQGSSSPVPSMVQKSPRITPPAAKPGSPQAKSLQPAVAEKQGHQWKDSDPVMAGIGEEIAHFQKELEELKARTSKACFQVGTSEEMKMLRTESDDLHTFLLEIKETTESLHGDISSLKTTLLEGFAGVEEAREQNERNRDSGYLHLLYKRPLDPKSEAQLQEIRRLHQYVKFAVQDVNDVLDLEWDQHLEQKKKQRHLLVPERETLFNTLANNREIINQQRKRLNHLVDSLQQLRLYKQTSLWSLSSAVPSQSSIHSFDSDLESLCNALLKTTIESHTKSLPKVPAKLSPMKQAQLRNFLAKRKTPPVRSTAPASLSRSAFLSQRYYEDLDEVSSTSSVSQSLESEDARTSCKDDEAVVQAPRHAPVVRTPSIQPSLLPHAAPFAKSHLVHGSSPGVMGTSVATSASKIIPQGADSTMLATKTVKHGAPSPSHPISAPQAAAAAALRRQMASQAPAVNTLTESTLKNVPQVVNVQELKNNPATPSTAMGSSVPYSTAKTPHPVLTPVAANQAKQGSLINSLKPSGPTPASGQLSSGDKASGTAKIETAVTSTPSASGQFSKPFSFSPSGTGFNFGIITPTPSSNFTAAQGATPSTKESSQPDAFSSGGGSKPSYEAIPESSPPSGITSASNTTPGEPAASSSRPVAPSGTALSTTSSKLETPPSKLGELLFPSSLAGETLGSFSGLRVGQADDSTKPTNKASSTSLTSTQPTKTSGVPSGFNFTAPPVLGKHTEPPVTSSATTTSVAPPAATSTSSTAVFGSLPVTSAGSSGVISFGGTSLSAGKTSFSFGSQQTNSTVPPSAPPPTTAATPLPTSFPTLSFGSLLSSATTPSLPMSAGRSTEEATSSALPEKPGDSEVSASAASLLEEQQSAQLPQAPPQTSDSVKKEPVLAQPAVSNSGTAASSTSLVALSAEATPATTGVPDARTEAVPPASSFSVPGQTAVTAAAISSAGPVAVETSSTPIASSTTSIVAPGPSAEAAAFGTVTSGSSVFAQPPAASSSSAFNQLTNNTATAPSATPVFGQVAASTAPSLFGQQTGSTASTAAATPQVSSSGFSSPAFGTTAPGVFGQTTFGQASVFGQSASSAASVFSFSQPGFSSVPAFGQPASSTPTSTSGSVFGAASSTSSSSSFSFGQSSPNTGGGLFGQSNAPAFGQSPGFGQGGSVFGGTSAATTTAATSGFSFCQASGFGSSNTGSVFGQAASTGGIVFGQQSSSSSGSVFGSGNTGRGGGFFSGLGGKPSQDAANKNPFSSASGGFGSTATSNTSNLFGNSGAKTFGGFASSSFGEQKPTGTFSSGGGSVASQGFGFSSPNKTGGFGAAPVFGSPPTFGGSPGFGGVPAFGSAPAFTSPLGSTGGKVFGEGTAAASAGGFGFGSSSNTTSFGTLASQNAPTFGSLSQQTSGFGTQSSGFSGFGSGTGGFSFGSNNSSVQGFGGWRS

SEQ ID NO: 49315 - protein, 160 aa, Homo sapiens
MVKLIGITGHGIPWIGGTILCLVKSSTLAGQEVLMNLLLALLLDIMTVAGVQKLIKRRGPYETSPSLLDYLTMDIYAFPAGHASRAAMVSKFFLSHLVLAVPLRVLLVLWALCVGLSRVMIGRHHVTDVLSGFVIGYLQFRLVELVWMPSSTCQMLISAW

SEQ ID NO: 49316 - protein, 1147 aa, Homo sapiens
MLGVRDDVTAVFKENLNSDRGPMLVNTLVDYYLETSSQPALHILTTLQEPHDKHLLDRINEYVGKAATRLSILSLLGHVIRLQPSWKHKLSQAPLLPSLLKCLKMDTDVVVLTTGVLVLITMLPMIPQSGKQHLLDFFDIFGRLSSWCLKKPGHVAEVYLVHLHASVYALFHRLYGMYPCNFVSFLRSHYSMKENLETFEEVVKPMMEHVRIHPELVTGSKDHELDPRRWKRLETHDVVIECAKISLDPTEASYEDGYSVSHQISARFPHRSADVTTSPYADTQNSYGCATSTPYSTSRLMLLNMPGQLPQTLSSPSTRLITEPPQATLWSPSMVCGMTTPPTSPGNVPPDLSHPYSKVFGTTAGGKGTPLGTPATSPPPAPLCHSDDYVHISLPQATVTPPRKEERMDSARPCLHRQHHLLNDRGSEEPPGSKGSVTLSDLPGFLGDLASEEDSIEKDKEEAAISRELSEITTAEAEPVVPRGGFDSPFYRDSLPGSQRKTHSAASSSQGASVNPEPLHSSLDKLGPDTPKQAFTPIDLPCGSADESPAGDRECQTSLETSIFTPSPCKIPPPTRVGFGSGQPPPYDHLFEVALPKTAHHFVIRKTEELLKKAKGNTEEDGVPSTSPMEVLDRLIQQGADAHSKELNKLPLPSKSVDWTHFGGSPPSDEIRTLRDQLLLLHNQLLYERFKRQQHALRNRRLLRKVIKAAALEEHNAAMKDQLKLQEKDIQMWKVSLQKEQARYNQLQEQRDTMVTKLHSQIRQLQHDREEFYNQSQELQTKLEDCRNMIAELRIELKKANNKVCHTELLLSQVSQKLSNSESVQQQMEFLNRQLLVLGEVNELYLEQLQNKHSDTTKEVEMMKAAYRKELEKNRSHVLQQTQRLDTSQKRILELESHLAKKDHLLLEQKKYLEDVKLQARGQLQAAESRYEAQKRITQVFELEILDLYGRLEKDGLLKKLEEEKAEAAEAAEERLDCCNDGCSDSMVGHNEEASGHNGETKTPRPSSARGSSGSRGGGGSSSSSSELSTPEKPPHQRAGPFSSRWETTMGEASASIPTTVGSLPSSKSFLGMKARELFRNKSESQCDEDGMTSSLSESLKTELGKDLGVEAKIPLNLDGPHPSPPTPDSVGQLHIMDYNETHHEHS

SEQ ID NO: 49317 - protein, 394 aa, Homo sapiens [sequence omitted]

SEQ ID NO: 49318 - protein, 334 aa, Homo sapiens
MKDYLYGRLINFEKRRKEFEVIAQIKLLQSACNNYSIAPDEQFGAWFRAVERLSETESYNLSCELEPPSESASNTLRTKKNTAIVKRWSDRQAPSTELSTSGSSHSKSCDQLRCGPYLSSGDIADALSVHSAGSSSSDVEEINISFVPESPDGQEKKFWESASQSSPETSGISSASSSTSSSSASTTPVAATRTHKRSVSGLCNSSSALPLYNQQVGDCCIIRVSLDVDNGNMYKSILVTSQDKAPAVIRKAMDKHNLEEEEPEDYELLQILSDDRKLKIPENANVFYAMNSTANYDFVLKKRTFTKGVKVKHGASSTLPRMKQKGLKIAKGIF

SEQ ID NO: 49319 - protein, 279 aa, Homo sapiens
MVTVPSAQAAGAQAHTAADTHTLVGAHRLRGNLQPRASAAHLPATEPDHWGHGVCRGESFLESAEEFFMRGYRVHYYIFTDNPAAVPGVPLGPHRLLSSIPIQGHSHWEETSMRRMETISQHIAKRAHREVDYLFCLDVDMVFRNPWGPETLGDLVAAIHPSYYAVPRQQFPYERRRVSTAFVADSEGDFYYGGAVFGGQVARVYEFTRGCHMAILADKANGIMAAWREESHLNRHFISNKPSKVLSPEYLWDDRKPQPPSLKLIRFSTLDKDISCLRS

SEQ ID NO: 49320 - protein, 90 aa, Homo sapiens
MTDLYPPELFTRKDLGSTEDGDGTDDFLTDKEDEKAKPPREKATDEGRRETTVYRGLVQKRGKKQLGSLKKKFKSHHRKPKSFSSCKQPG

SEQ ID NO: 49321 - protein, 329 aa, Homo sapiens
MGSKKKPKIIQQNKKETSPQVKGEEMPAGKDQEASRGSVPSGSKMDRRAPVPRTKASGTEHNKKGTKERTNGDIVPERGDIEHKKRKAKEAAPAPPTEEDIWFDDVDPADIEAAIGPEAAKIARKQLGQSEGSVSLSLVKEQAFGGLTRALALDCEMVGVGPKGEESMAARVSIVNQYGKCVYDKYVKPTEPVTDYRTAVSGIRPENLKQGEELEVVQKEVAEMLKGRILVGHALHNDLKVLFLDHPKKKIRDTQKYKPFKSQVKSGRPSLRLLSEKILGLQVQQAEHCSIQDAQAAMRLYVMVKKEWESMARDRRPLLTAPDHCSDDA

SEQ ID NO: 49322 - protein, 150 aa, Homo sapiens [sequence omitted]

SEQ ID NO: 49323 - protein, 408 aa, Homo sapiens [sequence omitted]

SEQ ID NO: 49324 - protein, 436 aa, Homo sapiens [sequence omitted]

SEQ ID NO: 49325 - protein, 1161 aa, Homo sapiens
MLISTLQRDGAARGTSDERAAQRGHRAEGCHDARPAAKPTVHKEPPALAVCGLVADFDPMGEEETTDFGPLVLDSDSDDSVDRDIEEAIQEYLKAKSGAAQPGAGGAQPGAAQPSRAAGGGSRCKPEPAHGSAPTALCPPKLVPGSGGGPGSQVGSSKDQGSASPVSVSSDDSFEQSIRAEIEQFLNEKRQHETQKCDGSVEKKPDTNENSAKSLLKSHQEPPTKVVHRQGLLGVQKEFAFRKPPRLAKMNVQPRSLRSKVTTTQENEGSTKPATPCRPSEAAQNKGGIKRSASAARRGKRVMSAAQASEASDSSSDDGIEEAIQLYQLQKTRKEADGDLPQRVQLREERAPDPPAHSTSSATKSALPETHRKTPSKKKLVATKTMDPGPGGLDTDHAPKLLKETKAPPPASPASRSEFVERSSCRADTSAELMCAEAILDISKTILPAPVEGSDGSLSASPLFYSPNVPSRSDGDSSSVDSDDSIEQEIRTFLALKAQSGSLLARGESCPQAAQGPLLPPGLNSQTGGHKTPLSKTPDPLLGCKRKRRGGGHVRPSTPKKMQEVVKDGSQDADHSQGRAEPGHERRDLPIQGKASEALGGEGTARGPGDTRMSQGQGKTDEARRLDEKESSEDKSSSLDSDEDLDTAIKDLLRSKRKLKKRCREPRAACRKKVRFSTAQTHFLEQLGGLRRDWKDRGPPVLKSCLSKSKRDSGEGPGKKPPSVFGSTAERMRQEGAASQDAALAFRVRRPASASASEGNPFPRESQGPAPSPGSLSDDSSSVDSNDSIELEIRKFLAEKAKESVSSSEVQAEGPTALGTGGPARPEVLCRKEPAPPPGVCTRSQRARGVPHLAEGLRGTESAGAQGTAGLFSQGGKGLPAAPARGDPVPPRSTSGGVSAKGLSVSRRNVYVHKDQSPRGAEPAAKSAFGQLPSCATAGTEAGGARGTFHMGCGSPSFLTPSPGAERDAGAQADRTPPWSDFAHQSRLPSPWVLRSEGRDAVWRGGVGSERDKGSEGPARGLPSLPLAGFSPLLSTQLFHFGKGVSWGGRQAGLFSPHLGLPLQGPSFSAFREAQAGPSPVFGSPHLLAKKDGGPWPTRKAQAGLSLHDRRSSGSEESILDLRYRRRVNRDDQEQDALGSDASDFSDTSTEDSGGSSVVKV

SEQ ID NO: 49326 - protein, 584 aa, Homo sapiens
MLHIEIPNFGNTVLGCLNEQRLLGLYCDVSIVVKGQAFKAHRAVLAASSLYFRDLFSGNSKSAFELPGSVPPACFQQILSFCYTGRLTMTASEQLVVMYTAGFLQIQHIVERGTDLMFKVSSPHCDSQTAVIEDAGSEPQSPCNQLQPAAAAAAPYVVSPSVPIPLLTRVKHEAMELPPAGPGLAPKRPLETGPRDGVAVAAGAAVAAGTAPLKLPRVSYYGVPSLATLIPGIQQMPYPQGERTSPGASSLPTTDSPTSYHNEEDEEDDEAYDTMVEEQYGQMYIKASGSYAVQEKPEPVPLESRSCVLIRRDLVALPASLISQIGYRCHPKLYSEGDPGEKLELVAGSGVYITRGQLMNCHLCAGVKHKVLLRRLLATFFDRNTLANSCGTGIRSSTSDPSRKPLDSRVLNAVKLYCQNFAPSFKESEMNVIAADMCTNARRVRKRWLPKIKSMLPEGVEMYRTVMGSAAASVPLDPEFPPAAAQVFEQRIYAERRGDAATIVALRTDAVNVDLSAAANPAFDAGEEVDGAGSVIQEVAAPEPLPADGQSPPQPFEQGGGGPSRPQTPAAAARRPEGTYAGTL

SEQ ID NO: 49327 - protein, 18 aa, Homo sapiens
MTDLKIWKRQIHSLLESF

SEQ ID NO: 49328 - protein, 2323 aa, Homo sapiens
MAGPPPAGNPRSVFWASSPYRRRANNNAAVAPTTCPLQPVTDPFAFSRQALQSTPLGSSSKSSPPVLQGPAPAGFSQHPGLLVPHTHARDSSQGPCEPLPGPLTQPRAHASPFSGALTPSAPPGPEMNRSAEVGPSSEPEVQTLPYLPHYIPGVDPETSHGGHPHGNMPGLDRPLSRQNPHDGVVTPAASPSLPQPGLQMPGQWGPVQGGPQPSGQHRSPCPEGPVPSGVPCATSVPHFPTPSILHQGPGHEQHSPLVAPPAALPSDGRDEVSHLQSGSHLANNSDPESTFRQNPRIVNHWASPELRQNPGVKNEHRPASALVNPLARGDSPENRTHHPLGAGAGSGCAPLEADSGASGALAMFFQGGETENEENLSSEKAGLSGQADFDDFCSSPGLGRPPAPTHVGAGSLCQALLPGPSNEAAGDVWGDTASTGVPDASGSQYENVENLEFVQNQEVLPSEPLNLDPSSPSDQFRYGPLPGPAVPRHGAVCHTGAPDATLHTVHPDSVSSSYSSRSHGRLSGSARPQELVGTFIQQEVGKPEDEASGSFFKQIDSSPVGGETDETTVSQNYRGSVSQPSTPSPPKPTGIFQTSANSSFEPVKSHLVGVKPFEADRANVVGEVRETCVRQKQCRPAAALPDASPGNLEQPPDNMETLCAPQVCPLPLNSTTEAVHMLPHAGAPPLDTVYPAPEKRPSARTQGPVKCESPATTLWAQSELPDFGGNVLLAPAAPALYVCAKPQPPVVQPPEEAMSGQQSRNPSSAAPVQSRGGIGASENLENPPKMGEEEALQSQASSGYASLLSSPPTESLQNPPVLIAQPDHSYNLAQPINFSVSLSNSHEKNQSWREALVGDRPAVSSWALGGDSGENTSLSGIPTSSVLSLSLPSSVAQSNFPQGSGASEMVSNQPANLLVQPPSQPVPENLVPESQKDRKAGSALPGFANSPAGSTSVVLVPPAHGTLVPDGNKANHSSHQEDTYGALDFTLSRTLENPVNVYNPSHSDSLASQQSVASHPRQSGPGAPNLDRFYQQVTKDAQGQPGLERAQQELVPPQQQASPPQLPKAMFSELSNPESLPAQGQAQNSAQSPASLVLVDAGQQLPPRPPQSSSVSLVSSGSGQAAVPSEQPWPQPVPALAPGPPPQDLAAYYYYRPLYDAYQPQYSLPYPPEPGAASLYYQDVYSLYEPRYRPYDGAASAYAQNYRYPEPERPSSRASHSSERPPPRQGYPEGYYSSKSGWSSQSDYYASYYSSQYDYGDPGHWDRYHYSARVRDPRTYDRRYWCDAEYDAYRREHSAFGDRPEKRDNNWRYDPRFTGSFDDDPDPHRDPYGEEVDRRSVHSEHSARSLHSAHSLASRRSSLSSHSHQSQIYRSHNVAAGSYEAPLPPGSFHGDFAYGTYRSNFSSGPGFPEYGYPADTVWPAMEQVSSRPTSPEKFSVPHVCARFGPGGQLIKVIPNLPSEGQPALVEVHSMEALLQHTSEQEEMRAFPGPLAKDDTHKVDVINFAQNKAMKCLQNENLIDKESASLLWNFIVLLCRQNGTVVGTDIAELLLRDHRTVWLPGKSPNEANLIDFTNEAVEQVEEEESGEAQLSFLTGGPAAAASSLERETERFRELLLYGRKKDALESAMKNGLWGHALLLASKMDSRTHARVMTRFANSLPINDPLQTVYQLMSGRMPAASTCCGDEKWGDWRPHLAMVLSNLNNNMDVESRTMATMGDTLASRGLLDAAHFCYLMAQAGFGVYTKKTTKLVLIGSNHSLPFLKFATNEAIQRTEAYEYAQSLGAETCPLPSFQVFKFIYSCRLAEMGLATQAFHYCEAIAKSILTQPHLYSPVLISQLVQMASQLRLFDPQLKEKPEEESLAAPTWLVHLQQVERQIKEGAGVWHQDGALPQQCPGTPSSEMEQLDRPGLSQPGALGIANPLLAVPAPSPEHSSPSVRLLPSAPQTLPDGPLASPARVPMFPVPLPPGPLEPGPGCVTPGPALGFLEPSGPGLPPGVPPLQERRHLLQEARSPDPGIVPQEAPVGNSLSELSEENFDGKFANLTPSRTVPDSEAPPGWDRADSGPTQPPLSLSPAPETKRPGQAAKKETKEPKKGESWFFRWLPGKKKTEAYLPDDKNKSIVWDEKKNQWVNLNEPEEEKKAPPPPPTSMPKTVQAAPPALPGPPGAPVNMYSRRAAGTRARYVDVLNPSGTQRSEPALAPADFVAPLAPLPIPSNLFVPTPVSSVRPQGRSGRNDGLLALSSPDAEEPQLPDGTGREGPAAARGLANPEPAPEPKAPGDLPAAGGPPSGAMPFYNPAQLAQACATSGSSRLGRIGQRKHLVLN

SEQ ID NO: 49329 - protein, 2346 aa, Homo sapiens
MAGPPPAGNPRSVFWASSPYRRRANNNAAVAPTTCPLQPVTDPFAFSRQALQSTPLGSSSKSSPPVLQGPAPAGFSQHPGLLVPHTHARDSSQGPCEPLPGPLTQPRAHASPFSGALTPSAPPGPEMNRSAEVGPSSEPEVQTLPYLPHYIPGVDPETSHGGHPHGNMPGLDRPLSRQNPHDGVVTPAASPSLPQPGLQMPGQWGPVQGGPQPSGQHRSPCPEGPVPSGVPCATSVPHFPTPSILHQGPGHEQHSPLVAPPAALPSDGRDEVSHLQSGSHLANNSDPESTFRQNPRIVNHWASPELRQNPGVKNEHRPASALVNPLARGDSPENRTHHPLGAGAGSGCAPLEADSGASGALAMFFQGGETENEENLSSEKAGLSGQADFDDFCSSPGLGRPPAPTHVGAGSLCQALLPGPSNEAAGDVWGDTASTGVPDASGSQYENVENLEFVQNQEVLPSEPLNLDPSSPSDQFRYGPLPGPAVPRHGAVCHTGAPDATLHTVHPDSVSSSYSSRSHGRLSGSARPQELVGTFIQQEVGKPEDEASGSFFKQIDSSPVGGETDETTVSQNYRGSVSQPSTPSPPKPTGIFQTSANSSFEPVKSHLVGVKPFEADRANVVGEVRETCVRQKQCRPAAALPDASPGNLEQPPDNMETLCAPQVCPLPLNSTTEAVHMLPHAGAPPLDTVYPAPEKRPSARTQGPVKCESPATTLWAQSELPDFGGNVLLAPAAPALYVCAKPQPPVVQPPEEAMSGQQSRNPSSAAPVQSRGGIGASENLENPPKMGEEEALQSQASSGYASLLSSPPTESLQNPPVLIAQPDHSYNLAQPINFSVSLSNSHEKNQSWREALVGDRPAVSSWALGGDSGENTSLSGIPTSSVLSLSLPSSVAQSNFPQGSGASEMVSNQPANLLVQPPSQPVPENLVPESQKDRKAGSALPGFANSPAGSTSVVLVPPAHGTLVPDGNKANHSSHQEDTYGALDFTLSRTLENPVNVYNPSHSDSLASQQSVASHPRQSGPGAPNLDRFYQQVTKDAQGQPGLERAQQELVPPQQQASPPQLPKAMFSELSNPESLPAQGQAQNSAQSPASLVLVDAGQQLPPRPPQSSSVSLVSSGSGQAAVPSEQPWPQPVPALAPGPPPQDLAAYYYYRPLYDAYQPQYSLPYPPEPGAASLYYQDVYSLYEPRYRPYDGAASAYAQNYRYPEPERPSSRASHSSERPPPRQGYPEGYYSSKSGWSSQSDYYASYYSSQYDYGDPGHWDRYHYSARVRDPRTYDRRYWCDAEYDAYRREHSAFGDRPEKRDNNWRYDPRFTGSFDDDPDPHRDPYGEEVDRRSVHSEHSARSLHSAHSLASRRSSLSSHSHQSQIYRSHNVAAGSYEAPLPPGSFHGDFAYGTYRSNFSSGPGFPEYGYPADTVWPAMEQVSSRPTSPEKFSVPHVCARFGPGGQLIKVIPNLPSEGQPALVEVHSMEALLQHTSEQEEMRAFPGPLAKDDTHKVDVINFAQNKAMKCLQNENLIDKESASLLWNFIVLLCRQNGTVVGTDIAELLLRDHRTVWLPGKSPNEANLIDFTNEAVEQVEEEESGEAQLSFLTGGPAAAASSLERETERFRELLLYGRKKDALESAMKNGLWGHALLLASKMDSRTHARVMTRFANSLPINDPLQTVYQLMSGRMPAASTCCGDEKWGDWRPHLAMVLSNLNNNMDVESRTMATMGDTLASRGLLDAAHFCYLMAQAGFGVYTKKTTKLVLIGSNHSLPFLKFATNEAIQRTEAYEYAQSLGAETCPLPSFQVFKFIYSCRLAEMGLATQAFHYCEAIAKSILTQPHLYSPVLISQLVQMASQLRLFDPQLKEKPEEESLAAPTWLVHLQQVERQIKEGAGVWHQDGALPQQCPGTPSSEMEQLDRPGLSQPGALGIANPLLAVPAPSPEHSSPSVRLLPSAPQTLPDGPLASPARVPMFPVPLPPGPLEPGPGCVTPGPALGFLEPSGPGLPPGVPPLQERRHLLQEARSPDPGIVPQEAPVGNSLSELSEENFDGKFANLTPSRTVPDSEAPPGWDRADSGPTQPPLSLSPAPETKRPGQAAKKETKEPKKGESWFFRWLPGKKKTEAYLPDDKNKSIVWDEKKNQWVNLNEPEEEKKAPPPPPTSMPKTVQAAPPALPGPPGAPVNMYSRRAAGTRARYVDVLNPSGTQRSEPALAPADFVAPLAPLPIPSNLFVPTPDAEEPQLPDGTGREGPAAARGLANPEPAPEPKVLSSAASLPGSELPSSRPEGSQGGELSRCSSMSSLSREVSQHFNQAPGDLPAAGGPPSGAMPFYNPAQLAQACATSGSSRLGRIGQRKHLVLN

SEQ ID NO: 49330 - protein, 245 aa, Homo sapiens [sequence omitted]

SEQ ID NO: 49331 - protein, 244 aa, Homo sapiens [sequence omitted]

SEQ ID NO: 49332 - protein, 475 aa, Homo sapiens
MPSLQPVVMCVMKHLPKVPEKKLKLVMADKELYRACAVEVKRQIWQDNQALFGDEVSPLLKQYILEKESALFSTELSVLHNFFSPSPKTRRQGEVVQRLTRMVGKNVKLYDMVLQFLRTLFLRTRNVHYCTLRAELLMSLHDLDVGEICTVDPCHKFTWCLDACIRERFVDSKRARELQGFLDGVKKGQEQVLGDLSMILCDPFAINTLALSTVRHLQELVGQETLPRDSPDLLLLLRLLALGQGAWDMIDSQVFKEPKMEVELITRFLPMLMSFLVDDYTFNVDQKLPAEEKAPVSYPNTLPESFTKFLQEQRMACEVGLYYVLHITKQRNKNALLRLLPGLVETFGDLAFGDIFLHLLTGNLALLADEFALEDFCSSLFDGFFLTASPRKENVHRHALRLLIHLHPRVAPSKLEALQKALEPTGQSGEAVKELYSQLGEKLEQLDHRKPSPAQAAETPALELPLPSVPAPAPL

SEQ ID NO: 49333 - protein, 513 aa, Homo sapiens [sequence omitted]

SEQ ID NO: 49334 - protein, 110 aa, Homo sapiens [sequence omitted]

SEQ ID NO: 49335 - protein, 109 aa, Homo sapiens
MPNPNPNHPSSSGSFSDADLADGVSGGEGKGGSDGGGSHRKEGEEADAPGVIPGIVGAVVVAVAGAISSFIAYQKKKLCFKENEQGEVDMESHRNANAEPAVQRTLLEK

SEQ ID NO: 49336 - protein, 42 aa, Homo sapiens
MVAKIVSPIVSVVVVTLLGAAASYFKLNNRRNCFRTHEPENV

SEQ ID NO: 49337 - protein, 2744 aa, Homo sapiens
MIHGNEIPSIPDGALRDLSSLQVFKFSYNKLRVITGQTLQGLSNLMRLHIDHNKIEFIHPQAFNGLTSLRLLHLEGNLLHQLHPSTFSTFTFLDYFRLSTIRHLYLAENMVRTLPASMLRNMPLLENLYLQGNPWTCDCEMRWFLEWDAKSRGILKCKKDKAYEGGQLCAMCFSPKKLYKHEIHKLKDMTCLKPSIESPLRQNRSRSIEEEQEQEEDGGSQLILEKFQLPQWSISLNMTDEHGNMVNLVCDIKKPMDVYKIHLNQTDPPDIDINATVALDFECPMTRENYEKLWKLIAYYSEVPVKLHRELMLSKDPRVSYQYRQDADEEALYYTGVRAQILAEPEWVMQPSIDIQLNRRQSTAKKVLLSYYTQYSQTISTKDTRQARGRSWVMIEPSGAVQRDQTVLEGGPCQLSCNVKASESPSIFWVLPDGSILKAPMDDPDSKFSILSSGWLRIKSMEPSDSGLYQCIAQVRDEMDRMVYRVLVQSPSTQPAEKDTVTIGKNPGESVTLPCNALAIPEAHLSWILPNRRIINDLANTSHVYMLPNGTLSIPKVQVSDSGYYRCVAVNQQGADHFTVGITVTKKGSGLPSKRGRRPGAKALSRVREDIVEDEGGSGMGDEENTSRRLLHPKDQEVFLKTKDDAINGDKKAKKGRRKLKLWKHSEKEPETNVAEGRRVFESRRRINMANKQINPERWADILAKVRGKNLPKGTEVPPLIKTTSPPSLSLEVTPPFPAISPPSASPVQTVTSAEESSADVPLLGEEEHVLGTISSASMGLEHNHNGVILVEPEVTSTPLEEVVDDLSEKTEEITSTEGDLKGTAAPTLISEPYEPSPTLHTLDTVYEKPTHEETATEGWSAADVGSSPEPTSSEYEPPLDAVSLAESEPMQYFDPDLETKSQPDEDKMKEDTFAHLTPTPTIWVNDSSTSQLFEDSTIGEPGVPGQSHLQGLTDNIHLVKSSLSTQDTLLIKKGMKEMSQTLQGGNMLEGDPTHSRSSESEGQESKSITLPDSTLGIMSSMSPVKKPAETTVGTLLDKDTTTATTTPRQKVAPSSTMSTHPSRRRPNGRRRLRPNKFRHRHKQTPPTTFAPSETFSTQPTQAPDIKISSQVESSLVPTAWVDNTVNTPKQLEMEKNAEPTSKGTPRRKHGKRPNKHRYTPSTVSSRASGSKPSPSPENKHRNIVTPSSETILLPRTVSLKTEGPYDSLDYMTTTRKIYSSYPKVQETLPVTYKPTSDGKEIKDDVATNVDKHKSDILVTGESITNAIPTSRSLVSTMGEFKEESSPVGFPGTPTWNPSRTAQPGRLQTGIPVTTSGENLTDPPLLKELEDVDFTSEFLSSLTVSTPFHQEEAGSSTTLSSIKVEVASSQAETTTLDQDHLETTVAILLSETRPQNHTPTAARMKEPASSSPSTILMSLGQTTTTKPALPSPRISQASRDSKENVFLNYVGNPETEATPVNNEGTQHMSGPNELSTPSSDQDAFNLSTKLELEKQVFGSRSLPRGPDSQRQDGRVHASHQLTRVPAKPILPTATVRLPEMSTQSASRYFVTSQSPRHWTNKPEITTYPSGALPENKQFTTPRLSSTTIPLPLHMSKPSIPSKFTDRRTDQFNGYSKVFGNNNIPEARNPVGKPPSPRIPHYSNGRLPFFTNKTLSFPQLGVTRRPQIPTSPAPVMRERKVIPGSYNRIHSHSTFHLDFGPPAPPLLHTPQTTGSPSTNLQNIPMVSSTQSSISFITSSVQSSGSFHQSSSKFFAGGPPASKFWSLGEKPQILTKSPQTVSVTAETDTVFPCEATGKPKPFVTWTKVSTGALMTPNTRIQRFEVLKNGTLVIRKVQVQDRGQYMCTASNLHGLDRMVVLLSVTVQQPQILASHYQDVTVYLGDTIAMECLAKGTPAPQISWIFPDRRVWQTVSPVEGRITLHENRTLSIKEASFSDRGVYKCVASNAAGADSLAIRLHVAALPPVIHQEKLENISLPPGLSIHIHCTAKAAPLPSVRWVLGDGTQIRPSQFLHGNLFVFPNGTLYIRNLAPKDSGRYECVAANLVGSARRTVQLNVQRAAANARITGTSPRRTDVRYGGTLKLDCSASGDPWPRILWRLPSKRMIDALFSFDSRIKVFANGTLVVKSVTDKDAGDYLCVARNKVGDDYVVLKVDVVMKPAKIEHKEENDHKVFYGGDLKVDCVATGLPNPEISWSLPDGSLVNSFMQSDDSGGRTKRYVVFNNGTLYFNEVGMREEGDYTCFAENQVGKDEMRVRVKVVTAPATIRNKTYLAVQVPYGDVVTVACEAKGEPMPKVTWLSPTNKVIPTSSEKYQIYQDGTLLIQKAQRSDSGNYTCLVRNSAGEDRKTVWIHVNVQPPKINGNPNPITTVREIAAGGSRKLIDCKAEGIPTPRVLWAFPEGVVLPAPYYGNRITVHGNGSLDIRSLRKSDSVQLVCMARNEGGEARLILQLTVLEPMEKPIFHDPISEKITAMAGHTISLNCSAAGTPTPSLVWVLPNGTDLQSGQQLQRFYHKADGMLHISGLSSVDAGAYRCVARNAAGHTERLVSLKVGLKPEANKQYHNLVSIINGETLKLPCTPPGAGQGRFSWTLPNGMHLEGPQTLGRVSLLDNGTLTVREASVFDRGTYVCRMETEYGPSVTSIPVIVIAYPPRITSEPTPVIYTRPGNTVKLNCMAMGIPKADITWELPDKSHLKAGVQARLYGNRFLHPQGSLTIQHATQRDAGFYKCMAKNILGSDSKTTYIHVF

SEQ ID NO: 49338 - protein, 237 aa, Homo sapiens
MKGCPVNTEPSGPTCEKKTYSVPAHQERAYEYVECPIRGTAAENKENLDPSNLMPPPNQTPAPDQPFALSTVREESSIPRADSEKKWVYPSEQMFWNAMLKKGWKWKDEDISQKDMYNIIRIHNQNNEQAWKEILKWEALHAAECPCGPSLIRFGGKAKEYSPRARIRSWMGYELPFDRHDWIINRCGTEVRYVIDYYDGGEVNKDYQFTILDVRPALDSLSAVWDRMKVAWWRWTS

SEQ ID NO: 49339 - protein, 1242 aa, Homo sapiens
MRRDPVLGFGFVAGSEKPVVVRSVTPGGPSEGKLIPGDQIVMINDEPVSAAPRERVIDLVRSCKESILLTVIQPYPSPKSAFISAAKKARLKSNPVKVRFSEEVIINGQVSETVKDNSLLFMPNVLKVYLENGQTKSFRFDCSTSIKDVILTLQEKLSIKGIEHFSLMLEQRTEGAGTKLLLLHEQETLTQVTQRPSSHKMRCLFRISFVPKDPIDLLRRDPVAFEYLYVQSCNDVVQERFGPELKYDIALRLAALQMYIATVTTKQTQKISLKYIEKEWGLETFLPSAVLQSMKEKNIKKALSHLVKANQNLVPPGKKLSALQAKVHYLKFLSDLRLYGGRVFKATLVQAEKRSEVTLLVGPRYGISHVINTKTNLVALLADFSHVNRIEMFSEEESLVRVELHVLDVKPITLLMESSDAMNLACLTAGYYRLLVDSRRSIFNMANKKNTATQETGPENKGKHNLLGPDWNCIPQMTTFIGEGEQEAQITYIDSKQKTVEITDSTMCPKEHRHLYIDNAYSSDGLNQQLSQPGEAPCEADYRSLAQRSLLTLSGPETLKKAQESPRGAKVSFIFGDFALDDGISPPTLGYETLLDEGPEMLEKQRNLYIGSANDMKGLDLTPEAEGIQFVENSVYANIGDVKSFQAAEGIEEPLLHDICYAENTDDAEDEDEVSCEEDLVVGEMNQPAILNLSGSSDDIIDLTSLPPPEGDDNEDDFLLRSLNMAIAAPPPGFRDSSDEEDSQSQAASFPEDKEKGSSLQNDEIPVSLIDAVPTSAEGKCEKGLDNAVVSTLGALEALSVSEEQQTSDNSGVAILRAYSPESSSDSGNETNSSEMTESSELATAQKQSENLSRMFLATHEGYHPLAEEQTEFPASKTPAGGLPPKSSHALAARPATDLPPKVVPSKQLLHSDHMEMEPETMETKSVTDYFSKLHMGSVAYSCTSKRKSKLADGEGKAPPNGNTTGKKQQGTKTAEMEEEASGKFGTVSSRDSQHLSTFNLERTAFRKDSQRWYVATEGGMAEKSGLEAATGKTFPRASGLGAREAEGKEEGAPDGETSDGSGLGQGDRFLTDVTCASSAKDLDNPEDADSSTCDHPSKLPEADESVARLCDYHLAKRMSSLQSEGHFSLQSSQGSSVDAGCGTGSSGSACATPVESPLCPSLGKHLIPDASGKGVNYIPSEERAPGLPNHGATFKELHPQTEGMCPRMTVPALHTAINTEPLFGTLRDGCHRLPKIKETTV

SEQ ID NO: 49340 - protein, 178 aa, Homo sapiens [sequence omitted]

SEQ ID NO: 49341 - protein, 430 aa, Homo sapiens
MPFVEAFRQFQFKAKRENFCNIHVSLVPQLSATGEQKTKPTQNSVRALRGLGLSPDLIVCRSSTPIEMAVKEKISMFCHVNPEQVICIHDVSSTYRVPVLLEEQSIVKYFKERLHLPIGDSASNLLFKWRNMADRYERLQKICSIALVGKYTKLRDCYASVFKALEHSALAINHKLNLMYIDSIDLEKITETEDPVKFHEAWQKLCKADGILVPGGFGIRGTLGKLQAISWARTKKIPFLGVCLGMQLAVIEFARNCLNLKDADSTEFRPNAPVPLVIDMPEHNPGNLGGTMRLGIRRTVFKTENSILRKLYGDVPFIEERHRHRFEVNPNLIKQFEQNDLSFVGQDVDGDRMEIIELANHPYFVGVQFHPEFSSRPMKPSPPYLGLLLAATGNLNAYLQQGCKLSSSDRYSDASDDSFSEPRIAELEIS

SEQ ID NO: 49342 - protein, 420 aa, Homo sapiens
MFEDTVEERVINEEYKIWKKNTPFLYDLVMTHALQWPSLTVQWLPEVTKPEGKDYALHWLVLGTHTSDEQNHLVVARVHIPNDDAQFDASHCDSDKGEFGGFGSVTGKIECEIKINHEGEVNRARYMPQNPHIIATKTPSSDVLVFDYTKHPAKPDPSGECNPDLRLRGHQKEGYGLSWNSNLSGHLLSASDDHTVCLWDINAGPKEGKIVDAKAIFTGHSAVVEDVAWHLLHESLFGSVADDQKLMIWDTRSNTTSKPSHLVDAHTAEVNCLSFNPYSEFILATGSADKTVALWDLRNLKLKLHTFESHKDEIFQVHWSPHNETILASSGTDRRLNVWDLSKIGEEQSAEDAEDGPPELLFIHGGHTAKISDFSWNPNEPWVICSVSEDNIMQIWQMAENIYNDEESDVTTSELEGQGS

SEQ ID NO: 49343 - protein, 1088 aa, Homo sapiens
MTASGLRIIFTLDEVAFIQNLVFYIEAAYKVADYGMWERGDKTNQGIPELNASSVGMAKAALEAIDELDLFGAHGGRKSVIHVLPDEVEHCQSILFSMLPRASTSKEIDAGLLSIISFPAFAVEDVNLVNVTKNEIISKLQGRYGCCRFLRDGYKTPREDPNRLHYDPAELKLFENIECEWPVFWTYFIIDGVFSGDAVQVQEYREALEGILIRGKNGIRLVPELYAVPPNKVDEEYKNPHTVDRVPMGKVPHLWGQSLYILSSLLAEGFLAAGEIDPLNRRFSTSVKPDVVVQVTVLAENNHIKDLLRKHGVNVQSIADIHPIQVQPGRILSHIYAKLGRNKNMNLSGRPYRHIGVLGTSKLYVIRNQIFTFTPQFTDQHHFYLALDNEMIVEMLRIELAYLCTCWRMTGRPTLTFPISRTMLTNDGSDIHSAVLSTIRKLEDGYFGGARVKLGNLSEFLTTSFYTYLTFLDPDCDEKLFDNASEGTFSPDSDSDLVGYLEDTCNQESQDELDHYINHLLQSTSLRSYLPPLCKNTEDRHVFSAIHSTRDILSVMAKAKGLEVPFVPMTLPTKVLSAHRKSLNLVDSPQPLLEKVPESDFQWPRDDHGDVDCEKLVEQLKDCSNLQDQADILYILYVIKGPSWDTNLSGQHGVTVQNLLGELYGKAGLNQEWGLIRYISGLLRKKVEVLAEACTDLLSHQKQLTVGLPPEPREKIISAPLPPEELTKLIYEASGQDISIAVLTQEIVVYLAMYVRAQPSLFVEMLRLRIGLIIQVMATELARSLNCSGEEASESLMNLSPFDMKNLLHHILSGKEFGVERSVRPIHSSTSSPTISIHEVGHTGVTKTERSGINRLRSEMKQMTRRFSADEQFFSVGQAASSSAHSSKSARSSTPSSPTGTSSSDSGGHHIGWGERQGQWLRRRRLDGAINRVPVGFYQRVWKILQKCHGLSIDGYVLPSSTTREMTPHEIKFAVHVESVLNRVPQPEYRQLLVEAIMVLTLLSDTEMTSIGGIIHVDQIVQMASQLFLQDQVSIGAMDTLEKDQATGICHFFYDSAPSGAYGTMTYLTRAVASYLQELLPNSGCQMQ

SEQ ID NO: 49344 - protein, 54 aa, Homo sapiens
MRCRCSSMHFLVAEWNEPSINFYKRRGASDLSSEEGWRLFKIDKEYLLKMATEE

SEQ ID NO: 49345 - protein, 629 aa, Homo sapiens
MEYHSPDDNRMNRNRLLHINLGIHSPSSYHPGDGAQLNGGRTLVHSSSDGHIDPQHAAGKQLICLVQEPHSAPAVVAATPNYNPFFMNEQNRSAATPPSQPPQQPSSMQTGMNPSAMQGPSPPPPPPSYMHIPRYSTNPITVTVSQNLPSGQTVPRALQILPQIPSNLYGSPGSIYIRQTSQSSSGRQTPQSTPWQSSPQGPVPHYSQRPLPVYPHQQNYQPSQYSPKQQQIPQSAYHSPPPSQCPSPFSSPQHQVQPSQLGHIFMPPSPSTTPPHPYQQGPPSYQKQGSHSVAYLPYTASSLSKGSMKKIEITVEPSQRPGTAINRSPSPISNQPSPRNQHSLYTATTPPSSSPSRGISSQPKPPFSVNPVYITYTQPTGPSCTPSPSPRVIPNPTTVFKITVGRATTENLLNLVDQEERSAAPEPIQPISVIPGSGGEKGSHKYQRSSSSGSDDYAYTQALLLHQRARMERLAKQLKLEKEELERLKSEVNGMEHDLMQRRLRRVSCTTAIPTPEEMTRLRSMNRQLQINVDCTLKEVDLLQSRDSSDPCTIERKARRISVTSKVQADIHDTQAAAADEHRTGSTQSPRTQPRDEDYEGAPWNCDSCTFLNHPALNRCEQCEMPRYT

SEQ ID NO: 49346 - protein, 858 aa, Homo sapiens
MWGDNSEGQIGLKNVSNVCVPQQVTIGKPVSWISCGYYHSAFVTTDGELYVFGEPENGKLGLPNQLLGNHRTPQLVSEIPEKVIQVACGGEHTVVLTENAVYTFGLGQFGQLGLGTFLFETSEPKVIENIRDQTISYISCGENHTALITDIGLMYTFGDGRHGKLGLGLENFTNHFIPTLCSNFLRFIVKLVACGGCHMVVFAAPHRGVAKEIEFDEINDTCLSVATFLPYSSLTSGNVLQRTLSARMRRRERERSPDSFSMRRTLPPIEGTLGLSACFLPNSVFPRCSERNLQESVLSEQDLMQPEEPDYLLDEMTKEAEIDNSSTVESLGETTDILNMTHIMSLNSNEKSLKLSPVQKQKKQQTIGELTQDTALTENDDSDEYEEMSEMKEGKACKQHVSQGIFMTQPATTIEAFSDEEVGNDTGQVGPQADTDGEGLQKEVYRHENNNGVDQLDAKEIEKESDGGHSQKESEAEEIDSEKETKLAEIAGMKDLREREKSTKKMSPFFGNLPDRGMNTESEENKDFVKKRESCKQDVIFDSERESVEKPDSYMEGASESQQGIADGFQQPEAIEFSSGEKEDDEVETDQNIRYGRKLIEQGNEKETKPIISKSMAKYDFKCDRLSEIPEEKEGAEDSKGNGIEEQEVEANEENVKVHGGRKEKTEILSDDLTDKAEDHEFSKTEELKLEDVDEEINAENVESKKKTVGDDESVPTGYHSKTEGAERTNDDSSAETIEKKEKANLEERAICEYNENPKGYMLDDADSSSLEILENSETTPSKDMKKTKKIFLFKRVPSINQKIVKNNNEPLPEIKSIGDQIILKSDNKDADQNHMSQNHQNIPPTNTERRSKSCTIL

SEQ ID NO: 49347 - protein, 653 aa, Homo sapiens
MWGDNSEGQIGLKNVSNVCVPQQVTIGKPVSWISCGYYHSAFVTTDGELYVFGEPENGKLGLPNQLLGNHRTPQLVSEIPEKVIQVACGGEHTVVLTENAVYTFGLGQFGQLGLGTFLFETSEPKVIENIRDQTISYISCGENHTALITDIGLMYTFGDGRHGKLGLGLENFTNHFIPTLCSNFLRFIVKLVACGGCHMVVFAAPHRGVAKEIEFDEINDTCLSVATFLPYSSLTSGNVLQRTLSARMRRRERERSPDSFSMRRTLPPIEGTLGLSACFLPNSVFPRCSERNLQESVLSEQDLMQPEEPDYLLDEMTKEAEIDNSSTVESLGETTDILNMTHIMSLNSNEKSLKLSPVQKQKKQQTIGELTQDTALTENDDSDEYEEMSEMKEGKACKQHVSQGIFMTQPATTIEAFSDEEVEIPEEKEGAEDSKGNGIEEQEVEANEENVKVHGGRKEKTEILSDDLTDKAEDHEFSKTEELKLEDVDEEINAENVESKKKTVGDDESVPTGYHSKTEGAERTNDDSSAETIEKKEKANLEERAICEYNENPKGYMLDDADSSSLEILENSETTPSKDMKKTKKIFLFKRVPSINQKIVKNNNEPLPEIKSIGDQIILKSDNKDADQNHMSQNHQNIPPTNTERRSKSCTIL

SEQ ID NO: 49348 - protein, 182 aa, Homo sapiens
MQICDTYNQKHSLFNAMNRFIGAVNNMDQTVMVPSLLRDVPLADPGLDNDVGVEVGGSGGCLEERTPPVPDSGSANGSFFAPSRDMYSHYVLLKSIRNDIEWGVLHQPPPPAGSEEGSAWKSKDILVDLGHLEGADAGEEDLEQQFHYHLRGLHTVLSKLTRKANILTNRYKQEIGFGNWGH

SEQ ID NO: 49349 - protein, 1388 aa, Homo sapiens [sequence omitted]

SEQ ID NO: 49350 - protein, 2493 aa, Homo sapiens
MINRPRWVVPVLPKGELEVLLEAAIDLSKKGLDVKSEACQRFFRDGLTISFTKILTDEAVSGWKFEIHRCIINNTHRLVELCVAKLSQDWFPLLELLAMALNPHCKFHIYNGTRPCESVSSSVQLPEDELFARSPDPRSPKGWLVDLLNKFGTLNGFQILHDRFINGSALNVQIIAALIKPFGQCYEFLTLHTVKKYFLPIIEMVPQFLENLTDEELKKEAKNEAKNDALSMIIKSLKNLASRVPGQEETVKNLEIFRLKMILRLLQISSFNGKMNALNEVNKVISSVSYYTHRHGNPEEEEWLTAERMAEWIQQNNILSIVLRDSLHQPQYVEKLEKILRFVIKEKALTLQDLDNIWAAQAGKHEAIVKNVHDLLAKLAWDFSPEQLDHLFDCFKASWTNASKKQREKLLELIRRLAEDDKDGVMAHKVLNLLWNLAHSDDVPVDIMDLALSAHIKILDYSCSQDRDTQKIQWIDRFIEELRTNDKWVIPALKQIREICSLFGEAPQNLSQTQRSPHVFYRHDLINQLQHNHALVTLVAENLATYMESMRLYARDHEDYDPQTVRLGSRYSHVQEVQERLNFLRFLLKDGQLWLCAPQAKQIWKCLAENAVYLCDREACFKWYSKLMGDEPDLDPDINKDFFESNVLQLDPSLLTENGMKCFERFFKAVNCREGKLVAKRRAYMMDDLELIGLDYLWRVVIQSNDDIASRAIDLLKEIYTNLGPRLQVNQVVIHEDFIQSCFDRLKASYDTLCVLDGDKDSVNCARQEAVRMVRVLTVLREYINECDSDYHEERTILPMSRAFRGKHLSFVVRFPNQGRQVDDLEVWSHTNDTIGSVRRCILNRIKANVAHTKIELFVGGELIDPADDRKLIGQLNLKDKSLITAKLTQISSNMPSSPDSSSDSSTGSPGNHGNHYSDGPNPEVESCLPGVIMSLHPRYISFLWQVADLGSSLNMPPLRDGARVLMKLMPPDSTTIEKLRAICLDHAKLGESSLSPSLDSLFFGPSASQVLYLTEVVYALLMPAGAPLADDSSDFQFHFLKSGGLPLVLSMLTRNNFLPNADMETRRGAYLNALKIAKLLLTAIGYGHVRAVAEACQPGVEGVNPMTQINQVTHDQAVVLQSALQSIPNPSSECMLRNVSVRLAQQISDEASRYMPDICVIRAIQKIIWASGCGSLQLVFSPNEEITKIYEKTNAGNEPDLEDEQVCCEALEVMTLCFALIPTALDALSKEKAWQTFIIDLLLHCHSKTVRQVAQEQFFLMCTRCCMGHRPLLFFITLLFTVLGSTARERAKHSGDYFTLLRHLLNYAYNSNINVPNAEVLLNNEIDWLKRIRDDVKRTGETGIEETILEGHLGVTKELLAFQTSEKKFHIGCEKGGANLIKELIDDFIFPASNVYLQYMRNGELPAEQAIPVCGSPPTINAGFELLVALAVGCVRNLKQIVDSLTEMYYIGTAITTCEALTEWEYLPPVGPRPPKGFVGLKNAGATCYMNSVIQQLYMIPSIRNGILAIEGTGSDVDDDMSGDEKQDNESNVDPRDDVFGYPQQFEDKPALSKTEDRKEYNIGVLRHLQVIFGHLAASRLQYYVPRGFWKQFRLWGEPVNLREQHDALEFFNSLVDSLDEALKALGHPAMLSKVLGGSFADQKICQGCPHRYECEESFTTLNVDIRNHQNLLDSLEQYVKGDLLEGANAYHCEKCNKKVDTVKRLLIKKLPPVLAIQLKRFDYDWERECAIKFNDYFEFPRELDMEPYTVAGVAKLEGDNVNPESQLIQQSEQSESETAGSTKYRLVGVLVHSGQASGGHYYSYIIQRNGGDGERNRWYKFDDGDVTECKMDDDEEMKNQCFGGEYMGEVFDHMMKRMSYRRQKRWWNAYILFYERMDTIDQDDELIRYISELAITTRPHQIIMPSAIERSVRKQNVQFMHNRMQYSMEYFQFMKKLLTCNGVYLNPPPGQDHLLPEAEEITMISIQLAARFLFTTGFHTKKVVRGSASDWYDALCILLRHSKNVRFWFAHNVLFNVSNRFSEYLLECPSAEVRGAFAKLIVFIAHFSLQDGPCPSPFASPGPSSQAYDNLSLSDHLLRAVLNLLRREVSEHGRHLQQYFNLFVMYANLGVAEKTQLLKLSVPATFMLVSLDEGPGPPIKYQYAELGKLYSVVSQLIRCCNVSSRMQSSINGNPPLPNPFGDPNLSQPIMPIQQNVADILFVRTSYVKKIIEDCSNSEETVKLLRFCCWENPQFSSTVLSELLWQVAYSYTYELRPYLDLLLQILLIEDSWQTHRIHNALKGIPDDRDGLFDTIQRSKNHYQKRAYQCIKCMVALFSNCPVAYQILQGNGDLKRKWTWAVEWLGDELERRPYTGNPQYTYNNWSPPVQSNETSNGYFLERSHSARMTLAKACELCPEEVKKATSVQQIEMEESKEPDDQDAPDEHESPPPEDAPLYPHSPGSQYQQNNHVHGQPYTGPAAHHMNNPQRTGQRAQENYEGSEEVSPPQTKDQ

SEQ ID NO: 49351 - protein, 2477 aa, Homo sapiens
MINRPRWVVPVLPKGELEVLLEAAIDLSKKGLDVKSEACQRFFRDGLTISFTKILTDEAVSGWKFEIHRCIINNTHRLVELCVAKLSQDWFPLLELLAMALNPHCKFHIYNGTRPCESVSSSVQLPEDELFARSPDPRSPKGWLVDLLNKFGTLNGFQILHDRFINGSALNVQIIAALIKPFGQCYEFLTLHTVKKYFLPIIEMVPQFLENLTDEELKKEAKNEAKNDALSMIIKSLKNLASRVPGQEETVKNLEIFRLKMILRLLQISSFNGKMNALNEVNKVISSVSYYTHRHGNPEEEEWLTAERMAEWIQQNNILSIVLRDSLHQPQYVEKLEKILRFVIKEKALTLQDLDNIWAAQAGKHEAIVKNVHDLLAKLAWDFSPEQLDHLFDCFKASWTNASKKQREKLLELIRRLAEDDKDGVMAHKVLNLLWNLAHSDDVPVDIMDLALSAHIKILDYSCSQDRDTQKIQWIDRFIEELRTNDKWVIPALKQIREICSLFGEAPQNLSQTQRSPHVFYRHDLINQLQHNHALVTLVAENLATYMESMRLYARDHEDYDPQTVRLGSRYSHVQEVQERLNFLRFLLKDGQLWLCAPQAKQIWKCLAENAVYLCDREACFKWYSKLMGDEPDLDPDINKDFFESNVLQLDPSLLTENGMKCFERFFKAVNCREGKLVAKRRAYMMDDLELIGLDYLWRVVIQSNDDIASRAIDLLKEIYTNLGPRLQVNQVVIHEDFIQSCFDRLKASYDTLCVLDGDKDSVNCARQEAVRMVRVLTVLREYINECDSDYHEERTILPMSRAFRGKHLSFVVRFPNQGRQVDDLEVWSHTNDTIGSVRRCILNRIKANVAHTKIELFVGGELIDPADDRKLIGQLNLKDKSLITAKLTQISSNMPSSPDSSSDSSTGSPGNHGNHYSDGPNPEVESCLPGVIMSLHPRYISFLWQVADLGSSLNMPPLRDGARVLMKLMPPDSTTIEKLRAICLDHAKLGESSLSPSLDSLFFGPSASQVLYLTEVVYALLMPAGAPLADDSSDFQFHFLKSGGLPLVLSMLTRNNFLPNADMETRRGAYLNALKIAKLLLTAIGYGHVRAVAEACQPGVEGVNPMTQINQVTHDQAVVLQSALQSIPNPSSECMLRNVSVRLAQQISDEASRYMPDICVIRAIQKIIWASGCGSLQLVFSPNEEITKIYEKTNAGNEPDLEDEQVCCEALEVMTLCFALIPTALDALSKEKAWQTFIIDLLLHCHSKTVRQVAQEQFFLMCTRCCMGHRPLLFFITLLFTVLGSTARERAKHSGDYFTLLRHLLNYAYNSNINVPNAEVLLNNEIDWLKRIRDDVKRTGETGIEETILEGHLGVTKELLAFQTSEKKFHIGCEKGGANLIKELIDDFIFPASNVYLQYMRNGELPAEQAIPVCGSPPTINAGFELLVALAVGCVRNLKQIVDSLTEMYYIGTAITTCEALTEWEYLPPVGPRPPKGFVGLKNAGATCYMNSVIQQLYMIPSIRNGILAIEGTGSDVDDDMSGDEKQDNESNVDPRDDVFGYPQQFEDKPALSKTEDRKEYNIGVLRHLQVIFGHLAASRLQYYVPRGFWKQFRLWGEPVNLREQHDALEFFNSLVDSLDEALKALGHPAMLSKVLGGSFADQKICQGCPHRYECEESFTTLNVDIRNHQNLLDSLEQYVKGDLLEGANAYHCEKCNKKVDTVKRLLIKKLPPVLAIQLKRFDYDWERECAIKFNDYFEFPRELDMEPYTVAGVAKLEGDNVNPESQLIQQSEQSESETAGSTKYRLVGVLVHSGQASGGHYYSYIIQRNGGDGERNRWYKFDDGDVTECKMDDDEEMKNQCFGGEYMGEVFDHMMKRMSYRRQKRWWNAYILFYERMDTIDQDDELIRYISELAITTRPHQIIMPSAIERSVRKQNVQFMHNRMQYSMEYFQFMKKLLTCNGVYLNPPPGQDHLLPEAEEITMISIQLAARFLFTTGFHTKKVVRGSASDWYDALCILLRHSKNVRFWFAHNVLFNVSNRFSEYLLECPSAEVRGAFAKLIVFIAHFSLQDGPCPSPFASPGPSSQAYDNLSLSDHLLRAVLNLLRREVSEHGRHLQQYFNLFVMYANLGVAEKTQLLKLSVPATFMLVSLDEGPGPPIKYQYAELGKLYSVVSQLIRCCNVSSRMQSSINGNPPLPNPFGDPNLSQPIMPIQQNVADILFVRTSYVKKIIEDCSNSEETVKLLRFCCWENPQFSSTVLSELLWQVAYSYTYELRPYLDLLLQILLIEDSWQTHRIHNALKGIPDDRDGLFDTIQRSKNHYQKRAYQCIKCMVALFSNCPVAYQILQGNGDLKRKWTWAVEWLGDELERRPYTGNPQYTYNNWSPPVQSNETSNGYFLERSHSARMTLAKACELCPEEEPDDQDAPDEHESPPPEDAPLYPHSPGSQYQQNNHVHGQPYTGPAAHHMNNPQRTGQRAQENYEGSEEVSPPQTKDQ

SEQ ID NO: 49352 - protein, 297 aa, Homo sapiens
MDLLGDQVKLNHPVTHVDQSSDNIIIETLNHEHYECKYVINAIPPTLTAKIHFRPELPAERNQLIQRLPMGAVIKCMMYYKEAFWKKKDYCGCMIIEDEDAPISITLDDTKPDGSLPAIMGFILARKADRLAKLHKEIRKKKICELYAKVLGSQEALHPVHYEEKNWCEEQYSGGCYTAYFPPGIMTQYGRVIRQPVGRIFFAGTETATKWSGYMEGAVEAGERAAREVLNGLGKVTEKDIWVQEPESKDVPAVEITHTFWERNLPSVSGLLKIIGFSTSVTALGFVLYKYKLLPRS

SEQ ID NO: 49353 - protein, 130 aa, Homo sapiens
MLENYSHLVSVGYLVAKPDVIFRLGPGEESWMADGGTPVRTCAEVWQVDEQIDHYKESQDKLPWQAAFIGKETLKDESGQESRTCRKSIYLSTEFDSVRQRLPKYYSWEKAFKTSFKLSWSKWKLCKKER

SEQ ID NO: 49354 - protein, 829 aa, Homo sapiens
MQAQLLELRTNNYQLSDELRKNGVELTSLRQKVAYLDKEFSKAQKALSKSKKAQEVEVLLSENEMLQAKLHSQEEDFRLQNSTLMAEFSKLCSQMEQLEQENQQLKEGAAGAGVAQAGPLVDGELLRLQAENTALQKNVAALQERYGKEAGKFSAVSEGQGDPPGGLAPTVLAPMPLAEVELKWEMEKEEKRLLWEQLQGLESSKQAETSRLQEELAKLSEKLKKKQESFCRLQTEKETLFNDSRNKIEELQQRKEADHKAQLARTQKLQQELEAANQSLAELRDQRQGERLEHAAALRALQDQVSIQSADAQEQVEGLLAENNALRTSLAALEQIQTAKTQELNMLREQTTGLAAELQQQQAEYEDLMGQKDDLNSQLQESLRANSRLLEQLQEIGQEKEQLTQELQEARKSAEKRKAMLDELAMETLQEKSQHKEELGAVRLRHEKEVLGVRARYERELRELHEDKKRQEEELRGQIREEKARTRELETLQQTVEELQAQVHSMDGAKGWFERRLKEAEESLQQQQQEQEEALKQCREQHAAELKGKEEELQDVRDQLEQAQEERDCHLKTISSLKQEVKDTVDGQRILEKKGSAALKDLKRQLHLERKRADKLQERLQDILTNSKSRSGLEELVLSEMNSPSRTQTGDSSSISSFSYREILREKESSAVPARSLSSSPQAQPPRPAELSDEEVAELFQRLAETQQEKWMLEEKVKHLEVSSASMAEDLCRKSAIIETYVMDSRIDVSVAAGHTDRSGLGSVLRDLVKPGDENLREMNKKLQNMLEEQLTKNMHLHKDMEVLSQEIVRLSKECVGPPDPDLEPGETS

SEQ ID NO: 49355 - protein, 798 aa, Homo sapiens
MQAQLLELRTNNYQLSDELRKNGVELTSLRQKVAYLDKEFSKAQKALSKSKKAQEVEVLLSENEMLQAKLHSQEEDFRLQNSTLMAEFSKLCSQMEQLEQENQQLKEGAAGAGVAQAGPLVDGELLRLQAENTALQKNVAALQERYGKEAGKFSAVSEGQGDPPGGLAPTVLAPMPLAEVELKWEMEKEEKRLLWEQLQGLESSKQAETSRLQEELAKLSEKLKKKQESFCRLQTEKETLFNDSRNKIEELQQRKEADHKAQLARTQKLQQELEAANQSLAELRDQRQGERLEHAAALRALQDQIQTAKTQELNMLREQTTGLAAELQQQQAEYEDLMGQKDDLNSQLQESLRANSRLLEQLQEIGQEKEQLTQELQEARKSAEKRKAMLDELAMETLQEKSQHKEELGAVRLRHEKEVLGVRARYERELRELHEDKKRQEEELRGQIREEKARTRELETLQQTVEELQAQVHSMDGAKGWFERRLKEAEESLQQQQQEQEEALKQCREQHAAELKGKEEELQDVRDQLEQAQEERDCHLKTISSLKQEVKDTVDGQRILEKKGSAALKDLKRQLHLERKRADKLQERLQDILTNSKSRSGLEELVLSEMNSPSRTQTGDSSSISSFSYREILREKESSAVPARSLSSSPQAQPPRPAELSDEEVAELFQRLAETQQEKWMLEEKVKHLEVSSASMAEDLCRKSAIIETYVMDSRIDVSVAAGHTDRSGLGSVLRDLVKPGDENLREMNKKLQNMLEEQLTKNMHLHKDMEVLSQEIVRLSKECVGPPDPDLEPGETS

SEQ ID NO: 49356 - protein, 552 aa, Homo sapiens [sequence omitted]

SEQ ID NO: 49357 - protein, 1192 aa, Homo sapiens [sequence omitted]

SEQ ID NO: 49358 - protein, 1000 aa, Homo sapiens
MCQDWFHGSCVGVEEEKAADIDLYHCPNCEVLHGPSIMKKRRGSSKGHDTHKGKPVKTGSPTFVRELRSRTFDSSDEVILKPTGNQLTVEFLEENSFSVPILVLKKDGLGMTLPSPSFTVRDVEHYVGSDKEIDVIDVTRQADCKMKLGDFVKYYYSGKREKVLNVISLEFSDTRLSNLVETPKIVRKLSWVENLWPEECVFERPNVQKYCLMSVRDSYTDFHIDFGGTSVWYHVLKGEKIFYLIRPTNANLTLFECWSSSSNQNEMFFGDQVDKCYKCSVKQGQTLFIPTGWIHAVLTPVDCLAFGGNFLHSLNIEMQLKAYEIEKRLSTADLFRFPNFETICWYVGKHILDIFRGLRENRRHPASYLVHGGKALNLAFRAWTRKEALPDHEDEIPETVRTVQLIKDLAREIRLVEDIFQQNVGKTSNIFGLQRIFPAGSIPLTRPAHSTSVSMSRLSLPSKNGSKKKGLKPKELFKKAERKGKESSALGPAGQLSYNLMDTYSHQALKTGSFQKAKFNITGACLNDSDDDSPDLDLDGNESPLALLMSNGSTKRVKSLSKSRRTKIAKKVDKARLMAEQVMEDEFDLDSDDELQIDERLGKEKATLIIRPKFPRKLPRAKPCSDPNRVREPGEVEFDIEEDYTTDEDMVEGVEGKLGNGSGAGGILDLLKASRQVGGPDYAALTEAPASPSTQEAIQGMLCMANLQSSSSSPATSSLQAWWTGGQDRSSGSSSSGLGTVSNSPASQRTPGKRPIKRPAYWRTESEEEEENASLDEQDSLGACFKDAEYIYPSLESDDDDPALKSRPKKKKNSDDAPWSPKARVTPTLPKQDRPVREGTRVASIETGLAAAAAKLAQQELQKAQKKKYIKKKPLLKEVEQPRPQDSNLSLTVPAPTVAATPQLVTSSSPLPPPEPKQEALSGSLADHEYTARPNAFGMAQANRSTTPMAPGVFLTQRRPSVGSQSNQAGQGKRPKKGLATAKQRLGRILKIHRNGKLLL

SEQ ID NO: 49359 - protein, 225 aa, Homo sapiens
MGLEFKKHHDYYITSTSNGSLEGLENREGGVCRTRTMKIIMKVGQDPNAVTPEQLTTSRPSKEADNTVKMATQAPGSRGSLGDSDGKHETVNQEEKSGPGASGGSSGDPDGFFNSKVALFAAVGAGCVIFLLIIIFLTVLLLKLRKRHRKHTQQRAAALSLSTLASPKGGSGTAGTEPSDIIIPLRTTENNYCPHYEKVSGDYGHPVYIVQEMPPQSPANIYYKV

SEQ ID NO: 49360 - protein, 285 aa, Homo sapiens [sequence omitted]

SEQ ID NO: 49361 - protein, 264 aa, Homo sapiens [sequence omitted]

SEQ ID NO: 49362 - protein, 1002 aa, Homo sapiens
MQLWRQEPDNTGVLLLLSSIHFQCRRLDRSAHFSTLAIKQNPLLAEAYSNLGNVYKERGQLQEAIEHYRHALRLKPDFIDGYINLAAALVAAGDMEGAVQAYVSALQYNPDLYCVRSDLGNLLKALGRLEEAKACYLKAIETQPNFAVAWSNLGCVFNAQGEIWLAIHHFEKAVTLDPNFLDAYINLGNVLKEARIFDRAVAAYLRALSLSPNHAVVHGNLACVYYEQGLIDLAIDTYRRAIELQPHFPDAYCNLANALKEKGSVAEAEDCYNTALRLCPTHADSLNNLANIKREQGNIEEAVRLYRKALEVFPEFAAAHSNLASVLQQQGKLQEALMHYKEAIRISPTFADAYSNMGNTLKEMQDVQGALQCYTRAIQINPAFADAHSNLASIHKDSGNIPEAIASYRTALKLKPDFPDAYCNLAHCLQIVCDWTDYDERMKKLVSIVADQLEKNRLPSVHPHHSMLYPLSHGFRKAIAERHGNLCLDKINVLHKPPYEHPKDLKLSDGRLRVGYVSSDFGNHPTSHLMQSIPGMHNPDKFEVFCYALSPDDGTNFRVKVMAEANHFIDLSQIPCNGKAADRIHQDGIHILVNMNGYTKGARNELFALRPAPIQAMWLGYPGTSGALFMDYIITDQETSPAEVAEQYSEKLAYMPHTFFIGDHANMFPHLKKKAVIDFKSNGHIYDNRIVLNGIDLKAFLDSLPDVKIVKMKCPDGGDNADSSNTALNMPVIPMNTIAEAVIEMINRGQIQITINGFSISNGLATTQINNKAATGEEVPRTIIVTTRSQYGLPEDAIVYCNFNQLYKIDPSTLQMWANILKRVPNSVLWLLRFPAVGEPNIQQYAQNMGLPQNRIIFSPVAPKEEHVRRGQLADVCLDTPLCNGHTTGMDVLWAGTPMVTMPGETLASRVAASQLTCLGCLELIAKNRQEYEDIAVKLGTDLEYLKKVRGKVWKQRISSPLFNTKQYTMELERLYLQMWEHYAAGNKPDHMIKPVEVTESA

SEQ ID NO: 49363 - protein, 390 aa, Homo sapiens [sequence omitted]

SEQ ID NO: 49364 - protein, 930 aa, Homo sapiens
MQAPNAPGLPADVPGSDVPQGPSDSQILQGLCASEGPSTSVLPTSAEGPSTFVPPTISEASSASGQPTISEGPGTSVLPTPSEGLSTSGPPTISKGLCTSVTLAASEGRNTSRPPTSSEEPSTSVPPTASEVPSTSLPPTPGEGTSTSVPPTAYEGPSTSVVPTPDEGPSTSVLPTPGEGPGTSVPLAATEGLSTSVQATPDEGPSTSVPPTATEGLSTPVPPTRDEGPSTSVPATPGEGPSTSVLPAASDGQSISLVPTRGKGSSTSVPPTATEGLSTSVQPTAGEGSSTSVPPTPGGGLSTSVPPTATEELSTSVPPTPGEGPSTSVLPIPGEGLSTSVPPTASDGSDTSVPPTPGEGASTLVQPTAPDGPGSSVLPNPGEGPSTLFSSSASVDRNPSKCSLVLPSPRVTKASVDSDSEGPKGAEGPIEFEVLRDCESPNSISIMGLNTSRVAITLKPQDPMEQNVAELLQFLLVKDQSKYPIRESEMREYIVKEYRNQFPEILRRAAAHLECIFRFELRELDPEAHTYILLNKLGPVPFEGLEESPNGPKMGLLMMILGQIFLNGNQAKEAEIWEMLWRMGVQRERRLSIFGNPKRLLSVEFVWQRYLDYRPVTDCKPVEYEFFWGPRSHLETTKMKILKFMAKIYNKDPMDWPEKYNEALEEDAARAFAEGWQALPHFRRPFFEEAAAEVPSPDSEVSSYSSKYAPHSWPESRLESKARKLVQLFLLMDSTKLPIPKKGILYYIGRECSKVFPDLLNRAARTLNHVYGTELVVLDPRNHSYTLYNRREMEETEEIVDSPNRPGNNFLMQVLSFIFIMGNHARESAVWAFLRGLGVQAGRKHVITCRYLSQRYIDSLRVPDSDPVQYEFVWGPRARLETSKMKALRYVARIHRKEPQDWPQQYREAMEDEANRADVGHRQIFVHNFR

SEQ ID NO: 49365 - protein, 322 aa, Homo sapiens [sequence omitted]

SEQ ID NO: 49366 - protein, 25 aa, Homo sapiens
MFPLVKSALNRLQGTENCSVTQAGV

SEQ ID NO: 49367 - protein, 1432 aa, Homo sapiens
MGFDAVIHNPDPLPVLTDTLFLTVTASLTLPWDHIQSTLLKTKGVTDIKIYPQKRTVAVTIIPSIVNANQIKELVPELSLDTGTLEKKSGACEDHSMAQAGEVVLKMKVEGMTCHSCTSTIEGKIGKLQGVQRIKVSLDNQEATIVYQPHLISVEEMKKQIEAMGFPAFVKKQPKYLKLGAIDVERLKNTPVKSSEGSQQRSPSYTNDSTATFIIDGMHCKSCVSNIESTLSALQYVSSIVVSLENRSAIVKYNASSVTPESLRKAIEAVSPGLYRVSITSEVESTSNSPSSSSLQKIPLNVVSQPLTQETVINIDGMTCNSCVQSIEGVISKKPGVKSIRVSLANSNGTVEYDPLLTSPETLRGAIEDMGFDATLSDTNEPLVVIAQPSSEMPLLTSTNEFYTKGMTPVQDKEEGKNSSKCYIQVTGMTCASCVANIERNLRREEGIYSILVALMAGKAEVRYNPAVIQPPMIAEFIRELGFGATVIENADEGDGVLELVVRGMTCASCVHKIESSLTKHRGILYCSVALATNKAHIKYDPEIIGPRDIIHTIESLGFEASLVKKDRSASHLDHKREIRQWRRSFLVSLFFCIPVMGLMIYMMVMDHHFATLHHNQNMSKEEMINLHSSMFLERQILPGLSVMNLLSFLLCVPVQFFGGWYFYIQAYKALKHKTANMDVLIVLATTIAFAYSLIILLVAMYERAKVNPITFFDTPPMLFVFIALGRWLEHIAKGKTSEALAKLISLQATEATIVTLDSDNILLSEEQVDVELVQRGDIIKVVPGGKFPVDGRVIEGHSMVDESLITGEAMPVAKKPGSTVIAGSINQNGSLLICATHVGADTTLSQIVKLVEEAQTSKAPIQQFADKLSGYFVPFIVFVSIATLLVWIVIGFLNFEIVETYFPGYNRSISRTETIIRFAFQASITVLCIACPCSLGLATPTAVMVGTGVGAQNGILIKGGEPLEMAHKVKVVVFDKTGTITHGTPVVNQVKVLTESNRISHHKILAIVGTAESNSEHPLGTAITKYCKQELDTETLGTCIDFQVVPGCGISCKVTNIEGLLHKNNWNIEDNNIKNASLVQIDASNEQSSTSSSMIIDAQISNALNAQQYKVLIGNREWMIRNGLVINNDVNDFMTEHERKGRTAVLVAVDDELCGLIAIADTVKPEAELAIHILKSMGLEVVLMTGDNSKTARSIASQVGITKVFAEVLPSHKVAKVKQLQEEGKRVAMVGDGINDSPALAMANVGIAIGTGTDVAIEAADVVLIRNDLLDVVASIDLSRKTVKRIRINFVFALIYNLVGIPIAAGVFMPIGLVLQPWMGSAAMAASSVSVVLSSLFLKLYRKPTYESYELPARSQIGQKSPSEISVHVGIDDTSRNSPKLGLLDRIVNYSRASINSLLSDKRSLNSVVTSEPDKHSLLVGDFREDDDTAL

SEQ ID NO: 49368 - protein, 257 aa, Homo sapiens [sequence omitted]

SEQ ID NO: 49369 - protein, 257 aa, Homo sapiens
MPAGLIYASVSVHAAKQEESKKQLVKPEQLPIYTAPPLQSKYVEEQPGHLQMGFASIRTATGCYIGWCKGVYVFVKNGIMDTVQFGKDAYVYLKNPPRDFLPKMGVITVSGLAGLVSARKGSKFKKITYPLGLATLGATVCYPVQSVIIAKVTAKRYMLQASKFLEQLNHCGQKAAKKSHSLNLKKKLRLGSSSEIEVPAKTTHVLKHSVPLPTELSSEAKTKSESTSGATQFMPDPKLMDHGQSHPEDIDMYSTRS

SEQ ID NO: 49370 - protein, 501 aa, Homo sapiens
MLTEQTPSSDPENALEVNGAEVTGEKENHCDDKTCVPSTSAEDMSENVPIAEDTTEQPKKNRITYSQIIKEGRRFNIDLVSKLLYSRGLLIDLLIKSNVSRYAEFKNITRILAFREGRVEQVPCSRADVFNSKQLTMVEKRMLMKFLTFCMEYEKYPDEYKGYEEITFYEYLKTQKLTPNLQYIVMHSIAMTSETASSTIDGLKATKNFLHCLGRYGNTPFLFPLYGQGELPQCFCRMCAVFGGIYCLRHSVQCLVVDKESRKCKAIIDQFGQRIISEHFLVEDSYFPENMCSRVQYRQISRAVLITDRSVLKTDSDQQISILTVPAEEPGTFAVRVIELCSSTMTCMKGTYLVHLTCTSSKTAREDLESVVQKLFVPYTEMEIENEQVEKPRILWALYFNMRDSSDISRSCYNDLPSNVYVCSGPDCGLGNDNAVKQAETLFQEICPNEDFCPPPPNPEDIILDGDSLQPEASESSAIPEANSETFKESTNLGNLEESSE

SEQ ID NO: 49371 - protein, 350 aa, Homo sapiens
MLYKKFRPAGPLRFTRICRDPVTRSPLGYGYVNFRFPADAEWALNTMNFDLINGKPFRLMWSQPDDRLRKSGVGNIFIKNLDKSIDNRALFYLFSAFGNILSCKVVCDDNGSKGYAYVHFDSLAAANRAIWHMNGVRLNNRQVYVGRFKFPEERAAEVRTRDRATFTNVFVKNIGDDIDDEKLKELFCEYGPTESVKVIRDASGKSKGFGFVRYETHEAAQKAVLDLHGKSIDGKVLYVGRAQKKIERLAELRRRFERLRLKEKSRPPGVPIYIKNLDETINDEKLKEEFSSFGSISRAKVMMEVGQGKGFGVVCFSSFEEATKAVDEMNGRIVGSKPLHVTLGQARRRC

SEQ ID NO: 49372 - protein, 485 aa, Homo sapiens
MASSTSDSGEESDSSSSSSSTSDSSSSSSTSGSSSGSGSSSSSSGSTSSRSRLYRKKRVPEPSRRARRAPLGTNFVDRLPQAVRNRVQALRNIQDECDKVDTLFLKAIHDLERKYAELNKPLYDRRFQIINAEYEPTEEECEWNSEDEEFSSDEEVQDNTPSEMPPLEGEEEENPKENPEVKAEEKEVPKEIPEVKDEEKEVPKEIPEVKAEEKADSKDCMEATPEVKEDPKEVPQVKADDKEQPKATEAKARAAVRETHKRVPEERLQDSVDLKRARKGKPKREDPKGIPDYWLIVLKNVDKLGPMIQKYDEPILKFLSDVSLKFSKPGQPVSYTFEFHFLPNPYFRNEVLVKTYIIKAKPDHNDPFFSWGWEIEDCKGCKIDWRRGKDVTVTTTQSRTTATGEIEIQPRVVPNASFFNFFSPPEIPMIGKLEPREDAILDEDFEIGQILHDNVILKSIYYYTGEVNGTYYQFGKHYGNKKYRK

SEQ ID NO: 49373 - protein, 624 aa, Homo sapiens
MIPATVISEDSVVKAVSWLCVGKCSGSTKVLFYRWLVAMFDFIDRKEQINLLYGFFFASLQDDALCPYVCHLLYLLTKKENVKPFRVRKLLDLQAKMGMQPHLQALLSLYKFFAPALISVSLPVRKKIYFKNSENLWKTALLAVKQRNRGPSPEPLKLMLGPANVRPLKRKWNSLSVIPVLNSSSYTKECGKKEMSLSDCLNRSGSFPLEQLQSFPQLLQNIHCLELPSQMGSVLNNSLLLHYINCVRDEPVLLRFYYWLSQTLQEECIWYKVNNYEHGKEFTNFLDTIIRAECFLQEGFYSCEAFLYKSLPLWDGLCCRSQFLQLVSWIPFSSFSEVKPLLFDHLAQLFFTSTIYFKCSVLQSLKELLQNWLLWLSMDIHMKPVTNSPLETTLGGSMNSVSKLIHYVGWLSTTAMRLESNNTFLLHFILDFYEKVCDIYINYNLPLVVLFPPGIFYSALLSLDTSILNQLCFIMHRYRKNLTAAKKNELVQKTKSEFNFSSKTYQEFNHYLTSMVGCLWTSKPFGKGIYIDPEILEKTGVAEYKNSLNVVHHPSFLSYAVSFLLQESPEERTVNVSSIRGKKWSWYLDYLFSQGLQGLKLFIRSSVHHSSIPRAEGINCNNQY

SEQ ID NO: 49374 - protein, 342 aa, Homo sapiens
MAEGGSGDVDDAGDCSGARYNDWSDDDDDSNESKSIVWYPPWARIGTEAGTRARARARARATRARRAVQKRASPNSDDTVLSPQELQKVLCLVEMSEKPYILEAALIALGNNAAYAFNRDIIRDLGGLPIVAKILNTRDPIVKEKALIVLNNLSVNAENQRRLKVYMNQVCDDTITSRLNSSVQLAGLRLLTNMTVTNEYQHMLANSISDFFRLFSAGNEETKLQVLKLLLNLAENPAMTRELLRAQVPSSLGSLFNKKENKEVILKLLVIFENINDNFKWEENEPTQNQFGEGSLFFFLKEFQVCADKVLGIESHHDFLVKVKVGKFMAKLAEHMFPKSQE

SEQ ID NO: 49375 - protein, 142 aa, Homo sapiens
MGLREQLDIIKIIDPSAQISPTDSEFIIELNCLTDEKLKQVRNYIKEHSPRQRPAREAWKRSNFSCASTSGVSGASASASSSSASMKRSKQRKLQQKAFRKRQLKEQRQARKERLSGLFLNEEVLSLKVTEEDHEADVDVLM

SEQ ID NO: 49376 - protein, 903 aa, Homo sapiens
MSPRYLQSNSSSHTRPFSAIAELLDNAVDPDVSARTVFIDVEEVKNKSCLTFTDDGCGMTPHKLHRMLSFGFTDKVIKKSQCPIGVFGNGFKSGSMRLGKDALVFTKNGGTLTVGLLSQTYLECVQAQAVIVPIVPFNQQNKKMIITEDSLPSLEAILNYSIFNRENDLLAQFDAIPGKKGTRVLIWNIRRNKNGKSELDFDTDQYDILVSDFDTEEKMTGGVTSELPETEYSLRAFCGILYMKPRMKIFLRQKKVTTQMIAKSLANVEYDTYKPTFTNKQVRITFGFSCKNSNQFGIMMYHNNRLIKSFEKVGCQVKPTRGEGVGVIGVIECNFLKPAYNKQDFEYTKEYRLTINALAQKLNAYWKEKTSQDNFETSTVARPIPKVPDQTWVQCDECLKWRKLPGKIDPSMLPARWFCYYNSHPKYRRCSVPEEQELTDEDLCLSKAKKQEQTVEEKKKMPMENENHQVFSNPPKILTVQEMAGLNNKTIGYEGIHSPSVLPSGGEESRSPSLQLKPLDSSVLQFSSKYKWILGEEPVEKRRRLQNEMTTPSLDYSMPAPYRRVEAPVAYPEGENSHDKSSSERSTPPYLFPEYPEASKNTGQNREVSILYPGAKDQRQGSLLPEELEDQMPRLVAEESNRGSTTINKEEVNKGPFVAVVGVAKGVRDSGAPIQLIPFNREELAERRKAVESWNPVPYSVASAAIPAAAIGEKARGYEESEGHNTPKLKNQRELEELKRTTEKLERVLAERNLFQQKVEELEQERNHWQSEFKKVQHELVIYSTQEAEGLYWSKKHMGYRQAEFQILKAELERTKEEKQELKEKLKETETHLEMLQKAQVSYRTPEGDDLERALAKLTRLRIHVSYLLTSVLPHLELREIGYDSEQVDGILYTVLEANHILD

SEQ ID NO: 49377 - protein, 265 aa, Homo sapiens [sequence omitted]

SEQ ID NO: 49378 - protein, 68 aa, Homo sapiens
MLDCQPVHEQATQSQTTVLVVTSGTVKFDGNKQHFFNQNFLLTAQSTPNNTVWKIASDCFRFQDWSSS

SEQ ID NO: 49379 - protein, 604 aa, Homo sapiens [sequence omitted]

SEQ ID NO: 49380 - protein, 495 aa, Homo sapiens
MDNLQDTLEAASFLQILPVLDFCKVFLISGVTLDNCVEVGRIANTYNLTEVDKYVNSFVLKNFPALLSTGEFLKLPFERLAFVLSSNSLKHCTELELFKATCRWLRLEEPRMDFAAKLMKNIRFPLMTPQELINYVQTVDFMRTDNTCVNLLLEASNYQMMPYMQPVMQSDRTAIRSDTTHLVTLGGVLRQQLVVSKELRMYDEKAHEWKSLAPMDAPRYQHGIAVIGNFLYVVGGQSNYDTKGKTAVDTVFRFDPRYNKWMQVASLNEKRTFFHLSALKGYLYAVGGRNAAGELPTVECYNPRTNEWTYVAKMSEPHYGHAGTVYGGVMYISGGITHDTFQKELMCFDPDTDKWIQKAPMTTVRGLHCMCTVGERLYVIGGNHFRGTSDYDDVLSCEYYSPILDQWTPIAAMLRGQSDVGVAVFENKIYVVGGYSWNNRCMVEIVQKYDPDKDEWHKVFDLPESLGGIRACTLTVFPPEETTPSPSRESPLSAP

SEQ ID NO: 49381 - protein, 105 aa, Homo sapiens [sequence omitted]

SEQ ID NO: 49382 - protein, 780 aa, Homo sapiens
MAEESSSSSSSSSPTAATSQQQQLKNKSILISSVASVHHANGLAKSSTTVSSFANSKPGSAKKLVIKNFKDKPKLPENYTDETWQKLKEAVEAIQNSTSIKYNLEELYQAVENLCSYKISANLYKQLRQICEDHIKAQIHQFREDSLDSVLFLKKIDRCWQNHCRQMIMIRSIFLFLDRTYVLQNSMLPSIWDMGLELFRAHIISDQKVQNKTIDGILLLIERERNGEAIDRSLLRSLLSMLSDLQIYQDSFEQRFLEETNRLYAAEGQKLMQEREVPEYLHHVNKRLEEEADRLITYLDQTTQKSLIATVEKQLLGEHLTAILQKGLNNLLDENRIQDLSLLYQLFSRVRGGVQVLLQQWIEYIKAFGSTIVINPEKDKTMVQELLDFKDKVDHIIDICFLKNEKFINAMKEAFETFINKRPNKPAELIAKYVDSKLRAGNKEATDEELEKMLDKIMIIFRFIYGKDVFEAFYKKDLAKRLLVGKSASVDAEKSMLSKLKHECGAAFTSKLEGMFKDMELSKDIMIQFKQYMQNQNVPGNIELTVNILTMGYWPTYVPMEVHLPPEMVKLQEIFKTFYLGKHSGRKLQWQSTLGHCVLKAEFKEGKKELQVSLFQTLVLLMFNEGEEFSLEEIKQATGIEDGELRRTLQSLACGKARVLAKNPKGKDIEDGDKFICNDDFKHKLFRIKINQIQMKETVEEQASTTERVFQDRQYQIDAAIVRIMKMRKTLSHNLLVSEVYNQLKFPVKPADLKKRIESLIDRDYMERDKENPNQYNYIA

SEQ ID NO: 49383 - protein, 782 aa, Homo sapiens
MAEESSSSSSSSSPTAATSQQQQLKNKSILISSVASVHHANGLAKSSTTVSSFANSKPGSAKKLVIKNFKDKPKLPENYTDETWQKLKEAVEAIQNSTSIKYNLEELYQAVENLCSYKISANLYKQLRQICEDHIKAQIHQFREDSLDSVLFLKKIDRCWQNHCRQMIMIRSIFLFLDRTYVLQNSMLPSIWDMGLELFRAHIISDQKVQNKTIDGILLLIERERNGEAIDRSLLRSLLSMLSDLQIYQDSFEQRFLEETNRLYAAEGQKLMQEREVPEYLHHVNKRLEEEADRLITYLDQTTQKSLIATVEKQLLGEHLTAILQKGLNNLLDENRIQDLSLLYQLFSRVRGGVQVLLQQWIEYIKAFGSTIVINPEKDKTMVQELLDFKDKVDHIIDICFLKNEKFINAMKEAFETFINKRPNKPAELIAKYVDSKLRAGNKEATDEELEKMLDKIMIIFRFIYGKDVFEAFYKKDLAKRLLVGKSASVDAEKSMLSKLKHECGAAFTSKLEGMFKDMELSKDIMIQFKQVKYMQNQNVPGNIELTVNILTMGYWPTYVPMEVHLPPEMVKLQEIFKTFYLGKHSGRKLQWQSTLGHCVLKAEFKEGKKELQVSLFQTLVLLMFNEGEEFSLEEIKQATGIEDGELRRTLQSLACGKARVLAKNPKGKDIEDGDKFICNDDFKHKLFRIKINQIQMKETVEEQASTTERVFQDRQYQIDAAIVRIMKMRKTLSHNLLVSEVYNQLKFPVKPADLKKRIESLIDRDYMERDKENPNQYNYIA

SEQ ID NO: 49384 - protein, 306 aa, Homo sapiens [sequence omitted]

SEQ ID NO: 49385 - protein, 623 aa, Homo sapiens
MSLTALRQQMQTQNLSAYIIPGTDAHMNEYIGQHDERRAWITGFTGSAGTAVVTMKKAAVWTDSRYWTQAERQMDCNWELHKEVGTTPIVTWLLTEIPAGGRVGFDPFLLSIDTWESYDLALQGSNRQLVSITTNLVDLVWGSERPPVPNQPIYALQEAFTGSTWQEKVSGVRSQMQKHQKVPTAVLLSALEETAWLFNLRASDIPYNPFFYSYTLLTDSSIRLFANKSRFSSETLSYLNSSCTGPMCVQIEDYSQVRDSIQAYSLGDVRIWIGTSYTMYGIYEMIPKEKLVTDTYSPVMMTKAVKNSKEQALLKASHVRDAVAVIRYLVWLEKNVPKGTVDEFSGAEIVDKFRGEEQFSSGPSFETISASGLNAALAHYSPTKELNRKLSSDEMYLLDSGGQYWDGTTDITRTVHWGTPSAFQKEAYTRVLIGNIDLSRLIFPAATSGRMVEAFARRALWDAGLNYGHGTGHGIGNFLCVHEWPVGFQSNNIAMAKGMFTSIEPGYYKDGEFGIRLEDVALVVEAKTKYPGSYLTFEVVSFVPYDRNLIDVSLLSPEHLQYLNRYYQTIREKVGPELQRRQLLEEFEWLQQHTEPLAARAPDTASWASVLVVSTLAILGWSV

SEQ ID NO: 49386 - protein, 1203 aa, Homo sapiens
MPSGTEQQTEGTSVTFSPLKSPPQLEREMASPPECSEMPLDLSSKSNRQKLPLPNQRKTPPMPVLTPVHTSSKALLSTVLSRSQRTTQAAGGNVTSCLGSTSSPFVIFPEIVRNGDPSTWVKNSTALISTIPGTYVGVANPVPASLLLNKDPNLGLNRDPRHLPKQEPISIIDQGEPKGTGATCGKKGSQAGAEGQPSTVKRYTPARIAPGLPGCQTKELSLWKPTGPANIYPRCSVNGKPTSTQVLPVGWSPYHQASLLSIGISSAGQLTPSQGAPIRPTSVVSEFSGVPSLSSSEAVHGLPEGQPRPGGSFVPEQDPVTKNKTCRIAAKPYEEQVNPVLLTLSPQTGTLALSVQPSGGDIRMNQGPEESESHLCSDSTPKMEGPQGACGLKLAGDTKPKNQVLATYMSHELVLATPQNLPKMPELPLLPHDSHPKELILDVVPSSRRGSSTERPQLGSQVDLGRVKMEKVDGDVVFNLATCFRADGLPVAPQRGQAEVRAKAGQARVKQESVGVFACKNKWQPDDVTESLPPKKMKCGKEKDSEEQQLQPQAKAVVRSSHRPKCRKLPSDPQESTKKSPRGASDSGKEHNGVRGKHKHRKPTKPESQSPGKRADSHEEGSLEKKAKSSFRDFIPVVLSTRTRSQSGSICSSFAGMADSDMGSQEVFPTEEEEEVTPTPAKRRKVRKTQRDTQYRSHHAQDKSLLSQGRRHLWRAREMPWRTEAARQMWDTNEEEEEEEEEGLLKRKKRRRQKSRKYQTGEYLTEQEDEQRRKGRADLKARKQKTSSSQSLEHRLRNRNLLLPNKVQGISDSPNGFLPNNLEEPACLENSEKPSGKRKCKTKHMATVSEEAKGKGRWSQQKTRSPKSPTPVKPTEPCTPSKSRSASSEEASESPTARQIPPEARRLIVNKNAGETLLQRAARLGYKDVVLYCLQKDSEDVNHRDNAGYTALHEACSRGWTDILNILLEHGANVNCSAQDGTRPVHDAVVNDNLETIWLLLSYGADPTLATYSGQTAMKLASSDTMKRFLSDHLSDLQGRAEGDPGVSWDFYSSSVLEEKDGFACDLLHNPPGSSDQEGDDPMEEDDFMFELSDKPLLPCYNLQVSVSRGPCNWFLFSDVLKRLKLSSRIFQARFPHFEITTMPKAEFYRQVASSQLLTPAERPGGLDDRSPPGSSETVELVRYEPDLLRLLGSEVEFQSCNS

SEQ ID NO: 49387 - protein, 380 aa, Homo sapiens
MQNNIADPEELFTKLERIGKGSFGEVFKGIDNRTQQVVAIKIIDLEEAEDEIEDIQQEITVLSQCDSSYVTKYYGSYLKGSKLWIIMEYLGGGSALDLLRAGPFDEFQIATMLKEILKGLDYLHSEKKIHRDIKAANVLLSEQGDVKLADFGVAGQLTDTQIKRNTFVGTPFWMAPEVIQQSAYDSKADIWSLGITAIELAKGEPPNSDMHPMRVLFLIPKNNPPTLVGDFTKSFKEFIDACLNKDPSFRPTAKELLKHKFIVKNSKKTSYLTELIDRFKRWKAEGHSDDESDSEGSDSESTSRENNTHPEWSFTTVRKKPDPKKVQNGAQDENNASRNQAIEELEKSIAVAEAACPGITDKMVKKLIEKFQKCSADESP

SEQ ID NO: 49388 - protein, 176 aa, Homo sapiens
MDRTERLARDVMKEMGGHHIVALCVLKGGYKFFADLLDYIKALNRNSDRSIPMTVDFIRLKSYCNDQSTGDIKVIGGDDLSTLTGKNVLIVEDIIDTGKTMQTLLSLVRQYNPKMVKVASLLVKRTPRSVGYKPDFVGFEIPDKFVVGYALDYNEYFRDLNHVCVISETGKAKYKA

SEQ ID NO: 49389 - protein, 728 aa, Homo sapiens
MPGSVEKFCLDPQTEADCINNINDFLKGCATLQVEIFDPDDLYSGVNFSKVLSTLLAVNKATEDQLSERPCGRSSSLSAANTSQTNPQGAVSSTVSGLQRQSKTVEMTENGSHQLIVKARFNFKQTNEDELSVCKGDIIYVTRVEEGGWWEGTLNGRTGWFPSNYVREIKSSERPLSPKAVKGFETAPLTKNYYTVVLQNILDTEKEYAKELQSLLVTYLRPLQSNNNLSTVEVTSLLGNFEEVCTFQQTLCQALEECSKFPENQHKVGGCLLSLMPHFKSMYLAYCANHPSAVNVLTQHSDELEQFMENQGASSPGILILTTNLSKPFMRLEKYVTLLQELERHMEDTHPDHQDILKAIVAFKTLMGQCQDLRKRKQLELQILSEPIQAWEGEDIKNLGNVIFMSQVMVQYGACEEKEERYLMLFSNVLIMLSASPRMSGFIYQGKIPIAGTVVTRLDEIEGNDCTFEITGNTVERIVVHCNNNQDFQEWLEQLNRLIRGPASCSSLSKTSSSSCSAHSSFSSTGQPRGPLEPPQIIKPWSLSCLRPAPPLRPSAALGYKERMSYILKESSKSPKTMKKFLHKRKTERKPSEEEYVIRKSTAALEEDAQILKVIEAYCTSANFQQGHGSSTRKDSIPQVLLPEEEKLIIEETRSNGQTIMEEKSLVDTVYALKDEVRELKQENKRMKQCLEEELKSRRDLEKLVRRLLKQTDECIRGESSSKTSILP

SEQ ID NO: 49390 - protein, 120 aa, Homo sapiens
MGGRAPVSRGRDSYGGPPRREPLPSRRDVYLSPRDDGYSTKDSYSSRDYPSSRDTRDYAPPPRDYTYRDYGHSSSRDDYPSRGYSDRDGYGRDRDYSDHPSGGSYRDSYESYGKILVKGL

SEQ ID NO: 49391 - protein, 844 aa, Homo sapiens
MALNYQGKSQKRSAVEKSINAFLIVYLFILLTKAAVCTTLKYVWQSTPYNDEPWYNQKTQKERETLKVLKMFTDFLSFMVLFNFIIPVSMYVTVEMQKFLGSFFISWDKDFYDEEINEGALVNTSDLNEELGQVDYVFTDKTGTLTENSMEFIECCIDGHKYKGVTQEVDGLSQTDGTLTYFDKVDKNREELFLRALCLCHTVEIKTNDAVDGATESAELTYISSSPDEIALVKGAKRYGFTFLGNRNGYMRVENQRKEIEEYELLHTLNFDAVRRRMSVIVKTQEGDILLFCKGADSAVFPRVQNHEIELTKVHVERNAMDGYRTLCVAFKEIAPDDYERINRQLIEAKMALQDREEKMEKVFDDIETNMNLIGATAVEDKLQDQAAETIEALHAAGLKVWVLTGDKMETAKSTCYACRLFQTNTELLELTTKTIEESERKEDRLHELLIEYRKKLLHEFPKSTRSFKKAWTEHQEYGLIIDGSTLSLILNSSQDSSSNNYKSIFLQICMKCTAVLCCRMAPLQKAQIVRMVKNLKGSPITLSIGDGANDVSMILESHVGIGKEGRQAARNSDYSVPKFKHLKKLLLAHGHLYYVRIAHLVQYFFYKNLCFILPQFLYQFFCGFSQQPLYDAAYLTMYNICFTSLPILAYSLLEQHINIDTLTSDPRLYMKISGNAMLQLGPFLYWTFLAAFEGTVFFFGTYFLFQTASLEENGKVYGNWTFGTIVFTVLVFTVTLKLALDTRFWTWINHFVIWGSLAFYVFFSFFWGGIIWPFLKQQRMYFVFAQMLSSVSTWLAIILLIFISLFPEILLIVLKNVRRRSARNPNLELPMLLSYKHTDSGYS

SEQ ID NO: 49392 - protein, 860 aa, Homo sapiens
MALNYQGKSQKRSAVEKSINAFLIVYLFILLTKAAVCTTLKYVWQSTPYNDEPWYNQKTQKERETLKVLKMFTDFLSFMVLFNFIIPVSMYVTVEMQKFLGSFFISWDKDFYDEEINEGALVNTSDLNEELGQVDYVFTDKTGTLTENSMEFIECCIDGHKYKGVTQEVDGLSQTDGTLTYFDKVDKNREELFLRALCLCHTVEIKTNDAVDGATESAELTYISSSPDEIALVKGAKRYGFTFLGNRNGYMRVENQRKEIEEYELLHTLNFDAVRRRMSVIVKTQEGDILLFCKGADSAVFPRVQNHEIELTKVHVERNAMDGYRTLCVAFKEIAPDDYERINRQLIEAKMALQDREEKMEKVFDDIETNMNLIGATAVEDKLQDQAAETIEALHAAGLKVWVLTGDKMETAKSTCYACRLFQTNTELLELTTKTIEESERKEDRLHELLIEYRKKLLHEFPKSTRSFKKAWTEHQEYGLIIDGSTLSLILNSSQDSSSNNYKSIFLQICMKCTAVLCCRMAPLQKAQIVRMVKNLKGSPITLSIGDGANDVSMILESHVGIGIKGKEGRQAARNSDYSVPKFKHLKKLLLAHGHLYYVRIAHLVQYFFYKNLCFILPQFLYQFFCGFSQQPLYDAAYLTMYNICFTSLPILAYSLLEQHINIDTLTSDPRLYMKISGNAMLQLGPFLYWTFLAAFEGTVFFFGTYFLFQTASLEENGKVYGNWTFGTIVFTVLVFTVTLKLALDTRFWTWINHFVIWGSLAFYVFFSFFWGGIIWPFLKQQRMYFVFAQMLSSVSTWLAIILLIFISLFPEILLIVLKNVRRRSARRNLSCRRASDSLSARPSVRPLLLRTFSDESNVL

SEQ ID NO: 49393 - protein, 321 aa, Homo sapiens
MVEQLLARGYAVNVFDIQQGFDNPQVRFFLGDLCSRQDLYPALKGVNTVFHCASPPPSSNNKELFYRVNYIGTKNVIETCKEAGVQKLILTSSASVIFEGVDIKNGTEDLPYAMKPIDYYTETKILQERAVLGANDPEKNFLTTAIRPHGIFGPRDPQLVPILIEAARNGKMKFVIGNGKNLVDFTFVENVVHGHILAAEQLSRDSTLGGKAFHITNDEPIPFWTFLSRILTGLNYEAPKYHIPYWVAYYLALLLSLLVMVISPVIQLQPTFTPMRVALAGTFHYYSCERAKKAMGYQPLVTMDDAMERTVQSFRHLRRVK

SEQ ID NO: 49394 - protein, 428 aa, Homo sapiens
MSHPCVSLLGVPVLNPALVPHLAQGQVLLVSDPSPNTDPAKYSESTSATRHQMKGEDAQPQEMASTSFPRASGPSPEFRQHGDSDGKRGSPQNLPIEHHFACKECGDTFRLKVLLVQHQRVHSEEKGWECGDCGKVFRGVAEFNEHRKSHVAAEPQPGPSRALENAAEKREQMEREAKPFECEECGKRFKKNAGLSQHLRVHSREKPFDCEECGRSFKVNTHLFRHQKLHTSEKPFACKACSRDFLDRQELLKHQRMHTGHLPFDCDDCGKSFRGVNGLAEHQRIHSGAKPYGCPHCGKLFRRSSELTKHRRIHTGEKPYACGQCGKAFRQSSSLLEHARIHSGERPYACGECGKAFRGPSDLIKHRRIHSGLKPYECDKCGKAFRRSSGLSRHRRIHSGARRCECSQCGRVFKRRSALQKHQPTHHE

SEQ ID NO: 49395 - protein, 206 aa, Homo sapiens
MRSIPIATACTIYHKFFCETNLDAYDPYLIAMSSIYLAGKVEEQHLRTRDIINVSNRYFNPSGEPLELDSRFWELRDSIVQCELLMLRVLRFQVSFQHPHKYLLHYLVSLQNWLNRHSWQRTPVAVTAWALLRDSYHGALCLRFQAQHIAVAVLYLALQVYGVEVPAEVEAEKPWWQVFNDDLTKPIIDNIVSDLIQIYTMDTEIP

SEQ ID NO: 49396 - protein, 1891 aa, Homo sapiens
MARWPPFGLCLLLLLLSPPPLPLTGAHRFSAPNTTLNHLALAPGRGTLYVGAVNRLFQLSPELQLEAVAVTGPVIDSPDCVPFRDPAECPQAQLTDNANQLLLVSSRAQELVACGQVRQGVCETRRLGDVAEVLYQAEDPGDGQFVAANTPGVATVGLVVPLPGRDLLLVARGLAGKLSAGVPPLAIRQLAGSQPFSSEGLGRLVVGDFSDYNNSYVGAFADARSAYFVFRRRGARAQAEYRSYVARVCLGDTNLYSYVEVPLACQGQGLIQAAFLAPGTLLGVFAAGPRGTQAALCAFPMVELGASMEQARRLCYTAGGRGPSGAEEATVEYGVTSRCVTLPLDSPESYPCGDEHTPSPIAGRQPLEVQPLLKLGQPVSAVAALQADGHMIAFLGDTQGQLYKVFLHGSQGQVYHSQQVGPPGSAISPDLLLDSSGSHLYVLTAHQVDRIPVAACPQFPDCASCLQAQDPLCGWCVLQGRCTRKGQCGRAGQLNQWLWSYEEDSHCLHIQSLLPGHHPRQEQGQVTLSVPRLPILDADEYFHCAFGDYDSLAHVEGPHVACVTPPQDQVPLNPPGTDHVTVPLALMFEDVTVAATNFSFYDCSAVQALEAAAPCRACVGSIWRCHWCPQSSHCVYGEHCPEGERTIYSAQEVDIQVRGPGACPQVEGLAGPHLVPVGWESHLALRVRNLQHFRGLPASFHCWLELPGELRGLPATLEETAGDSGLIHCQAHQFYPSMSQRELPVPIYVTQGEAQRLDNTHALYVILYDCAMGHPDCSHCQAANRSLGCLWCADGQPACRYGPLCPPGAVELLCPAPSIDAVEPLTGPPEGGLALTILGSNLGRAFADVQYAVSVASRPCNPEPSLYRTSARIVCVTSPAPNGTTGPVRVAIKSQPPGISSQHFTYQDPVLLSLSPRWGPQAGGTQLTIRGQHLQTGGNTSAFVGGQPCPILEPVCPEAIVCRTRPQAAPGEAAVLVVFGHAQRTLLASPFRYTANPQLVAAEPSASFRGGGRLIRVRGTGLDVVQRPLLSVWLEADAEVQASRAQPQDPQPRRSCGAPAADPQACIQLGGGLLQCSTVCSVNSSSLLLCRSPAVPDRAHPQRVFFTLDNVQVDFASASGGQGFLYQPNPRLAPLSREGPARPYRLKPGHVLDVEGEGLNLGISKEEVRVHIGRGECLVKTLTRTHLYCEPPAHAPQPANGSGLPQFVVQMGNVQLALGPVQYEAEPPLSAFPVEAQAGVGMGAAVLIAAVLLLTLMYRHKSKQALRDYQKVLVQLESLETGVGDQCRKEFTDLMTEMTDLSSDLEGSGIPFLDYRTYAERAFFPGHGGCPLQPKPEGPGEDGHCATVRQGLTQLSNLLNSKLFLLTLIHTLEEQPSFSQRDRCHVASLLSLALHGKLEYLTDIMRTLLGDLAAHYVHRNPKLMLRRTETMVEKLLTNWLSICLYAFLREVAGEPLYMLFRAIQYQVDKGPVDAVTGKAKRTLNDSRLLREDVEFQPLTLMVLVGPGAGGAAGSSEMQRVPARVLDTDTITQVKEKVLDQVYKGTPFSQRPSVHALDLEWRSGLAGHLTLSDEDLTSVTQNHWKRLNTLQHYKVPDGATVGLVPQLHRGSTISQSLAQRCPLGENIPTLEDGEEGGVCLWHLVKATEEPEGAKVRCSSLREREPARAKAIPEIYLTRLLSMKGTLQKFVDDTFQAILSVNRPIPIAVKYLFDLLDELAEKHGIEDPGTLHIWKTNSLLLRFWVNALKNPQLIFDVRVSDNVDAILAVIAQTFIDSCTTSEHKVGRDSPVNKLLYAREIPRYKQMVERYYADIRQSSPASYQEMNSALAELSGNYTSAPHCLEALQELYNHIHRYYDQIISALEEDPVGQKLQLACRLQQVAALVENKVTDL

SEQ ID NO: 49397 - protein, 107 aa, Homo sapiens
MNMQHCNLLCLPENYQMKYYFYHGLSWPQLSYIAEDENGKIVGYVLAKMEEDPDDVPHGHITSLAVKRSHRRLGLAQKLMDQASRAMIENFNAKYVSLHVRKRWKPG

SEQ ID NO: 49398 - protein, 686 aa, Homo sapiens [sequence omitted]

SEQ ID NO: 49399 - protein, 425 aa, Homo sapiens [sequence omitted]

SEQ ID NO: 49400 - protein, 233 aa, Homo sapiens
MRTVAEKVDAVRIVHIHSVIILRRSDKRKDRVEISPEQLSAASTEAERLAELTGRPMRVVGWYHSHPHITVWPSHVDVRTQAMYQMMDQGFVGLIFSCFIEDKNTKTGRVLYTCFQSIQAQKSSEYERIEIPIHIVPHVTIGKVCLESAVELPKILCQEEQDAYRRIHSLTHLDSVTKIHNGSVFTKNLCSQMSAVSGPLLQWLEDRLEQNQQHLQELQQEKEELMQELSSLE

SEQ ID NO: 49401 - protein, 108 aa, Homo sapiens
MNRSSGTPGRPHPGAPRVAASLFLGTFFISSGLILSVAGFFYLKRSSKLPRACYRRNKAPALQPGEAAAMIPPPQSSVRKPRYVRRERPLDRATDPAAFPGEARISNV

SEQ ID NO: 49402 - protein, 111 aa, Homo sapiens [sequence omitted]

SEQ ID NO: 49403 - protein, 90 aa, Homo sapiens
MYNDLLRKDKELYPSGLPFKNPPCGPPWKVLRVARAQEACHPVQCTHWLLCLCESLVSIPGARRIVHGLVPVPPMAVGVVRRTDTVWGSP

SEQ ID NO: 49404 - protein, 1009 aa, Homo sapiens
MGWKPSEARGQSQSFQASGLQPRSLKAARRATGRPDRSRAARPTMDPSAHRSRAAPPNMDPDPQAGVQVGMRVVRGVDWKWGQQDGGEGGVGTVVELGRHGSPSTPDRTVVVQWDQGTRTNYRAGYQGAHDLLLYDNAQIGVRHPNIICDCCKKHGLRGMRWKCRVCLDYDLCTQCYMHNKHELAHAFDRYETAHSRPVTLSPRQGLPRIPLRGIFQGAKVVRGPDWEWGSQDGGEGKPGRVVDIRGWDVETGRSVASVTWADGTTNVYRVGHKGKVDLKCVGEAAGGFYYKDHLPRLGKPAELQRRVSADSQPFQHGDKVKCLLDTDVLREMQEGHGGWNPRMAETGTVHRITDRGDVRVQFNHETRWTFHPGALTKHHSFWVGDVVRVIGDLDTVKRLQAGHGEWTDDMAPALGRVGKVVKVFGDGNLRVAVAGQRWTFSPSCLVAYRPEEDANLDVAERARENKSSLSVALDKLRAQKSDPEHPGRLVVEVALGNAARALDLLRRRPEQVDTKNQGRTALQVAAYLGQVELIRLLLQARAGVDLPDDEGNTALHYAALGNQPEATRVLLSAGCRADAINSTQSTALHVAVQRGFLEVVRALCERGCDVNLPDAHSDTPLHSAISAGTGASGIVEVLTEVPNIDVTATNSQGFTLLHHASLKGHALAVRKILARARQLVDAKKEDGFTALHLAALNNHREVAQILIREGRCDVNVRNRKLQSPLHLAVQQAHVGLVPLLVDAGCSVNAEDEEGDTALHVALQRHQLLPLVADGAGGDPGPLQLLSRLQASGLPGSAELTVGAAVACFLALEGADVSYTNHRGRSPLDLAAEGRVLKALQGCAQRFRERQAGGGAAPGPRQTLGTPNTVTNLHVGAAPGPEAAECLVCSELALLVLFSPCQHRTVCEECARRMKKCIRCQVVVSKKLRPDGSEVASAAPAPGPPRQLVEELQSRYRQMEERITCPICIDSHIRLVFQCGHGACAPCGSALSACPICRQPIRDRIQIFV

SEQ ID NO: 49405 - protein, 296 aa, Homo sapiens
MRTRRTLRGHLAKIYAMHWGTDSRLLVSASQDGKLIIWDSYTTNKVHAIPLRSSWVMTCAYAPSGNYVACGGLDNICSIYNLKTREGNVRVSRELAGHTGYLSCCRFLDDNQIVTSSGDTTCALWDIETGQQTTTFTGHTGDVMSLSLAPDTRLFVSGACDASAKLWDVREGMCRQTFTGHESDINAICFFPNGNAFATGSDDATCRLFDLRADQELMTYSHDNIICGITSVSFSKSGRLLLAGYDDFNCNVWDALKADRAGVLAGHDNRVSCLGVTDDGMAVATGSWDSFLKIWN

SEQ ID NO: 49406 - protein, 65 aa, Homo sapiens
MDNSVFLDDDSNQPMPVSRFFGNVELMQDLPPASSSCPSMSRREFRKMHFRAKDDDDDDDDDAEM

SEQ ID NO: 49407 - protein, 331 aa, Homo sapiens [sequence omitted]

SEQ ID NO: 49408 - protein, 23 aa, Homo sapiens
MWAIGITVLVIFIIIIIVWVVSS

SEQ ID NO: 49409 - protein, 1036 aa, Homo sapiens [sequence omitted]

SEQ ID NO: 49410 - protein, 364 aa, Homo sapiens [sequence omitted]

SEQ ID NO: 49411 - protein, 248 aa, Homo sapiens [sequence omitted]

SEQ ID NO: 49412 - protein, 944 aa, Homo sapiens
MPLAGMSLGSLKSEFVPSTSTKQQGPQPTLSVGQESSSPEDHVCLLDCVVVDLQDMDIFAAERHPREYSKAPEDSSGDLIFPSYFVRQTGGSLLTEPCRLKLQVERNLDKEISHTVPDISIHGNLSSVHCSLDLYKYKLIRGLLENNLGEPIEEFMRPYDLQDPRIHTVLSGEVYTCMCFLIDMVNVSLELKDPKRKEGAGSLARFDFKKCKLLYESFSNQTKSINLVSHSMMAFDTRYAGQKTSPGMTNVFSCIFQPAKNSSTTQGSIQIELHFRSTKDSSCFTVVLNNLRVFLIFDWLLLVHDFLHTPSDIKKQNHVTPSRHRNSSSESAIVPKTVKSGVVTKRSSLPVSNERHLEVKVNVTGTEFVVIEDVSCFDTNAIILKGTTVLTYKPRFVDRPFSGSLFGIEVFSCRLGNEHDTALSIVDPVQIQMELVGNSSYQNSSGLMDAFNSEDFPPVLEIQLQALDIRLSYNDVQLFLAIAKSIPEQANAAVPDSVALESDSVGTYLPGASRVGEEIREGTRHTLDPVLELQLARLQELGFSMDDCRKALLACQGQLKKAASWLFKNAEPLKSLSLASTSRDSPGAVAAPLISGVEIKAESVCICFIDDCMDCDVPLAELTFSRLNFLQRVRTSPEGYAHFTLSGDYYNRALSGWEPFIEPWPCSVSWQQQAASRLHPPRLKLEAKAKPRLDINITSVLIDQYVSTKESWMADYCKDDKDIESAKSEDWMGSSVDPPCFGQTEVKTPKRRQPFVPFALRNHTGCTLWFATLTTTPTRAALSHSGSPGVVPEGNGTFLDDTHNVSEWREVLTGEEIPFEFEARGKLRHRHTHDLRIHQLQVRVNGWEQVSPVSVDKVGTFFRYAAPDKNSSSSTIGSPSSRTNIIHPQVYFSSLPPVRVVFAVTMEGSARKVITVRSALIVRNRLETPMELRLDSPSAPDSMF

SEQ ID NO: 49413 - protein, 293 aa, Homo sapiens
MRLPVQTSPEGLDAAFIGVPLDTGTSNRPGARFGPRRIREESVMLGTVNPSTGALPFQSLMVADLGDVNVNLYNLQDSCRRIQEAYEKIVAAGCIPLTLGGDHTITYPILQAMAKKHGPVGLLHVDAHTDTTDKALGEKLYHGAPFRRCVDEGLLDCKRVVQIGIRGSSTTLDPYRYNRSQGFRVVLAEDCWMKSLVPLMGEVRQQMGGKPIYISFDIDALDPAYAPGTGTPEIAGLTPSQALEIIRGCQGLNVMGCDLVEVSPPYDLSGNTALLAANLLFEMLCALPKVTTV

SEQ ID NO: 49414 - protein, 249 aa, Homo sapiens [sequence omitted]

SEQ ID NO: 49415 - protein, 261 aa, Homo sapiens [sequence omitted]

SEQ ID NO: 49416 - protein, 284 aa, Homo sapiens [sequence omitted]

SEQ ID NO: 49417 - protein, 79 aa, Homo sapiens [sequence omitted]

SEQ ID NO: 49418 - protein, 739 aa, Homo sapiens
MRFVFDRQTGHKKKLNTYIGFSEILDMEPYVEHKGGSYVYELSAVLIHRGVSAYSGHYIAHVKDPQSGEWYKFNDEDIEKMEGKKLQLGIEEDLAEPSKSQTRKPKCGKGTHCSRNAYMLVYRLQTQEKPNTTVQVPAFLQELVDRDNSKFEEWCIEMAEMRKQSVDKGKAKHEEVKELYQRLPAGAEPYEFVSLEWLQKWLDESTPTKPIDNHACLCSHDKLHPDKISIMKRISEYAADIFYSRYGGGPRLTVKALCKECVVERCRILRLKNQLNEDYKTVNNLLKAAVKGSDGFWVGKSSLRSWRQLALEQLDEQDGDAEQSNGKMNGSTLNKDESKEERKEEEELNFNEDILCPHGELCISENERRLVSKEAWSKLQQYFPKAPEFPSYKECCSQCKILEREGEENEALHKMIANEQKTSLPNLFQDKNRPCLSNWPEDTDVLYIVSQFFVEEWRKFVRKPTRCSPVSSVGNSALLCPHGGLMFTFASMTKEDSKLIALIWPSEWQMIQKLFVVDHVIKITRIEVGDVNPSETQYISEPKLCPECREGLLCQQQRDLREYTQATIYVHKVVDNKKVMKDSAPELNVSSSETEEDKEEAKPDGEKDPDFNQSNGGTKRQKISHQNYIAYQKQVIRRSMRHRKVRGEKALLVSANQTLKELKIQIMHAFSVAPFDQNLSIDGKILSDDCATLGTLGVIPESVILLKADEPIADYAAMDDVMQVCMPEEGFKGTGLLGH

SEQ ID NO: 49419 - protein, 751 aa, Homo sapiens
MRFVFDRQTGHKKKLNTYIGFSEILDMEPYVEHKGGSYVYELSAVLIHRGVSAYSGHYIAHVKDPQSGEWYKFNDEDIEKMEGKKLQLGIEEDLEPSKSQTRKPKCGKGTHCSRNAYMLVYRLQTQEKPNTTVQVPAFLQELVDRDNSKFEEWCIEMAEMRKQSVDKGKAKHEEVKELYQRLPAGAEPYEFVSLEWLQKWLDESTPTKPIDNHACLCSHDKLHPDKISIMKRISEYAADIFYSRYGGGPRLTVKALCKECVVERCRILRLKNQLNEDYKTVNNLLKAAVKGSDGFWVGKSSLRSWRQLALEQLDEQDGDAEQSNGKMNGSTLNKDESKEERKEEEELNFNEDILCPHAVFFFSKYIFLNSGELCISENERRLVSKEAWSKLQQYFPKAPEFPSYKECCSQCKILEREGEENEALHKMIANEQKTSLPNLFQDKNRPCLSNWPEDTDVLYIVSQFFVEEWRKFVRKPTRCSPVSSVGNSALLCPHGGLMFTFASMTKEDSKLIALIWPSEWQMIQKLFVVDHVIKITRIEVGDVNPSETQYISEPKLCPECREGLLCQQQRDLREYTQATIYVHKVVDNKKVMKDSAPELNVSSSETEEDKEEAKPDGEKDPDFNQSNGGTKRQKISHQNYIAYQKQVIRRSMRHRKVRGEKALLVSANQTLKELKIQIMHAFSVAPFDQNLSIDGKILSDDCATLGTLGVIPESVILLKADEPIADYAAMDDVMQVCMPEEGFKGTGLLGH

SEQ ID NO: 49420 - protein, 189 aa, Homo sapiens [sequence omitted]

SEQ ID NO: 49421 - protein, 288 aa, Homo sapiens
MDSVRRGAQLAIEECQYQFRNRRWNCSTLDSLPVFGKVVTQGTREAAFVYAISSAGVAFAVTRACSSGELEKCGCDRTVHGVSPQGFQWSGCSDNIAYGVAFSQSFVDVRERSKGASSSRALMNLHNNEAGRKAILTHMRVECKCHGVSGSCEVKTCWRAVPPFRQVGHALKEKFDGATEVEPRRVGSSRALVPRNAQFKPHTDEDLVYLEPSPDFCEQDMRSGVLGTRGRTCNKTSKAIDGCELLCCGRGFHTAQVELAERCSCKFHWCCFVKCRQCQRLVELHTCR

SEQ ID NO: 49422 - protein, 767 aa, Homo sapiens
MAKLEKERDRARVTGGIPGEVAQDMQRERRIFQLHMCEYLLKAGESQMKQGPDFLQSLIKFFHAQHNFFQDGWKAAQSLFPFIEKLAASVHALHQAQEDELQKLTQLRDSLRGTLQLESREEHLSRKNSGCGYSIHQHQGNKQFGTEKVGFLYKKSDGIRRVWQKRKCGVKYGCLTISHSTINRPPVKLTLLTCQVRPNPEEKKCFDLVTHNRTYHFQAEDEHECEAWVSVLQNSKDEALSSAFLGEPSAGPGSWGSAGHDGEPHDLTKLLIAEVKSRPGNSQCCDCGAADPTWLSTNLGVLTCIQCSGVHRELGVRFSRMQSLTLDLLGPSELLLALNMGNTSFNEVMEAQLPSHGGPKPSAESDMGTRRDYIMAKYVEHRFARRCTPEPQRLWTAICNRDLLSVLEAFANGQDFGQPLPGPDAQAPEELVLHLAVKVANQASLPLVDFIIQNGGHLDAKAADGNTALHYAALYNQPDCLKLLLKGRALVGTVNEAGETALDIARKKHHKECEELLEQAQAGTFAFPLHVDYSWVISTEPGSDSEEDEEEKVGPSPVPQASGWQKERARLGLRCLLKLPAQAHWASGRLDISNKTYETVASLGAATPQGESEDCPPPLPVKNSSRTLVQGCARHASGDRSEVSSLSSEAPETPESLGSPASSSSLMSPLEPGDPSQAPPNSEEGLREPPGTSRPSLTSGTTPSEMYLPVRFSSESTRSYRRGARSPEDGPSARQPLPRRNVPVGITEGDGSRTGSLPASSVQLLQD

SEQ ID NO: 49423 - protein, 75 aa, Homo sapiens
MFPSMCARLDTIISKYPAANAYTIPSDFISKRDFSNSCSSMFQLPSFMKALKFETPAPNYYNVRTLPMLAKYRSN

SEQ ID NO: 49424 - protein, 292 aa, Homo sapiens
MTKSKDGFLGVSRLALSGLRNWTAAASPSAVFATRHFQPFLPPPGQELGEPWWIIPSELSMFTGYLSNNRFYPPPPKGKEVIIHRLLSMFHPRPFVKTRFAPQGAVACLTAISDFYYTVMFRIHAEFQLSEPPDFPFWFSPAQFTGHIILSKDATHVRDFRLFVPNHRSLNVDMEWLYGASESSNMEVDIGYIPQMELEATGPSVPSVILDEDGSMIDSHLPSGEPLQFVFEEIKWQQELSWEEAARRLEVAMYPFKKVSYLPFTEAFDRAKAENKLVHSILLWGALDDQSC

SEQ ID NO: 49425 - protein, 65 aa, Homo sapiens
MICLPNGTVVHHINANYFLDITSVKPEEIESNLFSFSSTFEDPSTATYMQFLKEGLRRGLPLLQP

SEQ ID NO: 49426 - protein, 183 aa, Homo sapiens
MQRNASVPNLRGSEERLLALKKPALPALSRTTELQDELSHLRSQIAKIVAADAGSSNVSSPLPCFGSSFHSTTSFVISDITEETEVEVPELPSVPLLCSASPECCKPEHKAACSSSEEDDCVSLSKASSFADMMGILKDFHRMKQSQDLNRSLLKEEDPAVLISEVLRRKFALKEEDISRKGN

SEQ ID NO: 49427 - protein, 6 aa, Homo sapiens
MLKHDD

SEQ ID NO: 49428 - protein, 410 aa, Homo sapiens
MSSGRVDNLAVVMGLHPDYFTSFWRLHYLLLHTDGPLASSWRHYIAIMAAARHQCSYLVGSHMAEFLQTGGDPEWLLGLHRAPEKLRKLSEINKLLAHRPWLITKEHIQALLKTGEHTWSLAELIQALVLLTHCHSLSSFVFGCGILPEGDADGSPAPQAPTPPSEQSSPPSRDPLNNSGGFESARDVEALMERMQQLQESLLRDEGTSQEEMESRFELEKSESLLVTPSADILEPSPHPDMLCFVEDPTFGYEDFTRRGAQAPPTFRAQDYTWEDHGYSLIQRLYPEGGQLLDEKFQAAYSLTYNTIAMHSGVDTSVLRRAIWNYIHCVFGIRYDDYDYGEVNQLLERNLKVYIKTVACYPEKTTRRMYNLFWRHFRHSEKVHVNLLLLEARMQAALLYALRAITRYMT

SEQ ID NO: 49429 - protein, 342 aa, Homo sapiens
MKRALEKLDGTEVNGRKIRLVEDKPGSRRRRSYSRSRSHSRSRSRSRHSRKSRSRSGSSKSSHSKSRSRSRSGSRSRSKSRSRSQSRSRSKKEKSRSPSKEKSRSRSHSAGKSRSKSKDQAEEKIQNNDNVGKPKSRSPSRHKSKSKSRSRSQERRVEEEKRGSVSRGRSQEKSLRQSRSRSRSKGGSRSRSRSRSKSKDKRKGRKRSREESRSRSRSRSKSERSRKRGSKRDSKAGSSKKKKKEDTDRSQSRSPSRSVSKEREHAKSESSQREGRGESENAGTNQETRSRSRSNSKSKPNLPSESRSRSKSASKTRSRSKSRSRSASRSPSRSRSRSHSRS

SEQ ID NO: 49430 - protein, 149 aa, Homo sapiens
MKELKQALVNCNWSSFNDETCLMMINMFDKTKSGRIDVYGFSALWKFIQQWKNLFQQYDRDRSGSISYTELQQALSQMGYNLSPQFTQLLVSRYCPRSANPAMQLDRFIQVCTQLQVLTEAFREKDTAVQGNIRLSFEDFVTMTASRML

SEQ ID NO: 49431 - protein, 43 aa, Homo sapiens
MGHTGAVWCVDADWDTKHVLTGSADNSCRLWDCETVWRGVGEC

SEQ ID NO: 49432 - protein, 217 aa, Homo sapiens
MFSTDKQMGYQCFVSFFDLRDPSQIDNNEPYMKIPCNDSKITSAVWGPLGECIIAGHESGELNQYSAKSGEVLVNVKEHSRQINDIQLSRDMTMFVTASKDNTAKLFDSTTLEHQKTFRTERPVNSAALSPNYDHVVLGGGQEAMDVTTTSTRIGKFEARFFHLAFEEEFGRVKGHFGPINSVAFHPDGKSYSSGGEDGYVRIHYFDPQYFEFEFEA

SEQ ID NO: 49433 - protein, 416 aa, Homo sapiens
MKRDLTEFTQVVQHDTACTIAATASVVKEKLAIAACSRGACFLCPFSIQTEGSSGATEKMKKGLSDFLGVISDTFAPSPDKTIDCDVITLMGTPSGTAEPYDGTKARLYSLQSDPATYCNEPDGPPELFDAWLSQFCLEEKKGEISELLVGSPSIRALYTKMVPAAVSHSEFWHRYFYKVHQLEQEQARRDALKQRAEQSISEEPGWEEEEEELMGISPISPKEAKVPVAKISTFPEGEPGPQSPCEENLVTSVEPPAEVTPSESSESISLVTQIANPATAPEARVLPKDLSQKLLEASLEEQGLAVDVGETGPSPPIHSKPLTPAGHTGGPEPRPPARVETLREEAPTDLRVFELNSDSGKSTPSNNGKKGSSTDISEDWEKDFDLDMTEEEVQMALSKVDASGELEDVEWEDWE

SEQ ID NO: 49434 - protein, 180 aa, Homo sapiens [sequence omitted]

SEQ ID NO: 49435 - protein, 180 aa, Homo sapiens
MVASGSELGKKLKATMDAGKLVSDEMVVELIEKNLETPLCKNGFLLDGFPRTVRQAEMLDDLMEKRKEKLDSVIEFSIPDSLLIRRITGRLIHPKSGRSYHEEFNPPKEPMKDDITGEPLIRRSDDNEKALKIRLQAYHTQTTPLIEYYRKRGIHSAIDASQTPDVVFASILAAFSKATC

SEQ ID NO: 49436 - protein, 661 aa, Homo sapiens
MGPGPGQSGPKPPIPPPPPHQQQQQPPPQQPPPQQPPPHQPPPHPQPHQQQQPPPPPQDSSKPVVAQGPGPAPGVGSAPPASSSAPPATPPTSGAPPGSGPGPTPTPPPAVTSAPPGAPPPTPPSSGVPTTPPQAGGPPPPPAAVPGPGPGPKQGPGPGGPKGGKMPGGPKPGGGPGLSTPGGHPKPPHRGGGEPRGGRQHHPPYHQQHHQGPPPGGPGGRSEEKISDSEGFKANLSLLRRPGEKTYTQRCRLFVGNLPADITEDEFKRLFAKYGEPGEVFINKGKGFGFIKLESRALAEIAKAELDDTPMRGRQLRVRFATHAAALSVRNLSPYVSNELLEEAFSQFGPIERAVVIVDDRGRSTGKGIVEFASKPAARKAFERCSEGVFLLTTTPRPVIVEPLEQLDDEDGLPEKLAQKNPMYQKERETPPRFAQHGTFEYEYSQRWKSLDEMEKQQREQVEKNMKDAKDKLESEMEDAYHEHQANLLRQDLMRRQEELRRMEELHNQEMQKRKEMQLRQEEERRRREEEMMIRQREMEEQMRRQREESYSRMGYMDPRERDMRMGGGGAMNMGDPYGSGGQKFPPLGGGGGIGYEANPGVPPATMSGSMMGSDMRTERFGQGGAGPVGGQGPRGMGPGTPAGYGRGREEYEGPNKKPRF

SEQ ID NO: 49437 - protein, 167 aa, Homo sapiens
MFKMSEKILLLCVGEAGDTVQFAEYIQKNVQLYKMRNGYELSPTAAANFTRRNLADCLRSRTPYHVNLLLAGYDEHEGPALYYMDYLAALAKAPFAAHGYGAFLTLSILDRYYTPTISRERAVELLRKCLEELQKRFILNLPTFSVRIIDKNGIHDLDNISFPKQGS

SEQ ID NO: 49438 - protein, 1107 aa, Homo sapiens
MEKIRQLKKKETKNQEDDVEQPFNDSGCLLVDKDLFETGLEDENNSPLEDEESLESIRAAVKNKVKKHKKKEPSLESGVHSFEEGSELSKGTTRKERKAARLSKEALKQLHSETQRLIRESALNLPYHMPENKTIHDFFKRKPRPTCHGNAMALLKSSKYQSSHHKEIIDTANTTEMNSDHHSKGSEQTTGAENEVETNALPVVSKETQIITGSDESCRKDLVKNEELEIQEKQKQSDIRPSPGDSSVLQQESNFLGNNHSEECQVGGLVAFEPHALEGEGPQNPEETDEKVEEPEQQNKSSAVGPPEKVRRFTLDRLKQLGVDVSIKPRLGADEDSFVILEPETNRELEALKQRFWKHANPAAKPRAGQTVNVNVIVKDMGTDGKEELKADVVPVTLAPKKLDGASHTKPGEKLQVLKAKLQEAMKLRRFEERQKRQALFKLDNEDGFEEEEEEEEEMTDESEEDGEEKVEKEEKEEELEEEEEKEEEEEEEGNQEDSSSKMGYFPTEEKSETDENSGKQPSKLDEDDSCSLLTKESSHNSSFELIGSTIPSYQPCNRQTGRGTSFFPTAGGFRSPSPGLFRASLVSSASKSSGKLSEPSLPIEDSQDLYNASPEPKTLFLGAGDFQFCLEDDTQSQLLDADGFLNVRNHRNQYQALKPRLPLASMDENAMDANMDELLDLCTGKFTSQAEKHLPRKSDKKENMEELLNLCSGKFTSQDASTPASSELNKQEKESSMGDPMEEALALCSGSFPTDKEEEDEEEEFGDFRLVSNDNEFDSDEDEHSDSGNDLALEDHEDDDEEELLKRSEKLKRQMRLRKYLEDEAEVSGSDVGSEDEYDGEEIDEYEEDVIDEVLPSDEELQSQIKKIHMKTMLDDDKRQLRLYQERYLADGDLHSDGPGRMRKFRWKNIDDASQMDLFHRDSDDDQTEEQLDESEARWRKERIEREQWLRDMAQQGKITAEEEEEIGEDSQFMILAKKVTAKALQKNASRPMVIQESKSLLRNPFEAIRPGSAQQVKTGSLLNQPKAVLQKLAALSDHNPSAPRNSRNFVFHTLSPVKAEAAKESSKSQVKKRGPSFMTSPSPKHLKTDDSTSGLTRSIFKYLES

SEQ ID NO: 49439 - protein, 791 aa, Homo sapiens
MVQHFKVTIFGDRRPVYDGKRSLYTANPLPVATTGVDLDVTLPGEGGKDRPFKVSIKFVSRVSWHLLHEVLTGRTLPEPLELDKPISTNPVHAVDVVLRHLPSMKYTPVGRSFFSAPEGYDHPLGGGREVWFGFHQSVRPAMWKMMLNIDVSATAFYKAQPVIQFMCEVLDIHNIDEQPRPLTDSHRVKFTKEIKGLKVEVTHCGTMRRKYRVCNVTRRPASHQTFPLQLENGQTVERTVAQYFREKYTLQLKYPHLPCLQVGQEQKHTYLPLEVCNIVAGQRCIKKLTDNQTSTMIKATARSAPDRQEEISRLVRSANYETDPFVQEFQFKVRDEMAHVTGRVLPAPMLQYGGRNRTVATPSHGVWDMRGKQFHTGVEIKMWAIACFATQRQCREEILKGFTDQLRKISKDAGMPIQGQPCFCKYAQGADSVEPMFRHLKNTYSGLQLIIVILPGKTPVYAEVKRVGDTLLGMATQCVQVKNVIKTSPQTLSNLCLKINVKLGGINNILVPHQRPSVFQQPVIFLGADVTHPPAGDGKKPSIAAVVGSMDAHPSRYCATVRVQRPRQEIIQDLASMVRELLIQFYKSTRFKPTRIIFYRDGVSEGQFRQVLYYELLAIREACISLEKDYQPGITYIVVQKRHHTRLFCADRTERVGRSGNIPAGTTVDTDITHPYEFDFYLCSHAGIQGTSRPSHYHVLWDDNCFTADELQLLTYQLCHTYVRCTRSVSIPAPAYYAHLVAFRARYHLVDKEHDSAEGSHVSGQSNGRDPQALAKAVQIHQDTLRTMYFA

SEQ ID NO: 49440 - protein, 497 aa, Homo sapiens
MFKAEALLSQDADETQGESLESRVTLGSLTAESQELLTFKDVSVDFTQEEWGQLAPAHRNLYREVMLENYGNLVSVGCQLSKPGVISQLEKGEEPWLMERDISGVPSSDLKSKTKTKESALQNDISWEELHCGLMMERFTKGSSMYSTLGRISKCNKLESQQENQRMGKGQIPLMCKKTFTQERGQESNRFEKRINVKSEVMPGPIGLPRKRDRKYDTPGKRSRYNIDLVNHSRSYTKMKTFECNICEKIFKQLIHLTEHMRIHTGEKPFRCKECGKAFSQSSSLIPHQRIHTGEKPYECKECGKTFRHPSSLTQHVRIHTGEKPYECRVCEKAFSQSIGLIQHLRTHVREKPFTCKDCGKAFFQIRHLRQHEIIHTGVKPYICNVCSKTFSHSTYLTQHQRTHTGERPYKCKECGKAFSQRIHLSIHQRVHTGVKPYECSHCGKAFRHDSSFAKHQRIHTGEKPYDCNECGKAFSCSSSLIRHCKTHLRNTFSNVV

SEQ ID NO: 49441 - protein, 40 aa, Homo sapiens
MANSLLGGGRTAVRVFSGVDIPDSCFCISCCLLFPPSFGG

SEQ ID NO: 49442 - protein, 562 aa, Homo sapiens
MDWLPQLTMRAAIQKSDATQNAHGTGISKKNALLDPNTTLDQEEVQQHKDGKPPYSYASLITFAINSSPKKKMTLSEIYQWICDNFPYYREAGSGWKNSIRHNLSLNKCFLKVPRSKDDPGKGSYWAIDTNPKEDVLPTRPKKRARSVERVTLYNTDQDGSDSPRSSLNNSLSDQSLASVNLNSVGSVHSYTPVTSHPESVSQSLTPQQQPQYNLPERDKQLLFSEYNFEDLSASFRSLYKSVFEQSLSQQGLMNIPSESSQQSHTSCTYQHSPSSTVSTHPHSNQSSLSNSHGSGLNTTGSNSVAQVSLSHPQMHTQPSPHPPHRPHGLPQHPQRSPHPAPHPQQHSQLQSPHPQHPSPHQHIQHHPNHQHQTLTHQAPPPPQQVSCNSGVSNDWYATLDMLKESCRIASSVNWSDVDLSQFQGLMESMRQADLKNWSLDQVQFADLCSSLNQFFTQTGLIHSQSNVQQNVCHGAMHPTKPSQHIGTGNLYIDSRQNLPPSVMPPPGYPHIPQALSTPGTTMAGHHRAMNQQHMMPSQAFQMRRSLPPDDIQDDFDWDSIV

SEQ ID NO: 49443 - protein, 596 aa, Homo sapiens [sequence omitted]

SEQ ID NO: 49444 - protein, 191 aa, Homo sapiens
MARFAARLGAQGRRVVLVTSGGTKVPLEARPVRFLDNFSSGRRGATSAEAFLAAGYGVLFLYRARSAFPYAHRFPPQTWLSALRPSGPALSGLLSLEAEENALPGFAEALRSYQEAAAAGTFLAVEFTTLADYLHLLQAAAQALNPLGPSAMFYLAAAVSDFYVPVSEMPEHKIQSSGGPLQVMGASLPEI

SEQ ID NO: 49445 - protein, 16 aa, Homo sapiens
MVCLCLIWKQRRAKGN

SEQ ID NO: 49446 - protein, 1888 aa, Homo sapiens [sequence omitted]

SEQ ID NO: 49447 - protein, 1266 aa, Homo sapiens
MYELVYWAAEDEDQQHKVTFDPTSSYTLEDLKPDTLYRFQLAARSDMGVGVFTPTIEARTAQSMPSGPPRKVEVEPLNSTAVHVYWKLPVPSKQHGQIRGYQVTYVRLENGEPRGLPIIQDVMLAEAQETTISGLTPETTYSVTVAAYTTKGDGARSKPKIVTTTGAVPGRPTMMISTTAMNTALLQWHPPKELPGELLGYRLQYCRADEARPNTIDFGKDDQHFTVTGLHKGTTYIFRLAAKNRAGLGEEFEKEIRTPEDLPSGFPQNLHVTGLTTSTTELAWDPPVLAERNGRIISYTVVFRDINSQQELQNITTDTRFTLTGLKPDTTYDIKVRAWTSKGSGPLSPSIQSRTMPVEQVFAKNFRVAAAMKTSVLLSWEVPDSYKSAVPFKILYNGQSVEVDGHSMRKLIADLQPNTEYSFVLMNRGSSAGGLQHLVSIRTAPDLLPHKPLPASAYIEDGRFDLSMPHVQDPSLVRWFYIVVVPIDRVGGSMLTPRWSTPEELELDELLEAIEQGGEEQRRRRRQAERLKPYVAAQLDVLPETFTLGDKKNYRGFYNRPLSPDLSYQCFVLASLKEPMDQKRYASSPYSDEIVVQVTPAQQQEEPEMLWVTGPVLAVILIILIVIAILLFKRKRTHSPSSKDEQSIGLKDSLLAHSSDPVEMRRLNYQTPGSSVPSCPNTSSMRDHPPIPITDLADNIERLKANDGLKFSQEYESIDPGQQFTWENSNLEVNKPKNRYANVIAYDHSRVILTSIDGVPGSDYINANYIDGYRKQNAYIATQGPLPETMGDFWRMVWEQRTATVVMMTRLEEKSRVKCDQYWPARGTETCGLIQVTLLDTVELATYTVRTFALHKSGSSEKRELRQFQFMAWPDHGVPEYPTPILAFLRRVKACNPLDAGPMVVHCSAGVGRTGCFIVIDAMLERMKHEKTVDIYGHVTCMRSQRNYMVQTEDQYVFIHEALLEAATCGHTEVPARNLYAHIQKLGQVPPGESVTAMELEFKLLASSKAHTSRFISANLPCNKFKNRLVNIMPYELTRVCLQPIRGVEGSDYINASFLDGYRQQKAYIATQGPLAESTEDFWRMLWEHNSTIIVMLTKLREMGREKCHQYWPAERSARYQYFVVDPMAEYNMPQYILREFKVTDARDGQSRTIRQFQFTDWPEQGVPKTGEGFIDFIGQVHKTKEQFGQDGPITVHCSAGVGRTGVFITLSIVLERMRYEGVVDMFQTVKTLRTQRPAMVQTEDQYQLCYRAALEYLGSFDHYAT

SEQ ID NO: 49448 - protein, 75 aa, Homo sapiens [sequence omitted]

SEQ ID NO: 49449 - protein, 87 aa, Homo sapiens
MGDIPAAVNAFQEAASLLGKKYGETANECGEAFFFYGKSLLELARMENGVLGNALEGVHVEEEEGEKTEDESLVENNDNIDGMWSCM

SEQ ID NO: 49450 - protein, 1267 aa, Homo sapiens
MVPFHFPPSKCALWNPTPTGDFIYLHLSYYRNPKLVVTEKTIRLAYRHAKQNKKNSSCFLLGSLTADEDEEGVTLTVDRFDPGREVPECLEITPTASLPGDFLIPCKVHTQELCSREMIVHSVDDFSSALKALQCHICSKDSLDCGKLLSLRVHITSRESLDSVEFDLHWAAVTLANNFKCTPVKPIPIIPTALARNLSSNLNISQVQGTYKYGYLTMDETRKLLLLLESDPKVYSLPLVGIWLSGITHIYSPQVWACCLRYIFNSSVQERVFSESGNFIIVLYSMTHKEPEFYECFPCDGKIPDFRFQLLTSKETLHLFKNVEPPDKNPIRCELSAESQNAETEFFSKASKNFSIKRSSQKLSSGKMPIHDHDSGVEDEDFSPRPIPSPHPVSQKISKIQPSVPELSLVLDGNFIESNPLPTPLEMVNNENPPLINHLEHLKPLQPQLYDEKHSPEVEAGEPSLRGIPNQLNQDKPALLRHCKVRQPPAYKKGNPHTRNSIKPSSHNGPSHDIFEKLQTVSAGNVQNEEYPIRPSTLNSRQSSLAPQSQPHDFVFSPHNSGRPMELQIPTPPLPSYCSTNVCRCCQHHSHIQYSPLNSWQGANTVGSIQDVQSEALQKHSLFHPSGCPALYCNAFCSSSSPIALRPQGDMGSCSPHSNIEPSPVARPPSHMDLCNPQPCTVCMHTPKTESDNGMMGLSPDAYRFLTEQDRQLRLLQAQIQRLLEAQSLMPCSPKTTAVEDTVQAGRQMELVSVEAQSSPGLHMRKGVSIAVSTGASLFWNAAGEDQEPDSQMKQDDTKISSEDMNFSVDINNEVTSLPGSASSLKAVDIPSFEESNIAVEEEFNQPLSVSNSSLVVRKEPDVPVFFPSGQLAESVSMCLQTGPTGGASNNSETSEEPKIEHVMQPLLHQPSDNQKIYQDLLGQVNHLLNSSSKETEQPSTKAVIISHECTRTQNVYHTKKKTHHSRLVDKDCVLNATLKQLRSLGVKIDSPTKVKKNAHNVDHASVLACISPEAVISGLNCMSFANVGMSGLSPNGVDLSMEANAIALKYLNENQLSQLSVTRSNQNNCDPFSLLHINTDRSTVGLSLISPNNMSFATKKYMKRYGLLQSSDNSEDEEEPPDNADSKSEYLLNQNLRSIPEQLGGQKEPSKNDHEIINCSNCESVGTNADTPVLRNITNEVLQTKAKQQLTEKPAFLVKNLKPSPAVNLRTGKAEFTQHPEKENEGDITIFPESLQPSETLKQMNSMNSVGTFLDVKRLRQLPKLF

SEQ ID NO: 49451 - protein, 781 aa, Homo sapiens [sequence omitted]

SEQ ID NO: 49452 - protein, 274 aa, Homo sapiens
MTFVVLDADDQPQLLPWIRPQPGDGERRYREASARKKIRLDRKYIVSCKQTEVPLSVPWDPSNQVYLSYNNVSSLKMLVAKDNWVLSSEISQVRLYTLEDDKFLSFHMEMVVHVDAAQAFLLLSDLRQRPEWDKHYRSVELVQQVDEDDAIYHVTSPALGGHTKPQDFVILASRRKPCDNGDPYVIALRSVTLPTHRETPEYRRGETLCSGFCLWREGDQLTKVSYYNQATPGVLNYVTTNVAGLSSEFYTTFKACEQFLLDNRNDLAPSLQTL

SEQ ID NO: 49453 - protein, 163 aa, Homo sapiens
MRAKADKLKRIEQRDVRKANLKEKKERNQNEALLQAIKARNIRLSEAACEDEDSASEGLEYAQSDFISAFHEDSRFIDHLMVMFGETPSWDLEQKYCPDNLEVYFEDEDRAELYRVPAKSTLLQVLQHQRYFVKALTPAFLVCVGSSPFCKNFLRGRKVYQIR

SEQ ID NO: 49454 - protein, 402 aa, Homo sapiens
MLQVGLIYPASPGCYHLLPYTVRAMEKLVRVIDQEMQAIGGQKVNMPSLSPAELWQATNRWDLMGKELLRLRDRHGKEYCLGPTHEEAITALIASQKKLSYKQLPFLLYQVTRKFRDEPRPRFGLLRGREFYMKDMYTFDSSPEAAQQTYSLVCDAYCSLFNKLGLPFVKVQADVGTIGGTVSHEFQLPVDIGEDRLAICPRCSFSANMETLDLSQMNCPACQGPLTKTKGIEVGHTFYLGTKYSSIFNAQFTNVCGKPTLAEMGCYGLGVTRILAAAIEVLSTEDCVRWPSLLAPYQACLIPPKKGSKEQAASELIGQLYDHITEAVPQLHGEVLLDDRTHLTIGNRLKDANKFGYPFVIIAGKRALEDPAHFEVWCQNTGEVAFLTKDGVMDLLTPVQTV

SEQ ID NO: 49455 - protein, 266 aa, Homo sapiens
MRRSLPSTSSTSSTKRLKSVEDEMDSPGEEPFYTGQGRSPGSGSQSSGWHEVEPGMPSPTTLKKSEKSGFSSPSPSQTSSLGTAFTQHHRPVITGPREFKMAPSILGSPFWKVYSASPHATPSTLHFPTSPIIQQPGPYFSHPAIRYHPQETLKEFVQLVCPDAGQQAGQVGFLNPNGSSQGKVHNPFLPTPMLPPPPPPPMARPVPLPVPDTKPPTTSTEGGAASPTSPTYSTPSTSPANRFVSVGPRDPSFVNIPQQTQSWYLG

SEQ ID NO: 49456 - protein, 1765 aa, Homo sapiens
MFYETLKSPLFNQILTLQQSIKQLKGQLNHIPSDCSANFDFSRKGLLVFTDGSITNGNVHRPSNNSTVSGLFPWTPKLGNEDFNSVIQQMAQGRQIEYIDIERPSTGGLGFSVVALRSQNLGKVDIFVKDVQPGSVADRDQRLKENDQILAINHTPLDQNISHQQAIALLQQTTGSLRLIVAREPVHTKSSTSSSLNDTTLPETVCWGHVEEVELINDGSGLGFGIVGGKTSGVVVRTIVPGGLADRDGRLQTGDHILKIGGTNVQGMTSEQVAQVLRNCGNSVRMLVARDPAGDISVTPPAPAALPVALPTVASKGPGSDSSLFETYNVELVRKDGQSLGIRIVGYVGTSHTGEASGIYVKSIIPGSAAYHNGHIQVNDKIVAVDGVNIQGFANHDVVEVLRNAGQVVHLTLVRRKTSSSTSPLEPPSDRGTVVEPLKPPALFLTGAVETETNVDGEDEEIKERIDTLKNDNIQALEKLEKVPDSPENELKSRWENLLGPDYEVMVATLDTQIADDAELQKYSKLLPIHTLRLGVEVDSFDGHHYISSIVSGGPVDTLGLLQPEDELLEVNGMQLYGKSRREAVSFLKEVPPPFTLVCCRRLFDDEASVDEPRRTETSLPETEVDHNMDVNTEEDDDGELALWSPEVKIVELVKDCKGLGFSILDYQDPLDPTRSVIVIRSLVADGVAERSGGLLPGDRLVSVNEYCLDNTSLAEAVEILKAVPPGLVHLGICKPLVEDNEEESCYILHSSSNEDKTEFSGTIHDINSSLILEAPKGFRDEPYFKEELVDEPFLDLGKSFHSQQKEIEQSKEAWEMHEFLTPRLQEMDEEREILVDEEYELYQDPSPSMELYPLSHIQEATPVPSVNELHFGTQWLHDNEPSESQEARTGRTVYSQEAQPYGYCPENVMKENFVMESLPSVPSTEGNSQQGRFDDLENLNSLAKTSLDLGMIPNDVQGPSLLIDLPVVAQRREQEDLPLYQHQATRVISKASAYTGMLSSRYATDTCELPEREEGEGEETPNFSHWGPPRIVEIFREPNVSLGISIVGGQTVIKRLKNGEELKGIFIKQVLEDSPAGKTNALKTGDKILEVSGVDLQNASHSEAVEAIKNAGNPVVFIVQSLSSTPRVIPNVHNKANKITGNQNQDTQEKKEKRQGTAPPPMKLPPPYKALTDDSDENEEEDAFTDQKIRQRYADLPGELHIIELEKDKNGLGLSLAGNKDRSRMSIFVVGINPEGPAAADGRMRIGDELLEINNQILYGRSHQNASAIIKTAPSKVKLVFIRNEDAVNQMAVTPFPVPSSSPSSIEDQSGTEPISSEEDGSVEVGIKQLPESESFKLAVSQMKQQKYPTKVSFSSQEIPLAPASSYHSTDADFTGYGGFQAPLSVDPATCPIVPGQEMIIEISKGRSGLGLSIVGGKDTPLNAIVIHEVYEEGAAARDGRLWAGDQILEVNGVDLRNSSHEEAITALRQTPQKVRLVVYRDEAHYRDEENLEIFPVDLQKKAGRGLGLSIVGKRNGSGVFISDIVKGGAADLDGRLIQGDQILSVNGEDMRNASQETVATILKCAQGLVQLEIGRLRAGSWTSARTTSQNSQGSQQSAHSSCHPSFAPVITGLQNLVGTKRVSDPSQKNSGTDMEPRTVEINRELSDALGISIAGGRGSPLGDIPVFIAMIQASGVAARTQKLKVGDRIVSINGQPLDGLSHADVVNLLKNAYGRIILQVVADTNISAIAAQLENMSTGYHLGSPTAEHHPEDTEEQLQMTAD

SEQ ID NO: 49457 - protein, 1846 aa, Homo sapiens
MFYETLKSPLFNQILTLQQSIKQLKGQLNHIPSDCSANFDFSRKGLLVFTDGSITNGNVHRPSNNSTVSGLFPWTPKLGNEDFNSVIQQMAQGRQIEYIDIERPSTGGLGFSVVALRSQNLGKVDIFVKDVQPGSVADRDQRLKENDQILAINHTPLDQNISHQQAIALLQQTTGSLRLIVAREPVHTKSSTSSSLNDTTLPETVCWGHVEEVELINDGSGLGFGIVGGKTSGVVVRTIVPGGLADRDGRLQTGDHILKIGGTNVQGMTSEQVAQVLRNCGNSVRMLVARDPAGDISVTPPAPAALPVALPTVASKGPGSDSSLFETYNVELVRKDGQSLGIRIVGYVGTSHTGEASGIYVKSIIPGSAAYHNGHIQVNDKIVAVDGVNIQGFANHDVVEVLRNAGQVVHLTLVRRKTSSSTSPLEPPSDRGTVVEPLKPPALFLTGAVETETNVDGEDEEIKERIDTLKNDNIQALEKLEKVPDSPENELKSRWENLLGPDYEVMVATLDTQIADDAELQKYSKLLPIHTLRLGVEVDSFDGHHYISSIVSGGPVDTLGLLQPEDELLEVNGMQLYGKSRREAVSFLKEVPPPFTLVCCRRLFDDEASVDEPRRTETSLPETEVDHNMDVNTEEDDDGELALWSPEVKIVELVKDCKGLGFSILDYQDPLDPTRSVIVIRSLVADGVAERSGGLLPGDRLVSVNEYCLDNTSLAEAVEILKAVPPGLVHLGICKPLVEDNEEESCYILHSSSNEDKTEFSGTIHDINSSLILEAPKGFRDEPYFKEELVDEPFLDLGKSFHSQQKEIEQSKEAWEMHEFLTPRLQEMDEEREILVDEEYELYQDPSPSMELYPLSHIQEATPVPSVNELHFGTQWLHDNEPSESQEARTGRTVYSQEAQPYGYCPENVMKENFVMESLPSVPSTEGNSQQGRFDDLENLNSLAKTSLDLGMIPNDVQGPSLLIDLPVVAQRREQEDLPLYQHQATRVISKASAYTGMLSSRYATDTCELPEREEGEGEETPNFSHWGPPRIVEIFREPNVSLGISIVGGQTVIKRLKNGEELKGIFIKQVLEDSPAGKTNALKTGDKILEVSGVDLQNASHSEAVEAIKNAGNPVVFIVQSLSSTPRVIPNVHNKANKITGNQNQDTQEKKEKRQGTAPPPMKLPPPYKALTDDSDENEEEDAFTDQKIRQRYADLPGELHIIELEKDKNGLGLSLAGNKDRSRMSIFVVGINPEGPAAADGRMRIGDELLEINNQILYGRSHQNASAIIKTAPSKVKLVFIRNEDAVNQMAVTPFPVPSSSPSSIEDQSGTEPISSEEDGSVEVGIKQLPESESFKLAVSQMKQQKYPTKVSFSSQEIPLAPASSYHSTDADFTGYGGFQAPLSVDPATCPIVPGQEMIIEISKGRSGLGLSIVGGKDTPLNAIVIHEVYEEGAAARDGRLWAGDQILEVNGVDLRNSSHEEAITALRQTPQKVRLVVYRDEAHYRDEENLEIFPVDLQKKAGRGLGLSIVGKRNGSGVFISDIVKGGAADLDGRLIQGDQILSVNGEDMRNASQETVATILKCAQGLVQLEIGRLRAGSWTSARTTSQNSQGSQQSAHSSCHPSFAPVITGLQNLVGTKRVSDPSQKNSGTDMEPRTVEINRELSDALGISIAGGRGSPLGDIPVFIAMIQASGVAARTQKLKVGDRIVSINGQPLDGLSHADVVNLLKNAYGRIILQVVADTNISAIAAQLENMSTGYHLGSPTAEHHPEDTETPPPKIITLEKGSEGLGFSIVGGYGSPHGDLPIYVKTVFAKGAAADDGRLKRGDQILAVNGETLEGVTHEQAVAILKHQRGTVTLTVLS

SEQ ID NO: 49458 - protein, 2001 aa, Homo sapiens
MDPHVRDCIRSYTEDWAIVIRKYHKLGTGFNPNTLDKQKERQKGLPKQVFESDEAPDGNSYQDDQDDLKRRSMSIDDTPRGSWACSIFDLKNSLPDALLPNLLDRTPNEEIDRQNDDQRKSNRHKELFALHPSPDEEEPIERLSVPDIPKEHFGQRLLVKCLSLKFEIEIEPIFASLALYDVKEKKKISENFYFDLNSEQMKGLLRPHVPPAAITTLARSAIFSITYPSQDVFLVIKLEKVLQQGDIGECAEPYMIFKEADATKNKEKLEKLKSQADQFCQRLGKYRMPFAWTAIHLMNIVSSAGSLERDSTEVEISTGERKGSWSERRNSSIVGRRSLERTTSGDDACNLTSFRPATLTVTNFFKQEGDRLSDEDLYKFLADMRRPSSVLRRLRPITAQLKIDISPAPENPHYCLTPELLQVKLYPDSRVRPTREILEFPARDVYVPNTTYRNLLYIYPQSLNFANRQGSARNITVKVQFMYGEDPSNAMPVIFGKSSCSEFSKEAYTAVVYHNRSPDFHEEIKVKLPATLTDHHHLLFTFYHVSCQQKQNTPLETPVGYTWIPMLQNGRLKTGQFCLPVSLEKPPQAYSVLSPEVPLPGMKWVDNHKGVFNVEVVAVSSIHTQDPYLDKFFALVNALDEHLFPVRIGDMRIMENNLENELKSSISALNSSQLEPVVRFLHLLLDKLILLVIRPPVIAGQIVNLGQASFEAMASIINRLHKNLEGNHDQHGRNSLLASYIHYVFRLPNTYPNSSSPGPGGLGGSVHYATMARSAVRPASLNLNRSRSLSNSNPDISGTPTSPDDEVRSIIGSKAMDRSCNRMSSHTETSSFLQTLTGRLPTKKLFHEELALQWVVCSGSVRESALQQAWFFFELMVKSMVHHLYFNDKLEAPRKSRFPERFMDDIAALVSTIASDIVSRFQKDTEMVERLNTSLAFFLNDLLSVMDRGFVFSLIKSCYKQVSSKLYSLPNPSVLVSLRLDFLRIICSHEHYVTLNLPCSLLTPPASPSPSVSSATSQSSGFSTNVQDQKIANMFELSVPFRQQHYLAGLVLTELAVILDPDAEGLFGLHKKVINMVHNLLSSHDSDPRYSDPQIKARVAMLYLPLIGIIMETVPQLYDFTETHNQRGRPICIATDDYESESGSMISQTVAMAIAGTSVPQLTRPGSFLLTSTSGRQHTTFSAESSRSLLICLLWVLKNADETVLQKWFTDLSVLQLNRLLDLLYLCVSCFEYKGKKVFERMNSLTFKKSKDMRAKLEEAILGSIGARQEMVRRSRGQLGTYTIASPPERSPSGSAFGSQENLRWRKDMTHWRQNTEKLDKSRAEIEHEALIDGNLATEANLIILDTLEIVVQTVSVTESKESILGGVLKVLLHSMACNQSAVYLQHCFATQRALVSKFPELLFEEETEQCADLCLRLLRHCSSSIGTIRSHASASLYLLMRQNFEIGNNFARVKMQVTMSLSSLVGTSQNFNEEFLRRSLKTILTYAEEDLELRETTFPDQVQDLVFNLHMILSDTVKMKEHQEDPEMLIDLMYRIAKGYQTSPDLRLTWLQNMAGKHSERSNHAEAAQCLVHSAALVAEYLSMLEDRKYLPVGCVTFQNISSNVLEESAVSDDVVSPDEEGICSGKYFTESGLVGLLEQAAASFSMAGMYEAVNEVYKVLIPIHEANRDAKKLSTIHGKLQEAFSKIVHQSTGWERMFGTYFRVGFYGTKFGDLDEQEFVYKEPAITKLAEISHRLEGFYGERFGEDVVEVIKDSNPVDKCKLDPNKAYIQITYVEPYFDTYEMKDRITYFDKNYNLRRFMYCTPFTLDGRAHGELHEQFKRKTILTTSHAFPYIKTRVNVTHKEEIILTPIEVAIEDMQKKTQELAFATHQDPADPKMLQMVLQGSVGTTVNQGPLEVAQVFLSEIPSDPKLFRHHNKLRLCFKDFTKRCEDALRKNKSLIGPDQKEYQRELERNYHRLKEALQPLINRKIPQLYKAVLPVTCHRDSFSRMSLRKMDL

SEQ ID NO: 49459 - protein, 524 aa, Homo sapiens
MDPHVRDCIRSYTEDWAIVIRKYHKLGTGFNPNTLDKQKERQKGLPKQVFESDEAPDGNSYQDDQDDLKRRSMSIDDTPRGSWACSIFDLKNSLPDALLPNLLDRTPNEEIDRQNDDQRKSNRHKELFALHPSPDEEEPIERLSVPDIPKEHFGQRLLVKCLSLKFEIEIEPIFASLALYDVKEKKKISENFYFDLNSEQMKGLLRPHVPPAAITTLARSAIFSITYPSQDVFLVIKLEKVLQQGDIGECAEPYMIFKEADATKNKEKLEKLKSQADQFCQRLGKYRMPFAWTAIHLMNIVSSAGSLERDSTEVEISTGERKGSWSERRNSSIVGRRSLERTTSGDDACNLTSFRPATLTVTNFFKQEGDRLSDEDLYKFLADMRRPSSVLRRLRPITAQLKIDISPAPENPHYCLTPELLQVKLYPDSRVRPTREILEFPARDVYVPNTTYRNLLYIYPQSLNFANRQGSARNITVKVQFMYGEDPSNAMPSPSCTHPIPTVRPLPLWCYHSIFSLLSWDFIT

SEQ ID NO: 49460 - protein, 396 aa, Homo sapiens
MRTTVLIADLLIYIPAVVLYCCCLKEISTKKKIANALCILLYPGLILIDYGHFQYNSVSLGFALWGVLGISCDCDLLGSLAFCLAINYKQMELYHALPFFCFLLGKCFKKGLKGKGFVLLVKLACIVVASFVLCWLPFFTEREQTLQVLRRLFPVDRGLFEDKVANIWCSFNVFLKIKDILPRHIQLIMSFCSTFLSLLPACIKLILQPSSKGFKFTLVSCALSFFLFSFQVHEKSILLVSLPVCLVLSEIPFMSTWFLLVSTFSMLPLLLKDELLMPSVVTTMAFFIACVTSFSIFEKTSEEELQLKSFSISVRKYLPCFTFLSRIIQYLFLISVITMVLLTLMTVTLDPPQKLPDLFSVLVCFVSCLNFLFFLVYFNIIIMWDSKSGRNQKKIS

SEQ ID NO: 49461 - protein, 468 aa, Homo sapiens
MEGETNFSSEIEDLAREGDMPIHELLSLYGYGSTVRLPEEDEEEEEEEEEGEDDEDADNDDNSGCSGENKEENIKDSSGQEDETQSSNDDPSQSVASQDAQEIIRPRRCKYFDTNSEVEEESEEDEDYIPSEDWKKEIMVGSMFQAEIPVGICRYKENEKVYENDDQLLWDPEYLPEDKVIIFLKDASRRTGDEKGVEAIPEGSHIKDNEQALYELVKCNFDTEEALRRLRFNVKAAREELSVWTEEECRNFEQGLKAYGKDFHLIQANKVRTRSVGECVAFYYMWKKSERYDFFAQQTRFGKKKYNLHPGVTDYMDRLLDESESAASSRAPSPPPTASNSSNSQSEKEDGTVSTANQNGVSSNGPGEILNKEEVKVEGLHINGPTGGNKKPLHADMDTNGYETDNLTTDPKLAHMTARNENDFDEKSERPAKRRRVNSNGKESPGSSEFFQEAVSHGKFEELENTDD

SEQ ID NO: 49462 - protein, 409 aa, Homo sapiens
MEGETNFSSEIEDLAREGDMPIHELLSLYGYGSTVRLPEEDEEEEEEEEEGEDDEDADNDDNSGCSGENKEENIKDSSGQEDETQSSNDDPSQSVASQDAQEIIRPRRCKYFDTNSEVEEESEEDEDYIPSEDWKKEIMVGSMFQAEIPVGICRYKENEKVYENDDQLLWDPEYLPEDKVIIFLKDASRRTGDEKGVEAIPEGSHIKDNEQALYELVKCNFDTEEALRRLRFNVKAAREELSVWTEEECRNFEQGLKAYGKDFHLIQANKVRTRSVGECVAFYYMWKKSERYDFFAQQTRFGKKKYNLHPGVTDYMDRLLDESESAASSRAPSPPPTASNSSNSQSEKEDGTVSTANQNGVSSNGPGEILNKEEVKVEGLHINGPTGILQMLLPVHFSAISSRANAFLK

SEQ ID NO: 49463 - protein, 150 aa, Homo sapiens [sequence omitted]

SEQ ID NO: 49464 - protein, 119 aa, Homo sapiens
MSTKKLCIVGGILLVFQIIAFLVGGLIAPGPTTAVSYMSVKCVDARKNHHKTKWFVPWGPNHCDKIRDIEEAIPREIEANDIVFSVHIPLPHMEMSPWFQFMLFILQLDIAFKLNNQIS

SEQ ID NO: 49465 - protein, 287 aa, Homo sapiens
MMKAGGTEIGKTLAEKSRGLFSANDWQCKTCSNVNWARRSECNMCNTPKYAKLEERTGYGGGFNERENVEYIEREESDGEYDEFGRKKKKYRGKAVGPASILKEVEDKESEGEEEDEDEDLSKYKLDEDEDEDDADLSKYNLDASEEEDSNKKKSNRRSRSKSRSSHSRSSSRSSSPSSSRSRSRSRSRSSSSSQSRSRSSSRERSRSRGSKSRSSSRSHRGSSSPRKRSYSSSSSSPERNRKRSRSRSSSSGDRKKRRTRSRSPERRHRSSSGSSHSGSRSSSKKK

SEQ ID NO: 49466 - protein, 594 aa, Homo sapiens
MAAARDPPEVSLREATQRKLRRFSELRGKLVARGEFWDIVAITAADEKQELAYNQQLSEKLKRKELPLGVQYHVFVDPAGAKIGNGGSTLCALQCLEKLYGDKWNSFTILLIHSGGYSQRLPNASALGKIFTALPLGNPIYQMLELKLAMYIDFPLNMNPGILVTCADDIELYSIGEFEFIRFDKPGFTALAHPSSLTIGTTHGVFVLDPFDDLKHRDLEYRSCHRFLHKPSIEKMYQFNAVCRPGNFCQQDFAGGDIADLKLDSDYVYTDSLFYMDHKSAKMLLAFYEKIGTLSCEIDAYGDFLQALGPGATVEYTRNTSNVIKEESELVEMRQRIFHLLKGTSLNVVVLNNSKFYHIGTTEEYLFYFTSDNSLKSELGLQSITFSIFPDIPECSGKTSCIIQSILDSRCSVAPGSVVEYSRLGPDVSVGENCIISGSYILTKAALPAHSFVCSLSLKMNRCLKYATMAFGVQDNLKKSVKTLSDIKLLQFFGVCFLSCLDVWNLKVTEELFSGNKTCLSLWTARIFPVCSSLSDSVITSLKMLNAVKNKSAFSLNSYKLLSIEEMLIYKDVEDMITYREQIFLEISLKSSLM

SEQ ID NO: 49467 - protein, 335 aa, Homo sapiens
MNTHIPENCGGLGLGTFDACLISEELAYGCTGVQTAIEGNSLGQMPIIIAGNDQQKKKYLGRMTEEPLMCAYCVTEPGAGSDVAGIKTKAEKKGDEYIINGQKMWITNGGKANWYFLLARSDPDPKAPANKAFTGFIVEADTPGIQIGRKELNMGQRCSDTRGIVFEDVKVPKENVLIGDGAGFKVAMGAFDKTRPVVAAGAVGLAQRALDEATKYALERKTFGKLLVEHQAISFMLAEMAMKVELARMSYQRAAWEVDSGRRNTYYASIAKAFAGDIANQLATDAVQILGGNGFNTEYPVEKLMRDAKIYQIYEGTSQIQRLIVAREHIDKYKN

SEQ ID NO: 49468 - protein, 241 aa, Homo sapiens
MNTNDAKEYLARREIPQLFESLLNGLMCSKPEDPVEYLESCLQKVKELGGCDKVKWDTFVSQEKKTLPPLNGGQSRRSFLRNESDTDLSETAELIEEYEVFDPTRPRPKIILVIGGPGSGKGTQSLKIAERYGFQYISVGELLRKKIHSTSSNRKWSLIAKIITTGELAPQETTITEIKQKLMQIPDEEGIVIDGFPRDVAQALSFEDQYSLRPQTKMPVQSDPLPYAAPCGVCPVRQDSP

SEQ ID NO: 49469 - protein, 93 aa, Homo sapiens
MQIPDEEGIVIDGFPRDVAQALSFEDQICTPDLVVFLACANQRLKERLLKRAEQQGRPDDNVKATQRRLMNFKQNAAPLVKYFQEKGLIMTVS

SEQ ID NO: 49470 - protein, 18 aa, Homo sapiens
MLSPTSVHEDLSFFSSNP

SEQ ID NO: 49471 - protein, 127 aa, Homo sapiens
MDSYWHSRCLKCSCCQAQLGDIGTSCYTKSGMILCRNDYIRLFGNSGACSACGQSIPASELVMRAQGNVYHLKCFTCSTCRNRLVPGDRFHYINGSLFCEHDRPTALINGHLNSLQSNPLLPDQKVC

SEQ ID NO: 49472 - protein, 589 aa, Homo sapiens
MTGPMCLIENTNGELVANPEALKILSAITQPVVVVAIVGLYRTGKSYLMNKLAGKNKGFSLGSTVKSHTKGIWMWCVPHPKKPEHTLVLLDTEGLGDVKKGDNQNDSWIFTLAVLLSSTLVYNSMGTINQQAMDQLYYVTELTHRIRSKSSPDENENEDSADFVSFFPDFVWTLRDFSLDLEADGQPLTPDEYLEYSLKLTQGTSQKDKNFNLPRLCIRKFFPKKKCFVFDLPIHRRKLAQLEKLQDEELDPEFVQQVADFCSYIFSNSKTKTLSGGIKVNGPRLESLVLTYINAISRGDLPCMENAVLALAQIENSAAVQKAIAHYDQQMGQKVQLPAETLQELLDLHRVSEREATEVYMKNSFKDVDHLFQKKLAAQLDKKRDDFCKQNQEASSDRCSALLQVIFSPLEEEVKAGIYSKPGGYCLFIQKLQDLEKKYYEEPRKGIQAEEILQTYLKSKESVTDAILQTDQILTEKEKEIEVECVKAESAQASAKMVEEMQIKYQQMMEEKEKSYQEHVKQLTEKMERERAQLLEEQEKTLTSKLQEQARVLKERCQGESTQLQNEIQKLQKTLKKKTKRYMSHKLKI

SEQ ID NO: 49473 - protein, 581 aa, Homo sapiens
MSLIDNTKGQLVVNPEALKILSAITQPVVVVAIVGLYRTGKSYLMNKLAGKKNGFSLGSTVKSHTKGIWMWCVPHPKKPEHTLVLLDTEGLGDIEKGDNENDSWIFALAILLSSTFVYNSMGTINQQAMDQLHYVTELTDRIKANSSPGNNSVDDSADFVSFFPAFVWTLRDFTLELEVDGEPITADDYLELSLKLRKGTDKKSKSFNDPRLCIRKFFPKRKCFVFDWPAPKKYLAHLEQLKEEELNPDFIEQVAEFCSYILSHSNVKTLSGGIPVNGPRLESLVLTYVNAISSGDLPCMENAVLALAQIENSAAVEKAIAHYEQQMGQKVQLPTETLQELLDLHRDSEREAIEVFMKNSFKDVDQMFQRKLGAQLEARRDDFCKQNSKASSDCCMALLQDIFGPLEEDVKQGTFSKPGGYRLFTQKLQELKNKYYQVPRKGIQAKEVLKKYLESKEDVADALLQTDQSLSEKEKAIEVERIKAESAEAAKKMLEEIQKKNEEMMEQKEKSYQEHVKQLTEKMERDRAQLMAEQEKTLALKLQEQERLLKEGFENESKRLQKDIWDIQMRSKSLEPICNIL

SEQ ID NO: 49474 - protein, 805 aa, Homo sapiens
MTAAFRNPSGKQVATDKVAEKLSSTLSWVKNTVSHTVSQMASQVASPSTSLHTTSSSTTLSTPALSPSSPSQLSPDDLELLAKLEEQNRLLETDSKSLRSVNGSRRNSGSSLVSSSSASSNLSHLEEDSWILWGRIVNEWEDVRKKKEKQVKELVHKGIPHHFRAIVWQLLCSAQSMPIKDQYSELLKMTSPCEKLIRRDIARTYPEHNFFKEKDSLGQEVLFNVMKAYSLVDREVGYCQGSAFIVGLLLMQMPEEEAFCVFVKLMQDYRLRELFKPSMAELGLCMYQFECMIQEHLPELFVHFQSQSFHTSMYASSWFLTIFLTTFPLPIATRIFDIFMSEGLEIVFRVGLALLQMNQAELMQLDMEGMLQHFQKVIPHQFDGVPDKLIQAAYQVKYNSKKMKKLEKEYTTIKTKEMEEQVEIKRLRTENRLLKQRIETLEKHKCSSNYNEDFVLQLEKELVQARLSEAESQCALKEMQDKVLDIEKRNNSLPDENNIARLQEELIAVKLREAEAIMGLKELRQQVKDLEEHWQRHLARTTGRWKDPPKKNAMNELQDELMTIRLREAETQAEIREIKQRMMEMETQNQINSNHLRRAEQEVISLQEKVQYLSAQNKGLLTQLSEAKRKQAEIECKNKEEVMAVRLREADSIAAVAELRQHIAELEIQKEEGKLQGQLNKSDSNQYIGELKDQIAELNHELRCLKGQRGFSGQPPFDGIHIVNHLIGDDESFHSSDEDFIDNSLQETGVGFPLHGKSGSMSLDPAVADGSESETEDSVLETRESNQVVQKERPPRRRESYSTTV

SEQ ID NO: 49475 - protein, 816 aa, Homo sapiens
MTAAFRNPSGKQVATDKVAEKLSSTLSWVKNTVSHTVSQMASQVASPSTSLHTTSSSTTLSTPALSPSSPSQLSPDDLELLAKLEEQNRLLETDSKSLRSVNGSRRNSGSSLVSSSSASSNLSHLEEDSWILWGRIVNEWEDVRKKKEKQVKELVHKGIPHHFRAIVWQLLCSAQSMPIKDQYSELLKMTSPCEKLIRRDIARTYPEHNFFKEKDSLGQEVLFNVMKAYSLVDREVGYCQGSAFIVGLLLMQMPEEEAFCVFVKLMQDYRLRELFKPSMAELGLCMYQFECMIQEHLPELFVHFQSQSFHTSMYASSWFLTIFLTTFPLPIATRIFDIFMSEGLEIVFRVGLALLQMNQAELMQLDMEGMLQHFQKVIPHQFDGVPDKLIQAAYQVKYNSKKMKKLEKEYTTIKTKEMEEQVEIKRLRTENRLLKQRIETLEKESASLADRLIQHKCSSNYNEDFVLQLEKELVQARLSEAESQCALKEMQDKVLDIEKRNNSLPDENNIARLQEELIAVKLREAEAIMGLKELRQQVKDLEEHWQRHLARTTGRWKDPPKKNAMNELQDELMTIRLREAETQAEIREIKQRMMEMETQNQINSNHLRRAEQEVISLQEKVQYLSAQNKGLLTQLSEAKRKQAEIECKNKEEVMAVRLREADSIAAVAELRQHIAELEIQKEEGKLQGQLNKSDSNQYIGELKDQIAELNHELRCLKGQRGFSGQPPFDGIHIVNHLIGDDESFHSSDEDFIDNSLQETGVGFPLHGKSGSMSLDPAVADGSESETEDSVLETRESNQVVQKERPPRRRESYSTTV

SEQ ID NO: 49476 - protein, 62 aa, Homo sapiens
MIVRVTNRDIICQIAYARIEGDMIVCAAYAHELPKYGVKVGLTNYAAAYCTGLLLARRVCTR

SEQ ID NO: 49477 - protein, 313 aa, Homo sapiens
MEQALHLDFGTELEPRKEIVLFDKPTRGTTVQKFKEMVYSLFKAKLGDQGNLSELVNLILTVADGDKDGQVSLGEAKSAWALLQLNEFLLMVILQDKEHTPKLMGFCGDLYVMESVEYTSLYGISLPWVIELFIPSGFRRSMDQLFTPSWPRKAKIAIGLLEFVEDVFHGPYGNFLMCDTSAKNLGYNDKYDLKMVDMRKIVPETNLKELIKDRHCESDLDCVYGTDCRTSCDQSTMKCTSEVIQPNLAKACQLLKDYLLRGAPSEIREELEKQLYSCIALKVTANQMEMEHSLILNNLKTLLWKKISYTNDS

SEQ ID NO: 49478 - protein, 551 aa, Homo sapiens
MQRKLKAQTEKKDSKIVPGNEKQIVGTPVNSEDSDTRQTSHLQARSLSEINKPNFYNNDFDDDFSHRSSENILTVHEQANVESLKETKQNCKDLDEDANGITDEGKEINEKSSQLKNLSELQDTSLQQLVSQRHSTPQNKNAVSVHSNLNSEAVMKSLTQTFATVEVGRWNNNKKSPIKASDLTKFGDCGGSDDEEESTVISVSEDMNSEGNVDFECDTKLYTSAPNTSQGKDNSVLLVLSSDESQQSENSENEEDTLCFVENSGQRESLSGDTGSLSCDNALFVIDTTPGMSADKNFYLEEEDKASEVAIEEEKEEEEDEKSEEDSSDHDENEDEFSDEEDFLNSTKAKLLKLTSSSIDPGLSIKQLGGLYINFNADKLQSNKRTLTQIKEKKKNELLQKAVITPDFEKNHCVPPYSESKYQLQKKRRKERQKTAGDGWFGMKAPEMTNELKNDLKALKMRASMDPKRFYKKNDRDGFPKYFQIGTIVDNPADFYHSRIPKKQRKRTIVEELLADSEFRRYNRRKYSEIMAEKAANAAGKKFRKKKKFRN

SEQ ID NO: 49479 - protein, 1518 aa, Homo sapiens
MEKLEKTLFRLEQGYELQFRLGPTLQGKAVTVYTNYPFPGETFNREKFRSLDWENPTEREDDSDKYCKLNLQQSGSFQYYFLQGNEKSGGGYIVVDPILRVGADNHVLPLDCVTLQTFLAKCLGPFDEWESRLRVAKESGYNMIHFTPLQTLGLSRSCYSLANQLELNPDFSRPNRKYTWNDVGQLVEKLKKEWNVICITDVVYNHTAANSKWIQEHPECAYNLVNSPHLKPAWVLDRALWRFSCDVAEGKYKEKGIPALIENDHHMNSIRKIIWEDIFPKLKLWEFFQVDVNKAVEQFRRLLTQENRRVTKSDPNQHLTIIQDPEYRRFGCTVDMNIALTTFIPHDKGPAAIEECCNWFHKRMEELNSEKHRLINYHQEQAVNCLLGNVFYERLAGHGPKLGPVTRKHPLVTRYFTFPFEEIDFSMEESMIHLPNKACFLMAHNGWVMGDDPLRNFAEPGSEVYLRRELICWGDSVKLRYGNKPEDCPYLWAHMKKYTEITATYFQGVRLDNCHSTPLHVAEYMLDAARNLQPNLYVVAELFTGSEDLDNVFVTRLGISSLIREAMSAYNSHEEGRLVYRYGGEPVGSFVQPCLRPLMPAIAHALFMDITHDNECPIVHRSAYDALPSTTIVSMACCASGSTRGYDELVPHQISVVSEERFYTKWNPEALPSNTGEVNFQSGIIAARCAISKLHQELGAKGFIQVYVDQVDEDIVAVTRHSPSIHQSVVAVSRTAFRNPKTSFYSKEVPQMCIPGKIEEVVLEARTIERNTKPYRKDENSINGTPDITVEIREHIQLNESKIVKQAGVATKGPNEYIQEIEFENLSPGSVIIFRVSLDPHAQVAVGILRNHLTQFSPHFKSGSLAVDNADPILKIPFASLASRLTLAELNQILYRCESEEKEDGGGCYDIPNWSALKYAGLQGLMSVLAEIRPKNDLGHPFCNNLRSGDWMIDYVSNRLISRSGTIAEVGKWLQAMFFYLKQIPRYLIPCYFDAILIGAYTTLLDTAWKQMSSFVQNGSTFVKHLSLGSVQLCGVGKFPSLPILSPALMDVPYRLNEITKEKEQCCVSLAAGLPHFSSGIFRCWGRDTFIALRGILLITGRYVEARNIILAFAGTLRHGLIPNLLGEGIYARYNCRDAVWWWLQCIQDYCKMVPNGLDILKCPVSRMYPTDDSAPLPAGTLDQPLFEVIQEAMQKHMQGIQFRERNAGPQIDRNMKDEGFNITAGVDEETGFVYGGNRFNCGTWMDKMGESDRARNRGIPATPRDGSAVEIVGLSKSAVRWLLELSKKNIFPYHEVTVKRHGKAIKVSYDEWNRKIQDNFEKLFHVSEDPSDLNEKHPNLVHKRGIYKDSYGASSPWCDYQLRPNFTIAMVVAPELFTTEKAWKALEIAEKKLLGPLGMKTLDPDDMVYCGIYDNALDNDNYNLAKGFNYHQGPEWLWPIGYFLRAKLYFSRLMGPETTAKTIVLVKNVLSRHYVHLERSPWKGLPELTNENAQYCPFSCETQAWSIATILETLYDL

SEQ ID NO: 49480 - protein, 337 aa, Homo sapiens
MERLPLANEDKTMFANLKYVSLGILVFQTTSLVLTMRYSRTLKEEGPRYLSSTAVVVAELLKIMACILLVYKDSKCSLRALNRVLHDEILNKPMETLKLAIPSGIYTLQNNLLYVALSNLDAATYQVTYQLKILTTALFSVSMLSKKLGVYQWLSLVILMTGVAFVQWPSDSQLDSKELSAGSQFVGLMAVLTACFSSGFAGVYFEKILKETKQSVWIRNIQLGFFGSIFGLMGVYIYDGELVSKNGFFQGYNRLTWIVVVLQALGGLVIAAVIKYADNILKGFATSLSIILSTLISYFWLQDFVPTSVFFLGAILVITATFLYGYDPKPAGNPTKA

SEQ ID NO: 49481 - protein, 120 aa, Homo sapiens [sequence omitted]

SEQ ID NO: 49482 - protein, 172 aa, Homo sapiens
MNAVGCCGLQLYKFGETVSIVFWTDTWRPESFFDKVKKNRQNGMHTLCLLDIKVKEQSLENLIKGRKIYEPPRYMSVNQAAQQLLEIVQNQRIRGEEPAVTEETLCVGLARVGADDQKIAAGTLRQMCTVDLGEPLHSLIITGGSIHPMEMEMLSLFSIPENSSESQSINGL

SEQ ID NO: 49483 - protein, 603 aa, Homo sapiens
MIVDCKKKTTKPLDRSERAIVDTNGITVFGTRILDEEVFEGDIQQFLITGDPKAAYDYCEHYSPDCDSSAPKAAQAQEPQIDEYAPEDIIEYDYEYGEAEYKEAESVTEGPTVTEETIAQTEKKKSNFKKKMRTVATKSKEKSKKFTPPKSEKFSSKKKKSYQASAKAKLGVKANIVDDFQEYNYGTMESYQTEAPRHVSGTNEPNPVEEIFTEEYLTGEDYDSQRKNSEDTLYENKEIDGRDSDLLVDGDLGEYDFYEYKEYEDKPTSPPNEEFGPGVPAETDITETSINGHGAYGEKGQKGEPAVVEPGMLVEGPPGPAGPAGIMGPPGLQGPTGPPGDPGDRGPPGRPGLPGADGLPGPPGTMLMLPFRYGGDGSKGPTISAQEAQAQAILQQARIALRGPPGPMGLTGRPGPVGGPGSSGAKGESGDPGPQGPRGVQGPPGPTGKPGKRGRPGADGGRGMPGEPGAKGDRGFDGLPGLPGDKGHRGERGPQGPPGPPGDDGMRGEDGEIGPRGLPGEAGPRGLLGPRGTPGAPGQPGMAGVDGPPGPKGNMGPQGEPGPPGQQGNPGPQGLPGPQGPIGPPGEKMCCNLSFGILIPLQK

SEQ ID NO: 49484 - protein, 9 aa, Homo sapiens
MAFYVLFIK

SEQ ID NO: 49485 - protein, 163 aa, Homo sapiens
MKRESPTCNLFPASKSPASSPLTRSTPPVRGRAGPSGRAAASPPTPIRSVLAPQPSTSNSQRLPRPQGAAAKSSSQLPIPSAIPRPASRMPLTSRSVPPGRGALPPDSLSTRKGLPRPSTAGHRVRESGHKVPVSQRLNLPVMGATRSNLQPPRKVAVPGPTR

SEQ ID NO: 49486 - protein, 316 aa, Homo sapiens [sequence omitted]

SEQ ID NO: 49487 - protein, 81 aa, Homo sapiens [sequence omitted]

SEQ ID NO: 49488 - protein, 553 aa, Homo sapiens
MKQCKNMQERMLSQLAAAESRHRKVILDLEEERQRHAQDTAEGDDVTYMLEKERERLTQQLEFEKSQVKKFEKEQKKLSSQLEEERSRHKQLSSMLVLECKKATNKAAEEGQKAGELSLKLEKEKSRVSKLEEELAAERKRGLQTEAQVEKQLSEFDIEREQLRAKLNREENRTKTLKEEMESLKKIVKDLEASHQHSSPNEQLKKPVTVSKGTATEPLMLMSVFCQTESFPAERTHGSNIAKMTNTGLPGPATPAYSYAKTNGHCDPEIQTTRELTAGNNVENQVPPREKSVALAQEKPVENGGCPVGIETPVPMPSPLSSSGSSLSPSSTASSSLTSSPCSSPVLTKRLLGSSASSPGYQSSYQVGINQRFHAARHKFQSQADQDQQASGLQSPPSRDLSPTLIDNSAAKQLARNTVTQVLSRFTSQQGPIKPVSPNSSPFGTDYRNLANTANPRGDTSHSPTPGKVSSPLSPLSPGIKSPTIPRAERGNPPPIPPKKPGLTPSPSATTPLTKTHSQAASLTTAEDLASSCSSNTVVANGKDVELLLPTSS

SEQ ID NO: 49489 - protein, 976 aa, Homo sapiens [sequence omitted]

SEQ ID NO: 49490 - protein, 67 aa, Homo sapiens
MGPSTPLLILFLLSWSGPLQGQQHHLVEYMERRLAALEVEIRSILVSERIIAKGAETSSHLHALRPA

SEQ ID NO: 49491 - protein, 47 aa, Homo sapiens
MGPSTPLLILFLLSWSGPLQGQQHHLVEYMERRLAALEEWKGILKPG

SEQ ID NO: 49492 - protein, 633 aa, Homo sapiens
MQQQVYAQKHQQLQQMRMQQPPAPVPTTTTTTQQHPRQAAPQMLQQQPPRLISVQTMQRGNMNCGAFQAHQMRLAQNAARIPGIPRHSGPQYSMMQPHLQRQHSNPGHAGPFPVVSVHNTTINPTSPTTATMANANRGPTSPSVTAIELIPSVTNPENLPSLPDIPPIQANVVPMMHSWYEFGAREKTQDQNVLEDAGSSSLDNLLSRYISGSHLPPQPTSTMNPSPGPSALSPGSSGLSNSHTPVRPPSTSSTGSRGSCGSSGRTAEKTSLSFKSDQVKVKQEPGTEDEICSFSGGVKQEKTEDGRRSACMLSSPESSLTPPLSTNLHLESELDALASLENHVKIEPADMNESCKQSGLSSLVNGKSPIRSLMHRSARIGGDGNNKDDDPNEDWCAVCQNGGDLLCCEKCPKVFHLTCHVPTLLSFPSGDWICTFCRDIGKPEVEYDCDNLQHSKKGKTAQGLSPVDQRKCERLLLYLYCHELSIEFQEPVPASIPNYYKIIKKPMDLSTVKKKLQKKHSQHYQIPDDFVADVRLIFKNCERFNEMMKVVQVYADTQEINLKADSEVAQAGKAVALYFEDKLTEIYSDRTFAPLPEFEQEEDDGEVTEDSDEDFIQPRRKRLKSDERPVHIK

SEQ ID NO: 49493 - protein, 699 aa, Homo sapiens
MNGQVVCAVPHNLESKSPAAPGQSPTGSVCYERNGEVFYLTYTPEDVEGNVQLETGDKINFVIDNNKHTGAVSARNIMLLKKKQARCQGVVCAMKEAFGFIERGDVVKEIFFHYSEFKGDLETLQPGDDVEFTIKDRNGKEVATDVRLLPQGTVIFEDISIEHFEGTVTKVIPKVPSKNQNDPLPGRIKVDFVIPKELPFGDKDTKSKVTLLEGDHVRFNISTDRRDKLERATNIEVLSNTFQFTNEAREMGVIAAMRDGFGFIKCVDRDVRMFFHFSEILDGNQLHIADEVEFTVVPDMLSAQRNHAIRIKKLPKGTVSFHSHSDHRFLGTVEKEATFSNPKTTSPNKGKEKEAEDGIIAYDDCGVKLTIAFQAKDVEGSTSPQIGDKVEFSISDKQRPGQQVATCVRLLGRNSNSKRLLGYVATLKDNFGFIETANHDKEIFFHYSEFSGDVDSLELGDMVEYSLSKGKGNKVSAEKVNKTHSVNGITEEADPTIYSGKVIRPLRSVDPTQTEYQGMIEIVEEGDMKGEVYPFGIVGMANKGDCLQKGESVKFQLCVLGQNAQTMAYNITPLRRATVECVKDQFGFINYEVGDSKKLFFHVKEVQDGIELQAGDEVEFSVILNQRTGKCSACNVWRVCEGPKAVAAPRPDRLVNRLKNITLDDASAPRLMVLRQPRGPDNSMGFGAERKIRQAGVID

SEQ ID NO: 49494 - protein, 81 aa, Homo sapiens
MKDMSKYKPHILLSQENTQIRDLQQENRELWISLEEHQDALELIMSKYRKQMLQLMVAKKAVDAEPVLKAHQSHSAVRNFE

SEQ ID NO: 49495 - protein, 228 aa, Homo sapiens
MYLCFLLAVLLQLYVATEAILIALVGATPSYHWDLAELLPNQSHGNQSAGEDQAFGDWLLTANGSEIHKHVHFSSSFTSIASEWFLIANRSYKVSAASSFFFSGVFVGVISFGQLSDRFGRKKVYLTGFALDILFAIANGFSPSYEFFAVTRFLVGMMNGGMSLVAFVLLNECVGTAYWALAGSIGGLFFAVGIAQYALLGYFIRSWRTLAILVNLQGTVVFLLSLVD

SEQ ID NO: 49496 - protein, 530 aa, Homo sapiens [sequence omitted]

SEQ ID NO: 49497 - protein, 325 aa, Homo sapiens
MLVLGTAAESSWGDEQADFRCDTIQPGCQNVCYDQAFPISHIRYWVLQIIFVSTPSLVYMGHAMHTVRMQEKRKLREAERAKEVRGSGSYEYPVAEKAELSCWEEGNGRIALQGTLLNTYVCSILIRTTMEVGFIVGQYFIYGIFLTTLHVCRRSPCPHPVNCYVSRPTEKNVFIVFMLAVAALSLLLSLAELYHLGWKKIRQRFVKPRQHMAKCQLSGPSVGIVQSCTPPPDFNQCLENGPGGKFFNPFSNNMASQQNTDNLVTEQVRGQEQTPGEGFIQVRYGQKPEVPNGVSPGHRLPHGYHSDKRRLSKASSKARSDDLSV

SEQ ID NO: 49498 - protein, 714 aa, Homo sapiens
MPICAFQLPDLTVYNEDFRSFIERDLIEQSMLVALEQAGRLNWWVSVDPTSQRLLPLATTGDGNCLLHAASLGMWGFHDRDLMLRKALYALMEKGVEKEALKRRWRWQQTQQNKESGLVYTEDEWQKEWNELIKLASSEPRMHLGTNGANCGGVESSEEPVYESLEEFHVFVLAHVLRRPIVVVADTMLRDSGGEAFAPIPFGGIYLPLEVPASQCHRSPLVLAYDQAHFSALVSMEQKENTKEQAVIPLTDSEYKLLPLHFAVDPGKGWEWGKDDSDNVRLASVILSLEVKLHLLHSYMNVKWIPLSSDAQAPLAQPESPTASAGDEPRSTPESGDSDKESVGSSSTSNEGGRRKEKSKRDREKDKKRADSVANKLGSFGKTLGSKLKKNMGGLMHSKGSKPGGVGTGLGGSSGTETLEKKKKNSLKSWKGGKEEAAGDGPVSEKPPAESVGNGGSKYSQEVMQSLSILRTAMQGEGKFIFVGTLKMGHRHQYQEEMIQRYLSDAEERFLAEQKQKEAERKIMNGGIGGGPPPAKKPEPDAREEQPTGPPAESRAMAFSTGYPGDFTIPRPSGGGVHCQEPRRQLAGGPCVGGLPPYATFPRQCPPGRPYPHQDSIPSLEPGSHSKDGLHRGALLPPPYRVADSYSNGYREPPEPDGWAGGLRGLPPTQTKCKQPNCSFYGHPETNNFCSCCYREELRRREREPDGELLVHRF

SEQ ID NO: 49499 - protein, 139 aa, Homo sapiens
MSSLPGCIGLDAATATVESEEIAELQQAVVEELGISMEELRHFIDEELEKMDCVQQRKKQLAELETWVIQKESEVAHVDQLFDDASRAVTNCESLVKDFYSKLGLQYRDSSSEDESSRPTEIIEIPDEDDDVLSIDSAP

SEQ ID NO: 49500 - protein, 334 aa, Homo sapiens
MAAADGHAHIVELLVRNGADVNAKDMLKMTALHWATERHHRDVVELLIKYGADVHAFSKFDKSAFDIALEKNNAEILVILQEAMQNQVNVNPERANPVTDPVSMAAPFIFTSGEVVNLASLISSTNTKTTSANTEEIIEGNSVDSSIQQVMGSGGQRVITIVTDGVPLGNIQTSIPTGGIGQPFIVTVQDGQQVLTVPAGKVAEETVIKEEEEEKLPLTKKPRIGEKTNSVEESKEGNERELLQQQLQEANRRAQEYRHQLLKKEQEAEQYRLKLEAIARQQPNGVDFTMVEEVAEVDAVVVTEGELEERETKVTGSAGTTEPHTRVSMATVSS

SEQ ID NO: 49501 - protein, 372 aa, Homo sapiens
MAAADGHAHIVELLVRNGADVNAKDMLKMTALHWATERHHRDVVELLIKYGADVHAFSKFDKSAFDIALEKNNAEILVILQEAMQNQVNVNPERANPVTDPVSMAAPFIFTSGEVVNLASLISSTNTKTTSGDPHASTVQFSNSTTSVLATLAALAEASVPLSNSHRATANTEEIIEGNSVDSSIQQVMGSGGQRVITIVTDGVPLGNIQTSIPTGGIGQPFIVTVQDGQQVLTVPAGKVAEETVIKEEEEEKLPLTKKPRIGEKTNSVEESKEGNERELLQQQLQEANRRAQEYRHQLLKKEQEAEQYRLKLEAIARQQPNGVDFTMVEEVAEVDAVVVTEGELEERETKVTGSAGTTEPHTRVSMATVSS

SEQ ID NO: 49502 - protein, 665 aa, Homo sapiens
MGGSPRALDRHWTSFLKLRLNCSVPGDSTFYFDVLQALTGPVNLHGRSALFGVFTTQTNSIPGSAVCAFYLDEIERGFEGKFKEQRSLDGAWTPVSEDRVPSPRPGSCAGVGGAALFSSSRDLPDDVLTFIKAHPLLDPAVPPVTHQPLLTLTSRALLTQVAVDGMAGPHSNITVMFLGSNDGTVLKVLTPGGRSGGPEPILLEEIDAYSPARCSGKRTAQTARRIIGLELDTEGHRLFVAFSGCIVYLPLSRCARHGACQRSCLASQDPYCGWHSSRGCVDIRGSGGTDVDQAGNQESMEHGDCQDGATGSQSGPGDSAYGVRRDLPPASASRSVPIPLLLASVAAAFALGASVSGLLVSCACRRAHRRRGKDIETPGLPRPLSLRSLARLHGGGPEPPPPSKDGDAVQTPQLYTTFLPPPEGVPPPELACLPTPESTPELPVKHLRAAGDPWEWNQNRNNAKEGPGRSRGGHAAGGPAPRVLVRPPPPGCPGQAVEVTTLEELLRYLHGPQPPRKGAEPPAPLTSRALPPEPAPALLGGPSPRPHECASPLRLDVPPEGRCASAPARPALSAPAPRLGVGGGRRLPFSGHRAPPALLTRVPSGGPSRYSGGPGKHLLYLGRPEGYRGRALKRVDVEKPQLSLKPPLVGPSSRQAVPNGGRFNF

SEQ ID NO: 49503 - protein, 713 aa, Homo sapiens [sequence omitted]

SEQ ID NO: 49504 - protein, 1270 aa, Homo sapiens
MQNANHVTSSPVASQPIFITTQGFPVRNVRPVQNAMNQVGIVLNVQQGQTVRPITLVPAPGTQFVKPTVGVPQVFSQMTPVRPGSTMPVRPTTNTFTTVIPATLTIRSTVPQSQSQQTKSTPSTSTTPTATQPTSLGQLAVQSPGQSNQTTNPKLVSIASFVTVKRPGVTGENSNEVAKLVNTLNTIPSLGQSPGPVVVSNNSSAHGSQRTSGPESSMKVTSSIPVFDLQDGGRKICPRCNAQFRVTEALRGHMCYCCPEMVEYQKKGKSLDSEPSVPSAAKPPSPEKTAPVASTPSSTPIPALSPPTKVPEPNENVGDAVQTKLIMLVDDFYYGRDGGKVAQLTNFPKVATSFRCPHCTKRLKNNIRFMNHMKHHVELDQQNGEVDGHTICQHCYRQFSTPFQLQCHLENVHSPYESTTKCKICEWAFESEPLFLQHMKDTHKPGEMPYVCQVCQYRSSLYSEVDVHFRMIHEDTRHLLCPYCLKVFKNGNAFQQHYMRHQKRNVYHCNKCRLQFLFAKDKIEHKLQHHKTFRKPKQLEGLKPGTKVTIRASRGQPRTVPVSSNDTPPSALQEAAPLTSSMDPLPVFLYPPVQRSIQKRAVRKMSVMGRQTCLECSFEIPDFPNHFPTYVHCSLCRYSTCCSRAYANHMINNHVPRKSPKYLALFKNSVSGIKLACTSCTFVTSVGDAMAKHLVFNPSHRSSSILPRGLTWIAHSRHGQTRDRVHDRNVKNMYPPPSFPTNKAATVKSAGATPAEPEELLTPLAPALPSPASTATPPPTPTHPQALALPPLATEGAECLNVDDQDEGSPVTQEPELASGGGGSGGVGKKEQLSVKKLRVVLFALCCNTEQAAEHFRNPQRRIRRWLRRFQASQGENLEGKYLSFEAEEKLAEWVLTQREQQLPVNEETLFQKATKIGRSLEGGFKISYEWAVRFMLRHHLTPHARRAVAHTLPKDVAENAGLFIDFVQRQIHNQDLPLSMIVAIDEISLFLDTEVLSSDDRKENALQTVGTGEPWCDVVLAILADGTVLPTLVFYRGQMDQPANMPDSILLEAKESGYSDDEIMELWSTRVWQKHTACQRSKGMLVMDCHRTHLSEEVLAMLSASSTLPAVVPAGCSSKIQPLDVCIKRTVKNFLHKKWKEQAREMADTACDSDVLLQLVLVWLGEVLGVIGDCPELVQRSFLVASVLPGPDGNINSPTRNADMQEELIASLEEQLKLSGEHSESSTPRPRSSPEETIEPESLHQLFEGESETESFYGFEEADLDLMEI

SEQ ID NO: 49505 - protein, 63 aa, Homo sapiens [sequence omitted]

SEQ ID NO: 49506 - protein, 554 aa, Homo sapiens [sequence omitted]

SEQ ID NO: 49507 - protein, 158 aa, Homo sapiens
MKVIENRALKDEEKMELQEIQLKEAKHIAEEADRKYEEVARKLVIIEGDLERTEERAELAESRCREMDEQIRLMDQNLKCLSAAEEKYSQKEDKYEEEIKILTDKLKEAETRAEFAERSVAKLEKTIDDLEDELYAQKLKYKAISEELDHALNDMTSI

SEQ ID NO: 49508 - protein, 158 aa, Homo sapiens
MKVIENRALKDEEKMELQEIQLKEAKHIAEEADRKYEEVARKLVIIEGDLERTEERAELAESKCSELEEELKNVTNNLKSLEAQAEKYSQKEDKYEEEIKILTDKLKEAETRAEFAERSVAKLEKTIDDLEDELYAQKLKYKAISEELDHALNDMTSI

SEQ ID NO: 49509 - protein, 1039 aa, Homo sapiens
MISDHNDADFEEKVKQLIDITGKNQDECVIALHDCNGDVNRAINVLLEGNPDTHSWEMVGKKKGVSGQKDGGQTESNEEGKENRDRDRDYSRRRGGPPRRGRGASRGRECMHGALSKPAVVRGQENGLDGTKSGGPSGRGTERGRRGRGRGRGGSGRRGGRFSAQGMGTFNPADYAEPANTDDNYGNSSGNTWNNTGHFEPDDGTSAWRTATEEWGTEDWNEDLSETKIFTASNVSSVPLPAENVTITAGQRIDLAVLLGKTPSTMENDSSNLDPSQAPSLAQPLVFSNSKQTAISQPASGNTFSHHSMVSMLGKGFGDVGEAKGGSTTGSQFLEQFKTAQALAQLAAQHSQSGSTTTSSWDMGSTTQSPSLVQYDLKNPSDSAVHSPFTKRQAFTPSSTMMEVFLQEKSPAVATSTAAPPPPSSPLPSKSTSAPQMSPGSSDNQSSSPQPAQQKLKQQKKKASLTSKIPALAVEMPGSADISGLNLQFGALQFGSEPVLSDYESTPTTSASSSQAPSSLYTSTASESSSTISSNQSQESGYQSGPIQSTTYTSQNNAQGPLYEQRSTQTRRYPSSISSSPQKDLTQAKNGFSSVQATQLQTTQSVEGATGSAVKSDSPSTSSIPPLNETVSAASLLTTTNQHSSSLGGLSHSEEIPNTTTTQHSSTLSTQQNTLSSSTSSGRTSTSTLLHTSVESEANLHSSSSTFSTTSSTVSAPPPVVSVSSSLNSGSSLGLSLGSNSTVTASTRSSVATTSGKAPPNLPPGVPPLLPNPYIMAPGLLHAYPPQVYGYDDLQMLQTRFPLDYYSIPFPTPTTPLTGRDGSLASNPYSGDLTKFGRGDASSPAPATTLAQPQQNQTQTHHTTQQTFLNPALPPGYSYTSLPYYTGVPGLPSTFQYGPAVFPVAPTSSKQHGVNVSVNASATPFQQPSGYGSHGYNTGVSVTSSNTGVPDISGSVYSKTQQSFEKQGFHSGTPAASFNLPSALGSGGPINPATAAAYPPAPFMHILTPHQQPHSQILHHHLQQDGQDILNFVDDQLGE

SEQ ID NO: 49510 - protein, 943 aa, Homo sapiens
MISDHNDADFEEKVKQLIDITGKNQDECVIALHDCNGDVNRAINVLLEGNPDTHSWEMVGKKKGVSGQKDGGQTESNEEGKENRDRDRDYSRRRGGPPRRGRGASRGREFRGQENGLDGTKSGGPSGRGTERGRRGRGRGRGGSGRRGGRFSAQGMGTFNPADYAEPANTDDNYGNSSGNTWNNTGHFEPDDGTSAWRTATEEWGTEDWNEDLSETKIFTASNVSSVPLPAENVTITAGQRIDLAVLLGKTPSTMENDSSNLDPSQAPSLAQPLVFSNSKQTAISQPASGNTFSHHSMVSMLGKGFGDVGEAKGGSTTGSQFLEQFKTAQALAQLAAQHSQSGSTTTSSWDMGSTTQSPSLVQYDLKNPSDSAVHSPFTKRQAFTPSSTMMEVFLQEKSPAVATSTAAPPPPSSPLPSKSTSAPQMSPGSSDNQSSSPQPAQQKLKQQKKKASLTSKIPALAVEMPGSADISGLNLQFGALQFGSEPVLSDYESTPTTSASSSQAPSSLYTSTASESSSTISSNQSQESGYQSGPIQSTTYTSQNNAQGPLYEQRSTQTRRYPSSISSSPQKDLTQAKNGFSSVQATQLQTTQSVEGATGSAVKSDSPSTSSIPPLNETVSAASLLTTTNQHSSSLGGLSHSEEIPNTTTTQHSSTLSTQQNTLSSSTSSGRTSTSTLLHTSVESEANLHSSSSTFSTTSSTVSAPPPVVSVSSSLNSGSSLGLSLGSNSTVTASTRSSVATTSGKAPPNLPPGVPPLLPNPYIMAPGLLHAYPPQVYGYDDLQMLQTRFPLDYYSIPFPTPTTPLTGRDGSLASNPYSGDLTKFGRGDASSPAPATTLAQPQQNQTQTHHTTQQTFLNPALPPGYSYTSLPYYTGVPGLPSTFQYGPAVFPVAPTSSKQHGVNVSVNASATPFQQPSGYGSHGYNTGRKYPPPYKHFWTAES

SEQ ID NO: 49511 - protein, 1047 aa, Homo sapiens
MISDHNDADFEEKVKQLIDITGKNQDECVIALHDCNGDVNRAINVLLEGNPDTHSWEMVGKKKGVSGQKDGGQTESNEEGKENRDRDRDYSRRRGGPPRRGRGASRGREFRGQENGLDGTKSGGPSGRGTERGRRGRGRGRGGSGRRGGRFSAQGMGTFNPADYAEPANTDDNYGNSSGNTWNNTGHFEPDDGTSAWRTATEEWGTEDWNEDLSETKIFTASNVSSVPLPAENVTITAGQRIDLAVLLGKTPSTMENDSSNLDPSQAPSLAQPLVFSNSKQTAISQPASGNTFSHHSMVSMLGKGFGDVGEAKGGSTTGSQFLEQFKTAQALAQLAAQHSQSGSTTTSSWDMGSTTQSPSLVQYDLKNPSDSAVHSPFTKRQAFTPSSTMMEVFLQEKSPAVATSTAAPPPPSSPLPSKSTSAPQMSPGSSDNQSSSPQPAQQKLKQQKKKASLTSKIPALAVEMPGSADISGLNLQFGALQFGSEPVLSDYESTPTTSASSSQAPSSLYTSTASESSSTISSNQSQESGYQSGPIQSTTYTSQNNAQGPLYEQRSTQTRRYPSSISSSPQKDLTQAKNGFSSVQATQLQTTQSVEGATGSAVKSDSPSTSSIPPLNETVSAASLLTTTNQHSSSLGGLSHSEEIPNTTTTQHSSTLSTQQNTLSSSTSSGRTSTSTLLHTSVESEANLHSSSSTFSTTSSTVSAPPPVVSVSSSLNSGSSLGLSLGSNSTVTASTRSSVATTSGKAPPNLPPGVPPLLPNPYIMAPGLLHAYPPQVYGYDDLQMLQTRFPLDYYSIPFPTPTTPLTGRDGSLASNPYSGDLTKFGRGDASSPAPATTLAQPQQNQTQTHHTTQQTFLNPALPPGYSYTSLPYYTGVPGLPSTFQYGPAVFPVAPTSSKQHGVNVSVNASATPFQQPSGYGSHGYNTGVSVTSSNTGVPDISGSVYSKTQQSFEKQGFHSGTPAASFNLPSALGSGGPINPATAAAYPPAPFMHILTPHQQPHSQILHHHLQQDGQTGSGQRSQTSSIPQKPQTNKSAYNSYSWGAN

SEQ ID NO: 49512 - protein, 124 aa, Homo sapiens
MSLFDLFRGFFGFPGPRSHRDPFFGGMTRDEDDDEEEEEEGGSWGRGNPRFHSPQHPPEEFGFGFSFSPGGGIRFHDNFGFDDLVRDFNSIFSDMGAWTLPSHPPGVWLSLRGNLWFLVGWWVK

SEQ ID NO: 49513 - protein, 422 aa, Homo sapiens [sequence omitted]

SEQ ID NO: 49514 - protein, 346 aa, Homo sapiens
MGFSNMEDDGPEEEERVAEPQANFNTPQALRFEELLANLLNEQHQIAKELFEQLKMKKPSAKQQKEVEKVKPQCKEVHQTLILDPAQRKRLQQQMQQHVQLLTQIHLLATCNPNLNPEASSTRICLKELGTFAQSSIALHHQYNPKFQTLFQPCNLMGAMQLIEDFSTHVSIDCSPHKTVKKTANEFPCLPKQVAWILATSKVFMYPELLPVCSLKAKNPQDKILFTKAEDNLLALGLKHFEGTEFLNPLISKYLLTCKTARQLTVRIKNLNMNRAPDNIIKFYKKTKQLPVLGKCCEEIQPHQWKPPIEREEHRLPFWLKVQPSSSKSVGGRRSLKVLREYQGLP

SEQ ID NO: 49515 - protein, 2168 aa, Homo sapiens
MEDTSLSSGMLTQNTNVPILEGVDVAISQGITLPSLESFHPLNIHIGKGKLHATGSKRGKKMTLRPGPVTQEDRCDHLTLKEPFSGEPSEEVKEEGGKPQMNSEGEIPSLPSGSQSAKPVSQPRKSTQPDVCASPQEKPLRTLFHQPEEEIEDGGLFIPMEEQDNEESEKRRKKKKGTKRKRDGRGQEGTLAYDLKLDDMLDRTLEDGAKQHNLTAVNVRNILHEVITNEHVVAMMKAAISETEDMPMFEPKMTRSKLKEVVEKGVVIPTWNISPIKKANEIKPPQFVDIHLEEDDSSDEEYQPDDEEEDETAEESLLESDVESTASSPRGAKKSRLRQSSEMTETDEESGILSEAEKVTTPAIRHISAEVVPMGPPPPPKPKQTRDSTFMEKLHAVDEELASSPVCMDSFQPMDDSLIAFRTRSKMPLKDVPLGQLEAELQAPDITPDMYDPNTADDEDWKMWLGGLMNDDVGNEDEADDDDDPEYNFLEDLDEPDTEDFRTDRAVRITKKEVNELMEELFETFQDEMGFSNMEDDGPEEEECVAEPRPNFNTPQALRFEEPLANLLNEQHRTVKELFEQLKMKKSSAKQLQEVEKVKPQSEKVHQTLILDPAQRKRLQQQMQQHVQLLTQIHLLATCNPNLNPEATTTRIFLKELGTFAQSSIALHHQYNPKFQTLFQPCNLMGAMQLIEDFSTHVSIDCSPHKTVKKTANEFPCLPKQVAWILATSKVFMYPELLPVCSLKAKNPQDKIVFTKAEDNLLALGLKHFEGTEFPNPLISKYLLTCKTAHQLTVRIKNLNMNRAPDNIIKFYKKTKQLPVLGKCCEEIQPHQWKPPIEREEHRLPFWLKASLPSIQEELRHMADGAREVGNMTGTTEINSDRSLEKDNLELGSESRYPLLLPKGVVLKLKPVATRFPRKAWRQKRSSVLKPLLIQPSPSLQPSFNPGKTPARSTHSEAPPSKMVLRIPHPIQPATVLQTVPGVPPLGVSGGESFESPAALPAVPPEARTSFPLSESQTLLSSAPVPKVMLPSLAPSKFRKPYVRRRPSKRRGVKASPCMKPAPVIHHPASVIFTVPATTVKIVSLGGGCNMIQPVNAAVAQSPQTIPITTLLVNPTSFPCPLNQSLVASSVSPLIVSGNSVNLPIPSTPEDKAHVNVDIACAVADGENAFQGLEPKLEPQELSPLSATVFPKVEHSPGPPLADAECQEGLSENSACRWTVVKTEEGRQALEPLPQGIQESLNNPTPGDLEEIVKMEPEEAREEISGSPERDICDDIKVEHAVELDTGAPSEELSSAGEVTKQTVLQKEEERSQPTKTPSSSQEPPDEGTSGTDVNKGSSKNALSSMDPEVRLSSPPGKPEDSSSVDGQSVGTPVGPETGGEKNGPEEEEEEDFDDLTQDEEDEMSSASEESVLSVPELQETMEKLTWLASERRMSQEGESEEENSQEENSEPEEEEEEEAEGMESLQKEDEMTDEAVGDSAEKPPTFASPETAPEVETSRTPPGESIKAAGKGRNNHRARNKRGSRARASKDTSKLLLLYDEDILERDPLREQKDLAFAQAYLTRVREALQHIPGKYEDFLQVIYEFESSTQRRTAVDLYKSLQILLQDWPQLLKDFAAFLLPEQALACGLFEEQQAFEKSRKFLRQLEICFAENPSHHQKIIKVLQGCADCLPQEITELKTQMWQLLKGHDHLQDEFSIFFDHLRPAASRMGDFEEINWTEEKEYEFDGFEEVALPDVEEEEEPPKIPTASKNKRKKEIGVQNHDKETEWPDGAKDCACSCHEGGPDSKLKKSKRRSCSHCSSKVCDSKSYKSKEPHELVGSSPHREASPMPGAKEAGQGKDMMEEEAPEERESTEATQSRTVRTTRKGEMPVSGLAVGSTLPSPREVTVTERLLLDGPPPHSPETPQFPPTTGAVLYTVKRNQVGPEVRSCPKASPRLQKEREGQKAVSESEALMLVWDASETEKLPGTVEPPASFLSPVSSKTRDAGRRHVSGKPDTQERWLPSSRARVKTRDRTCPVHESPSGIDTSETSPKAPRGGLAKDSGTQAKGPEGEQQPKAAEATVCANNSKVSSTGEKVVLWTREADRVILTMCQEQGAQPQTFNIISQQLGNKTPAEVSHRFRELMQLFHTACEASSEDEDDATSTSNADQLSDHGDLLSEEELDE

SEQ ID NO: 49516 - protein, 22 aa, Homo sapiens
MDCMAQALVQYLEEPLTQVAAS

SEQ ID NO: 49517 - protein, 52 aa, Homo sapiens
MDCMEGRVAITRVANLLLCMYAKETVGFGMLKAKAQALVQYLEEPLTQVAAS

SEQ ID NO: 49518 - protein, 544 aa, Homo sapiens
MGHRPVLVLSQNTKRESGRKVQSGNINAAKTIADIIRTCLGPKSMMKMLLDPMGGIVMTNDGNAILREIQVQHPAAKSMIEISRTQDEEVGDGTTSVIILAGEMLSVAEHFLEQQMHPTVVISAYRKALDDMISTLKKISIPVDISDSDMMLNIINSSITTKAISRWSSLACNIALDAVKMVQFEENGRKEIDIKKYARVEKIPGGIIEDSCVLRGVMINKDVTHPRMRRYIKNPRIVLLDSSLEYKKGESQTDIEITREEDFTRILQMEEEYIQQLCEDIIQLKPDVVITEKGISDLAQHYLMRANITAIRRVRKTDNNRIARACGARIVSRPEELREDDVGTGAGLLEIKKIGDEYFTFITDCKDPKACTILLRGASKEILSEVERNLQDAMQVCRNVLLDPQLVPGGGASEMAVAHALTEKSKAMTGVEQWPYRAVAQALEVIPRTLIQNCGASTIRLLTSLRAKHTQENCETWGVNGETGTLVDMKELGIWEPLAVKLQTYKTAVETAVLLLRIDDIVSGHKKKGDDQSRQGGAPDAGQE

SEQ ID NO: 49519 - protein, 259 aa, Homo sapiens
MATLTSGGEKPNKDLESCSDDDNQGSKSPKILTDEMLLQACEGRTAHKAARLGITMKAKLARLEAQEQAFLARLKGQDPGAPQLQSESKPPKKKKKKRRQKEEEEATASERNDADEKHPEHAEQNIRKSKKKKRRHQEGKVSDEREGTTKGNEKEDAAGTSGLGELNSREQTNQSLRKGKKKKRWHHEEEKMGVLEEGGKGKEAAGSVRTEEVESRAYADPCSRRKKRQQQEEEDLNLEDRGEETFRWWNQGSREQSMQ

SEQ ID NO: 49520 - protein, 1427 aa, Homo sapiens
MVTNSSHLEVVKLIKSGAYVALTLLGSSPSSMGISGLQQDPSPAGAPRITSVIPSPPPPPPLPPPQRITGPKPLQDPEVQKHATQILRNMLRQEEKELQDILPLYGDTSQRPSEGRLSLDSQEGDSGLDSGTERFPSLSESLMNRNSVLSDPGLDSPRTSPVIMARVAQHHRRQGSDAAVPSTGDQGVDQSPKPLIIGPEEDYDPGYFNNESDIIFQDLEKLKSRPAHLGVFLRYIFSQADPSPLLFYLCAEVYQQASPKDSRSLGKDIWNIFLEKNAPLRVKIPEMLQAEIDSRLRNSEDARGVLCEAQEAAMPEIQEQIHDYRTKRTLGLGSLYGENDLLDLDGDPLRERQVAEKQLAALGDILSKYEEDRSAPMDFALNTYMSHAGIRLREARPSNTAEKAQSAPDKDKWLPFFPKTKKSSNSKKEKDALEDKKRNPILKYIGKPKSSSQSTFHIPLSPVEVKPGNVRNIIQHFENNQQYDAPEPGTQRLSTGSFPEDLLESDSSRSEIRLGRSESLKGREEMKRSRKAENVPRSRSDVDMDAAAEATRLHQSASSSTSSLSTRSLENPTPPFTPKMGRRSIESPSLGFCTDTLLPHLLEDDLGQLSDLEPEPDAQNWQHTVGKDVVAGLTQREIDRQEVINELFVTEASHLRTLRVLDLIFYQRMKKENLMPREELARLFPNLPELIEIHNSWCEAMKKLREEGPIIKEISDLMLARFDGPAREELQQVAAQFCSYQSIALELIKTKQRKESRFQLFMQEAESHPQCRRLQLRDLIISEMQRLTKYPLLLESIIKHTEGGTSEHEKLCRARDQCREILKYVNEAVKQTENRHRLEGYQKRLDATALERASNPLAAEFKSLDLTTRKMIHEGPLTWRISKDKTLDLHVLLLEDLLVLLQKQDEKLLLKCHSKTAVGSSDSKQTFSPVLKLNAVLIRSVATDKRAFFIICTSKLGPPQIYELVALTSSDKNTWMELLEEAVRNATRHPGAAPMPVHPPPPGPREPAQQGPTPSRVELDDSDVFHGEPEPEELPGGTGSQQRVQGKHQVLLEDPEQEGSAEEEELGVLPCPSTSLDGENRGIRTRNPIHLAFPGPLFMEGLADSALEDVENLRHLILWSLLPGHTMETQAAQEPEDDLTPTPSVISVTSHPWDPGSPGQAPPGGEGDNTQLAGLEGERPEQEDMGLCSLEHLPPRTRNSGIWESPELDRNLAEDASSTEAAGGYKVVRKAEVAGSKVVPALPESGQSEPGPPEVEGGTKATGNCFYVSMPSGPPDSSTDHSEAPMSPPQPDSLPAGQTEPQPQLQGGNDDPRRPSRSPPSLALRDVGMIFHTIEQLTLKLNRLKDMELAHRELLKSLGGESSGGTTPVGSFHTEAARWTDGSLSPPAKEPLASDSRNSHELGPCPEDGSDAPLEDSTADAAASPGP

SEQ ID NO: 49521 - protein, 1467 aa, Homo sapiens
MVTNSSHLEVVKLIKSGAYVALTLLGSSPSSMGISGLQQDPSPAGAPRITSVIPSPPPPPPLPPPQRITGPKPLQDPEVQKHATQILRNMLRQEEKELQRICEVYSRNPASLLEEQIEGARRRVTQLQLKIQQETGGSVDILPLYGDTSQRPSEGRLSLDSQEGDSGLDSGTERFPSLSESLMNRNSVLSDPGLDSPRTSPVIMARVAQHHRRQGSDAAVPSTGDQGVDQSPKPLIIGPEEDYDPGYFNNESDIIFQDLEKLKSRPAHLGVFLRYIFSQADPSPLLFYLCAEVYQQASPKDSRSLGKDIWNIFLEKNAPLRVKIPEMLQAEIDSRLRNSEDARGVLCEAQEAAMPEIQEQIHDYRTKRTLGLGSLYGENDLLDLDGDPLRERQVAEKQLAALGDILSKYEEDRSAPMDFALNTYMSHAGIRLREARPSNTAEKAQSAPDKDKWLPFFPKTKKSSNSKKEKDALEDKKRNPILKYIGKPKSSSQSTFHIPLSPVEVKPGNVRNIIQHFENNQQYDAPEPGTQRLSTGSFPEDLLESDSSRSEIRLGRSESLKGREEMKRSRKAENVPRSRSDVDMDAAAEATRLHQSASSSTSSLSTRSLENPTPPFTPKMGRRSIESPSLGFCTDTLLPHLLEDDLGQLSDLEPEPDAQNWQHTVGKDVVAGLTQREIDRQEVINELFVTEASHLRTLRVLDLIFYQRMKKENLMPREELARLFPNLPELIEIHNSWCEAMKKLREEGPIIKEISDLMLARFDGPAREELQQVAAQFCSYQSIALELIKTKQRKESRFQLFMQEAESHPQCRRLQLRDLIISEMQRLTKYPLLLESIIKHTEGGTSEHEKLCRARDQCREILKYVNEAVKQTENRHRLEGYQKRLDATALERASNPLAAEFKSLDLTTRKMIHEGPLTWRISKDKTLDLHVLLLEDLLVLLQKQDEKLLLKCHSKTAVGSSDSKQTFSPVLKLNAVLIRSVATDKRAFFIICTSKLGPPQIYELVALTSSDKNTWMELLEEAVRNATRHPGAAPMPVHPPPPGPREPAQQGPTPSRVELDDSDVFHGEPEPEELPGGTGSQQRVQGKHQVLLEDPEQEGSAEEEELGVLPCPSTSLDGENRGIRTRNPIHLAFPGPLFMEGLADSALEDVENLRHLILWSLLPGHTMETQAAQEPEDDLTPTPSVISVTSHPWDPGSPGQAPPGGEGDNTQLAGLEGERPEQEDMGLCSLEHLPPRTRNSGIWESPELDRNLAEDASSTEAAGGYKVVRKAEVAGSKVVPALPESGQSEPGPPEVEGGTKATGNCFYVSMPSGPPDSSTDHSEAPMSPPQPDSLPAGQTEPQPQLQGGNDDPRRPSRSPPSLALRDVGMIFHTIEQLTLKLNRLKDMELAHRELLKSLGGESSGGTTPVGSFHTEAARWTDGSLSPPAKEPLASDSRNSHELGPCPEDGSDAPLEDSTADAAASPGP

SEQ ID NO: 49522 - protein, 971 aa, Homo sapiens
MDDHKLSLDELGRKYQVDLSKGLTNQRAQDVLARDGPNALTPPPTTPEWVKFCRQLFGGFSILLWIGAILCFLAYGIQAAMEDEPSNDNLYLGVVLAAVVIVTGCFSYYQEAKSSKIMDSFKNMVPQQALVIREGEKMQINAEEVVVGDLVEVKGGDRVPADLRIISSHGCKVDNSSLTGESEPQTRSPEFTHENPLETRNICFFSTNCVEGTARGIVIATGDRTVMGRIATLASGLEVGRTPIAMEIEHFIQLITGVAVFLGVSFFVLSLILGYSWLEAVIFLIGIIVANVPEGLLATVTVCLTLTAKRMARKNCLVKNLEAVETLGSTSTICSDKTGTLTQNRMTVAHMWFDNQIHEADTTEDQSGATFDKRSPTWTALSRIAGLCNRAVFKAGQENISVSKRDTAGDASESALLKCIELSCGSVRKMRDRNPKVAEIPFNSTNKYQLSIHEREDSPQSHVLVMKGAPERILDRCSTILVQGKEIPLDKEMQDAFQNAYMELGGLGERVLGFCQLNLPSGKFPRGFKFDTDELNFPTEKLCFVGLMSMIDPPRAAVPDAVGKCRSAGIKVIMVTGDHPITAKAIAKGVGIISEGNETVEDIAARLNIPMSQVNPREAKACVVHGSDLKDMTSEQLDEILKNHTEIVFARTSPQQKLIIVEGCQRQGAIVAVTGDGVNDSPALKKADIGIAMGISGSDVSKQAADMILLDDNFASIVTGVEEGRLIFDNLKKSIAYTLTSNIPEITPFLLFIIANIPLPLGTVTILCIDLGTDMVPAISLAYEAAESDIMKRQPRNSQTDKLVNERLISMAYGQIGMIQALGGFFTYFVILAENGFLPSRLLGIRLDWDDRTMNDLEDSYGQEWTYEQRKVVEFTCHTAFFASIVVVQWADLIICKTRRNSVFQQGMKNKILIFGLLEETALAAFLSYCPGMGVALRMYPLNLLIFIYDEVRKLILRRYPGGWVEKETYY

SEQ ID NO: 49523 - protein, 207 aa, Homo sapiens
MKELAEEEPHLVEQFQKLSEAAGRVGSDMTSQQEFTSCLKETLSGLAKNATDLQNSSMSEEELTKAMEGLGMDEGDGEGNILPIMQSIMQNLLSKDVLYPSLKEITEKGLAPVGAQWHDLGSPQPPHPRLKCFSHLSLLSGWDYSIQNGCRVIGNLYLQSSLKNIRSSTASCAKYVSSLRQRPPQTVKPLKRLVLRWCWILCSSYKI

SEQ ID NO: 49524 - protein, 295 aa, Homo sapiens [sequence omitted]

SEQ ID NO: 49525 - protein, 25 aa, Homo sapiens
MGTAVWGSCYVPKQRNSPLEASTLE

SEQ ID NO: 49526 - protein, 412 aa, Homo sapiens [sequence omitted]

SEQ ID NO: 49527 - protein, 129 aa, Homo sapiens
MLEKASRRMLDDEMTVSLSLPSDSSMFNNNRSSSPSEQGSNSTYDRIFPLRPDYQEPSRLIRKLPEFAPGEEESGEDDVVGRVSREKPQQASGRYDTPAPSSLHLFLVSANLLRSPHSLSRFGLPLLLA

SEQ ID NO: 49528 - protein, 247 aa, Homo sapiens
MLLTISEFKPTYQDRVAPPGLTQIPQIQKTEISFRPNDPKSYEAYVLNIVRFLEKYKDSAQRDDMIFEDCGDVPSEPKERGDFNHERGERKVCRFKLEWLGNCSGLNDETYGYKEGKPCIIIKLNRVLGFKPKPPKNESLETYPVMKYNPNVLPVQCTGKRDEDKDKVGNVEYFGLGNSPGFPLQYYPYYGKLLQPKYLQPLLAVQFTNLTMDTEIRIECKAYGENIGYSEKDRFQGRFDVKIEVKS

SEQ ID NO: 49529 - protein, 118 aa, Homo sapiens
MDTVGNIWVCYASYVVFRIIYMLLITIATFQIAANLSMERYALVFGVNTFIALALQTLLTLIVVDASGLGLEITTQFLIYASYFALIAVVFLASGAVSVMKKCRKLEDPQSSSQVTTS

SEQ ID NO: 49530 - protein, 515 aa, Homo sapiens
MSPEFTTLPECHGHARDAFSFGTLVESLLTILNEQVSADVLSSFQQTLHSTLLNPIPKCRPALCTLLSHDFFRNDFLEVVNFLKSLTLKSEEEKTEFFKFLLDRVSCLSEELIASRLVPLLLNQLVFAEPVAVKSFLPYLLGPKKDHAQGETPCLLSPALFQSRVIPVLLQLFEVHEEHVRMVLLSHIEAYVEHFTQEQLKKVILPQVLLGLRDTSDSIVAITLHSLAVLVSLLGPEVVVGGERTKIFKRTAPSFTKNTDLSLEGDPFSQPIKFPINGLSDVKNTSEDSENFPSSSKKSEEWPDWSEPEEPENQTVNIQIWPREPCDDVKSQCTTLDVEESSWDDCEPSSLDTKVNPGGGITATKPVTSGEQKPIPALLSLTEESMPWKSSLPQKISLVQRGDDADQIEPPKVSSQERPLKVPSELGLGEEFTIQVKKKPVKDPEMDWFADMIPEIKPSAAFLILPELRTEMVPKKDDVSPVMQFSSKFAAAEITEGEAEGWEEEGELNWEDNNW

SEQ ID NO: 49531 - protein, 491 aa, Homo sapiens
MELLIDFAYTSQITVEEGNVQTLLPAACLLQLAEIQEACCEFLKRQLDPSNCLGIRAFADTHSCRELLRIADKFTQHNFQEVMESEEFMLLPANQLIDIISSDELNVRSEEQVFNAVMAWVKYSIQERRPQLPQVLQHVRLPLLSPKFLVGTVGSDPLIKSDEECRDLVDEAKNYLLLPQERPLMQGPRTRPRKPIRCGEVLFAVGGWCSGDAISSVERYDPQTNEWRMVASMSKRRCGVGVSVLDDLLYAVGGHDGSSYLNSVERYDPKTNQWSSDVAPTSTCRTSVGVAVLGGFLYAVGGQDGVSCLNIVERYDPKENKWTRVASMSTRRLGVAVAVLGGFLYAVGGSDGTSPLNTVERYNPQENRWHTIAPMGTRRKHLGCAVYQDMIYAVGGRDDTTELSSAERYNPRTNQWSPVVAMTSRRSGVGLAVVNGQLMAVGGFDGTTYLKTIEVFDPDANTWRLYGGMNYRRLGGGVGVIKMTHCESHIW

SEQ ID NO: 49532 - protein, 447 aa, Homo sapiens
MEFLKVARRNKREEMSGLYSPVSEDSTVPQFEAPSPSHSSIIDSTEYSQPPGFSGSSQTKKQPWYNSTLASRRKRLTAHFEDLEQCYFSTRMSRISDDSRTASQLDEFQECLSKFTRYNSVRPLATLSYASDLYNGSSIVSSIEFDRDCDYFAIAGVTKKIKVYEYDTVIQDAVDIHYPENEMTCNSKISCISWSSYHKNLLASSDYEGTVILWDGFTGQRSKVYQEHEKRCWSVDFNLMDPKLLASGSDDAKVKLWSTNLDNSVASIEAKANVCCVKFSPSSRYHLAFGCADHCVHYYDLRNTKQPIMVFKGHRKAVSYAKFVSGEEIVSASTDSQLKLWNVGKPYCLRSFKGHINEKNFVGLASNGDYIACGSENNSLYLYYKGLSKTLLTFKFDTVKSVLDKDRKEDDTNEFVSAVCWRALPDGESNVLIAANSQGTIKVLELV

SEQ ID NO: 49533 - protein, 413 aa, Homo sapiens
MITRMDLENLKDVLSRQKREIDVLQLVVDVDGNIVNEVKLLRKESRNMNSRVTQLYMQLLHEIIRKRDNSLELSQLENKILNVTTEMLKMATRYRELEVKYASLTDLVNNQSVMITLLEEQCLRIFSRQDTHVSPPLVQVVPQHIPNSQQYTPGLLGGNEIQRDPGYPRDLMPPPDLATSPTKSPFKIPPVTFINEGPFKDCQQAKEAGHSVSGIYMIKPENSNGPMQLWCENSLDPGGWTVIQKRTDGSVNFFRNWENYKKGFGNIDGEYWLGLENIYMLSNQDNYKLLIELEDWSDKKVYAEYSSFRLEPESEFYRLRLGTYQGNAGDSMMWHNGKQFTTLDRDKDMYAGNCAHFHKGGWWYNACAHSNLNGVWYRGGHYRSKHQDGIFWAEYRGGSYSLRAVQMMIKPID

SEQ ID NO: 49534 - protein, 476 aa, Homo sapiens
MVLGTVLLPPNSYGRDQDTSLCCLCTEASESALPDLTDHFASCVEDGFEGDKTGGSSPEALHRPYGCDVEPQALNEAIRWSSKENLLGATESDPNLFVALYDFVASGDNTLSITKGEKLRVLGYNQNGEWSEVRSKNGQGWVPSNYITPVNSLEKHSWYHGPVSRSAAEYLLSSLINGSFLVRESESSPGQLSISLRYEGRVYHYRINTTADGKVYVTAESRFSTLAELVHHHSTVADGLVTTLHYPAPKCNKPTVYGVSPIHDKWEMERTDITMKHKLGGGQYGEVYVGVWKKYSLTVAVKTLKEDTMEVEEFLKEAAVMKEIKHPNLVQLLGVCTLEPPFYIVTEYMPYGNLLDYLRECNREEVTAVVLLYMATQISSAMEYLEKKNFIHRDLAARNCLVGENHVVKVADFGLSRLMTGDTYTAHAGAKFPIKWTAPESLAYNTFSIKSDVWGKVERDFFLCHFIFFFINALIL

SEQ ID NO: 49535 - protein, 277 aa, Homo sapiens
MVFFLINPTKTFYYKSRFWLLKLLFRVFTAPFHKVGFADFWLADQLNSLSVILMDLEYMICFYSLELKWDESKGLLPNNSEERGHSDTMVFFYLWIVFYIISSCYTLIWDLKMDWGLFDKNAGENTFLREEIVYPQKAYYYCAIIEDVILRFAWTIQISITSTTLLPHSGDIIATVFAPLEVFRRFVWNFFRLENEHLNNCGEFRAVRDISVAPLNADDQTLLEQMMDQDDGVRNRQKNRSWKYNQSISLRRPRLASQSKARDTKVLIEDTDDEANT

SEQ ID NO: 49536 - protein, 342 aa, Homo sapiens [sequence omitted]

SEQ ID NO: 49537 - protein, 90 aa, Homo sapiens
MEVIVGDFGIVVVPRDAADTDRIMNHSSILRKYKNNIMVVKDDINHPMSVVSSTKSRLALQHGDGHVVDYLSQPVIDYILKSQLYINASG

SEQ ID NO: 49538 - protein, 6 aa, Homo sapiens
MFCTII

SEQ ID NO: 49539 - protein, 214 aa, Homo sapiens
MFEDENFIESSVAKLNALRKSGQFCDVRLQVCGHEMLAHRAVLACCSPYLFEIFNSDSDPHGISHVKFDDLNPEAVEVLLNYAYTAQLKADKELVKDVYSAAKKLKMDRVKQVCGDYLLSRMDVTSCISYRNFASCMGDSRLLNKVDAYIQEHLLQISEEEEFLKLPRLKLEVMLEDNVCLPSNGKLYTKVINWVQRSIWENGDSLEELMEEVY

SEQ ID NO: 49540 - protein, 5584 aa, Homo sapiens
MYDDLVQVIEGASKILETSLKRPKRPLFNFALVPFHDPEIGPVTITTDPKKFQYELRELYVQGGGDCPEMSIGAIKIALEISLPGSFIYVFTDARSKDYRLTHEVLQLIQQKQSQVVFVLTGDCDDRTHIGYKVYEEIASTSSGQVFHLDKKQVNEVLKWVEEAVQASKVHLLSTDHLEQAVNTWRIPFDPSLKEVTVSLSGPSPMIEIRNPLGKLIKKGFGLHELLNIHNSAKVVNVKEPEAGMWTVKTSSSGRHSVRITGLSTIDFRAGFSRKPTLDFKKTVSRPVQGIPTYVLLNTSGISTPARIDLLELLSISGSSLKTIPVKYYPHRKPYGIWNISDFVPPNEAFFLKVTGYDKDDYLFQRVSSVSFSSIVPDAPKVTMPEKTPGYYLQPGQIPCSVDSLLPFTLSFVRNGVTLGVDQYLKESASVNLDIAKVTLSDEGFYECIAVSSAGTGRAQTFFDVSEPPPVIQVPNNVTVTPGERAVLTCLIISAVDYNLTWQRNDRDVRLAEPARIRTLANLSLELKSVKFNDAGEYHCMVSSEGGSSAASVFLTVQEPPKVTVMPKNQSFTGGSEVSIMCSATGYPKPKIAWTVNDMFIVGSHRYRMTSDGTLFIKNAAPKDAGIYGCLASNSAGTDKQNSTLRYIEAPKLMVVQSELLVALGDITVMECKTSGIPPPQVKWFKGDLELRPSTFLIIDPLLGLLKIQETQDLDAGDYTCVAINEAGRATGKITLDVGSPPVFIQEPADVSMEIGSNVTLPCYVQGYPEPTIKWRRLDNMPIFSRPFSVSSISQLRTGALFILNLWASDKGTYICEAENQFGKIQSETTVTVTGLVAPLIGISPSVANVIEGQQLTLPCTLLAGNPIPERRWIKNSAMLLQNPYITVRSDGSLHIERVQLQDGGEYTCVASNVAGTNNKTTSVVVHVLPTIQHGQQILSTIEGIPVTLPCKASGNPKPSVIWSKKGELISTSSAKFSAGADGSLYVVSPGGEESGEYVCTATNTAGYAKRKVQLTVYVRPRVFGDQRGLSQDKPVEISVLAGEEVTLPCEVKSLPPPIITWAKETQLISPFSPRHTFLPSGSMKITETRTSDSGMYLCVATNIAGNVTQAVKLNVHVPPKIQRGPKHLKVQVGQRVDIPCNAQGTPLPVITWSKGGSTMLVDGEHHVSNPDGTLSIDQATPSDAGIYTCVATNIAGTDETEITLHVQEPPTVEDLEPPYNTTFQERVANQRIEFPCPAKGTPKPTIKWLHNGRELTGREPGISILEDGTLLVIASVTPYDNGEYICVAVNEAGTTERKYNLKVHVPPVIKDKEQVTNVSVLLNQLTNLFCEVEGTPSPIIMWYKDNVQVTESSTIQTVNNGKILKLFRATPEDAGRYSCKAINIAGTSQKYFNIDVLVPPTIIGTNFPNEVSVVLNRDVALECQVKGTPFPDIHWFKDGKPLFLGDPNVELLDRGQVLHLKNARRNDKGRYQCTVSNAAGKQAKDIKLTIYIPPSIKGGNVTTDISVLINSLIKLECETRGLPMPAITWYKDGQPIMSSSQALYIDKGQYLHIPRAQVSDSATYTCHVANVAGTAEKSFHVDVYVPPMIEGNLATPLNKQVVIAHSLTLECKAAGNPSPILTWLKDGVPVKANDNIRIEAGGKKLEIMSAQEIDRGQYICVATSVAGEKEIKYEVDVLVPPAIEGGDETSYFIVMVNNLLELDCHVTGSPPPTIMWLKDGQLIDERDGFKILLNGRKLVIAQAQVSNTGLYRCMAANTAGDHKKEFEVTVHVPPTIKSSGLSERVVVKYKPVALQCIANGIPNPSITWLKDDQPVNTAQGNLKIQSSGRVLQIAKTLLEDAGRYTCVATNAAGETQQHIQLHVHEPPSLEDAGKMLNETVLVSNPVQLECKAAGNPVPVITWYKDNRLLSGSTSMTFLNRGQIIDIESAQISDAGIYKCVAINSAGATELFYSLQVHVAPSISGSNNMVAVVVNNPVRLECEARGIPAPSLTWLKDGSPVSSFSNGLQVLSGGRILALTSAQISDTGRYTCVAVNAAGEKQRDIDLRVYVPPNIMGEEQNVSVLISQAVELLCQSDAIPPPTLTWLKDGHPLLKKPGLSISENRSVLKIEDAQVQDTGRYTCEATNVAGKTEKNYNVNIWVPPNIGGSDELTQLTVIEGNLISLLCESSGIPPPNLIWKKKGSPVLTDSMGRVRILSGGRQLQISIAEKSDAALYSCVASNVAGTAKKEYNLQVYIRPTITNSGSHPTEIIVTRGKSISLECEVQGIPPPTVTWMKDGHPLIKAKGVEILDEGHILQLKNIHVSDTGRYVCVAVNVAGMTDKKYDLSVHAPPSIIGNHRSPENISVVEKNSVSLTCEASGIPLPSITWFKDGWPVSLSNSVRILSGGRMLRLMQTTMEDAGQYTCVVRNAAGEERKIFGLSVLVPPHIVGENTLEDVKVKEKQSVTLTCEVTGNPVPEITWHKDGQPLQEDEAHHIISGGRFLQITNVQVPHTGRYTCLASSPAGHKSRSFSLNVFVSPTIAGVGSDGNPEDVTVILNSPTSLVCEAYSYPPATITWFKDGTPLESNRNIRILPGGRTLQILNAQEDNAGRYSCVATNEAGEMIKHYEVKVYIPPIINKGDLWGPGLSPKEVKIKVNNTLTLECEAYAIPSASLSWYKDGQPLKSDDHVNIAANGHTLQIKEAQISDTGRYTCVASNIAGEDELDFDVNIQVPPSFQKLWEIGNMLDTGRNGEAKDVIINNPISLYCETNAAPPPTLTWYKDGHPLTSSDKVLILPGGRVLQIPRAKVEDAGRYTCVAVNEAGEDSLQYDVRVLVPPIIKGANSDLPEEVTVLVNKSALIECLSSGSPAPRNSWQKDGQPLLEDDHHKFLSNGRILQILNTQITDIGRYVCVAENTAGSAKKYFNLNVHVPPSVIGPKSENLTVVVNNFISLTCEVSGFPPPDLSWLKNEQPIKLNTNTLIVPGGRTLQIIRAKVSDGGEYTCIAINQAGESKKKFSLTVYVPPSIKDHDSESLSVVNVREGTSVSLECESNAVPPPVITWYKNGRMITESTHVEILADGQMLHIKKAEVSDTGQYVCRAINVAGRDDKNFHLNVYVPPSIEGPEREVIVETISNPVTLTCDATGIPPPTIAWLKNHKRIENSDSLEVRILSGGSKLQIARSQHSDSGNYTCIASNMEGKAQKYYFLSIQVPPSVAGAEIPSDVSVLLGENVELVCNANGIPTPLIQWLKDGKPIASGETERIRVSANGSTLNIYGALTSDTGKYTCVATNPAGEEDRIFNLNVYVTPTIRGNKDEAEKLMTLVDTSINIECRATGTPPPQINWLKNGLPLPLSSHIRLLAAGQVIRIVRAQVSDVAVYTCVASNRAGVDNKHYNLQVFAPPNMDNSMGTEEITVLKGSSTSMACITDGTPAPSMAWLRDGQPLGLDAHLTVSTHGMVLQLLKAETEDSGKYTCIASNEAGEVSKHFILKVLEPPHINGSEEHEEISVIVNNPLELTCIASGIPAPKMTWMKDGRPLPQTDQVQTLGGGEVLRISTAQVEDTGRYTCLASSPAGDDDKEYLVRVHVPPNIAGTDEPRDITVLRNRQVTLECKSDAVPPPVITWLRNGERLQATPRVRILSGGRYLQINNADLGDTANYTCVASNIAGKTTREFILTVNVPPNIKGGPQSLVILLNKSTVLECIAEGVPTPRITWRKDGAVLAGNHARYSILENGFLHIQSAHVTDTGRYLCMATNAAGTDRRRIDLQVHVPPSIAPGPTNMTVIVNVQTTLACEATGIPKPSINWRKNGHLLNVDQNQNSYRLLSSGSLVIISPSVDDTATYECTVTNGAGDDKRTVDLTVQVPPSIADEPTDFLVTKHAPAVITCTASGVPFPSIHWTKNGIRLLPRGDGYRILSSGAIEILATQLNHAGRYTCVARNAAGSAHRHVTLHVHEPPVIQPQPSELHVILNNPILLPCEATGTPSPFITWQKEGINVNTSGRNHAVLPSGGLQISRAVREDAGTYMCVAQNPAGTALGKIKLNVQVPPVISPHLKEYVIAVDKPITLSCEADGLPPPDITWHKDGRAIVESIRQRVLSSGSLQIAFVQPGDAGHYTCMAANVAGSSSTSTKLTVHVPPRIRSTEGHYTVNENSQAILPCVADGIPTPAINWKKDNVLLANLLGKYTAEPYGELILENVVLEDSGFYTCVANNAAGEDTHTVSLTVHVLPTFTELPGDVSLNKGEQLRLSCKATGIPLPKLTWTFNNNIIPAHFDSVNGHSELVIERVSKEDSGTYVCTAENSVGFVKAIGFVYVKEPPVFKGDYPSNWIEPLGGNAILNCEVKGDPTPTIQWNRKGVDIEISHRIRQLGNGSLAIYGTVNEDAGDYTCVATNEAGVVERSMSLTLQSPPIITLEPVETVINAGGKIILNCQATGEPQPTITWSRQGHSISWDDRVNVLSNNSLYIADAQKEDTSEFECVARNLMGSVLVRVPVIVQVHGGFSQWSAWRACSVTCGKGIQKRSRLCNQPLPANGGKPCQGSDLEMRNCQNKPCPVDGSWSEWSLWEECTRSCGRGNQTRTRTCNNPSVQHGGRPCEGNAVEIIMCNIRPCPVHGAWSAWQPWGTCSESCGKGTQTRARLCNNPPPAFGGSYCDGAETQMQVCNERNCPIHGKWATWASWSACSVSCGGGARQRTRGCSDPVPQYGGRKCEGSDVQSDFCNSDPCPTHGNWSPWSGWGTCSRTCNGGQMRRYRTCDNPPPSNGGRACGGPDSQIQRCNTDMCPVDGSWGSWHSWSQCSASCGGGEKTRKRLCDHPVPVKGGRPCPGDTTQVTRCNVQACPGGPQRARGSVIGNINDVEFGIAFLNATITDSPNSDTRIIRAKITNVPRSLGSAMRKIVSILNPIYWTTAKEIGEAVNGFTLTNAVFKRETQVEFATGEILQMSHIARGLDSDGSLLLDIVVSGYVLQLQSPAEVTVKDYTEDYIQTGPGQLYAYSTRLFTIDGISIPYTWNHTVFYDQAQGRMPFLVETLHASSVESDYNQIEETLGFKIHASISKGDRSNQCPSGFTLDSVGPFCADEDECAAGNPCSHSCHNAMGTYYCSCPKGLTIAADGRTCQDIDECALGRHTCHAGQDCDNTIGSYRCVVRCGSGFRRTSDGLSCQDINECQESSPCHQRCFNAIGSFHCGCEPGYQLKGRKCMDVNECRQNVCRPDQHCKNTRGGYKCIDLCPNGMTKAENGTCIDIDECKDGTHQCRYNQICENTRGSYRCVCPRGYRSQGVGRPCMDINECEQVPKPCAHQCSNTPGSFKCICPPGQHLLGDGKSCAGLERLPNYGTQYSSYNLARFSPVRNNYQPQQHYRQYSHLYSSYSEYRNSRTSLSRTRRTIRKTCPEGSEASHDTCVDIDECENTDACQHECKNTFGSYQCICPPGYQLTHNGKTCQDIDECLEQNVHCGPNRMCFNMRGSYQCIDTPCPPNYQRDPVSGFCLKNCPPNDLECALSPYALEYKLVSLPFGIATNQDLIRLVAYTQDGVMHPRTTFLMVDEEQTVPFALRDENLKGVVYTTRPLREAETYRMRVRASSYSANGTIEYQTTFIVYIAVSAYPY

SEQ ID NO: 49541 - protein, 2124 aa, Homo sapiens
MNGLKTSNEHLQKHVEDLLTKLKEAKEQQASMEEKFHNELNAHIKLSNLYKSAADDSEAKSNELTRAVEELHKLLKEAGEANKAIQDHLLEVEQSKDQMEKEMLEKIGRLEKELENANDLLSATKRKGAILSEEELAAMSPTAAAVAKIVKPGMKLTELYNAYVETQDQLLLEKLENKRINKYLDEIVKEVEAKAPILKRQREEYERAQKAVASLSVKLEQAMKEIQRLQEDTDKANKQSSVLERDNRRMEIQVKDLSQQIRVLLMELEEARGNHVIRDEEVSSADISSSSEVISQHLVSYRNIEELQQQNQRLLVALRELGETREREEQETTSSKITELQLKLESALTELEQLRKSRQHQMQLVDSIVRQRDMYRILLSQTTGVAIPLHASSLDDVSLASTPKRPSTSQTVSTPAPVPVIESTEAIEAKAALKQLQEIFENYKKEKAENEKIQNEQLEKLQEQVTDLRSQNTKISTQLDFASKRYEMLQDNVEGYRREITSLHERNQKLTATTQKQEQIINTMTQDLRGANEKLAVAEVRAENLKKEKEMLKLSEVRLSQQRESLLAEQRGQNLLLTNLQTIQGILERSETETKQRLSSQIEKLEHEISHLKKKLENEVEQRHTLTRNLDVQLLDTKRQLDTETNLHLNTKELLKNAQKEIATLKQHLSNMEVQVASQSSQRTGKGQPSNKEDVDDLVSQLRQTEEQVNDLKERLKTSTSNVEQYQAMVTSLEESLNKEKQVTEEVRKNIEVRLKESAEFQTQLEKKLMEVEKEKQELQDDKRRAIESMEQQLSELKKTLSSVQNEVQEALQRASTALSNEQQARRDCQEQAKIAVEAQNKYERELMLHAADVEALQAAKEQVSKMASVRQHLEETTQKAESQLLECKASWEERERMLKDEVSKCVCRCEDLEKQNRLLHDQIEKLSDKVVASVKEGVQGPLNVSLSEEGKSQEQILEILRFIRREKEIAETRFEVAQVESLRYRQRVELLERELQELQDSLNAEREKVQVTAKTMAQHEELMKKTETMNVVMETNKMLREEKERLEQDLQQMQAKVRKLELDILPLQEANAELSEKSGMLQAEKKLLEEDVKRWKARNQHLVSQQKDPDTEEYRKLLSEKEVHTKRIQQLTEEIGRLKAEIARSNASLTNNQNLIQSLKEDLNKVRTEKETIQKDLDAKIIDIQEKVKTITQVKKIGRRYKTQYEELKAQQDKVMETSAQSSGDHQEQHVSVQEMQELKETLNQAETKSKSLESQVENLQKTLSEKETEARNLQEQTVQLQSELSRLRQDLQDRTTQEEQLRQQITEKEEKTRKAIVAAKSKIAHLAGVKDQLTKENEELKQRNGALDQQKDELDVRITALKSQYEGRISRLERELREHQERHLEQRDEPQEPSNKVPEQQRQITLKTTPASGERGIASTSDPPTANIKPTPVVSTPSKVTAAAMAGNKSTPRASIRPMVTPATVTNPTTTPTATVMPTTQVESQEAMQSEGPVEHVPVFGSTSGSVRSTSPNVQPSISQPILTVQQQTQATAFVQPTQQSHPQIEPANQELSSNIVEVVQSSPVERPSTSTAVFGTVSATPSSSLPKRTREEEEDSTIEASDQVSDDTVEMPLPKKLKSVTPVGTEEEVMAEESTDGEVETQVYNQDSQDSIGEGVTQGDYTPMEDSEETSQSLQIDLGPLQSDQQTTTSSQDGQGKGDDVIVIDSDDEEEDDDENDGEHEDYEEDEEDDDDDEDDTGMGDEGEDSNEGTGSADGNDGYEADDAEGGDGTDPGTETEESMGGGEGNHRAADSQNSGEGNTGAAESSFSQEVSREQQPSSASERQAPRAPQSPRRPPHPLPPRLTIHAPPQELGPPVQRIQMTRRQSVGRGLQLTPGIGGMQQHFFDDEDRTVPSTPTLVVPHRTDGFAEAIHSPQVAGVPRFRFGPPEDMPQTSSSHSDLGQLASQGGLGMYETPLFLAHEEESGGRSVPTTPLQVAAPVTVFTESTTSDASEHASQSVPMVTTSTGTLSTTNETATGDDGDEVFVEAESEGISSEAGLEIDSQQEEEPVQASDESDLPSTSQDPPSSSSVDTSSSQPKPFRRVRLQTTLRQGVRGRQFNRQRGVSHAMGGRGGINRGNIN

SEQ ID NO: 49542 - protein, 259 aa, Homo sapiens [sequence omitted]

SEQ ID NO: 49543 - protein, 211 aa, Homo sapiens [sequence omitted]

SEQ ID NO: 49544 - protein, 46 aa, Homo sapiens
MPSSMDEYVHQLNIIWVVPFSGININASLIALLYSLLTTINMKFTP

SEQ ID NO: 49545 - protein, 389 aa, Homo sapiens
MQMIPVGLLGRDILASADTGSGKTAAFLLPVIMRALFESKTPSALILTPTRELAIQIERQAKELMSGLPRMKTVLLVGGLPLPPQLYRLQQHVKVIIATPGRLLDIIKQSSVELCGVKIVVVDEADTMLKMGFQQQVLDILENIPNDCQTILVSATIPTSIEQLASQLLHNPVRIITGEKNLPCANVRQIILWVEDPAKKKKLFEILNDKKLFKPPVLVFVDCKLGADLLSEAVQKITGLKSISIHSEKSQIERKNILKGLLEGDYEVVVSTGVLGRGLDLISVRLVVNFDMPSSMDEYVHQIGRVGRLGQNGTAITFINNNSKRLFWDIAKRVKPTGSILPPQLLNSPYLHDQKRKEQQKDKQTQNDLVTGANLMDIIRKHDKSNSQK

SEQ ID NO: 49546 - protein, 209 aa, Homo sapiens
MIGYTLKYVAFNGTKVGKQIVENFSPNQTKFTVQRTDPVSRYRFTLSARTQVGSGEAVTEESPAPPNEATPTAAPPTLPPTTVGATGAVSSTDATAIAATTEATTVPIIPTVAPTTIATTTTVATTTTTTAAATTTTESPPTTTSGTKIHESGTAHRPCSPSPPGPPPQRPPDEPTGSPSEEVGSGVVFATTSLCVSFGNSPVTGCSVP

SEQ ID NO: 49547 - protein, 594 aa, Homo sapiens
MKKQAVKRHHHKHNLRHRYEFLETLGKGTYGKVKKARESSGRLVAIKSIRKDKIKDEQDLMHIRREIEIMSSLNHPHIIAIHEVFENSSKIVIVMEYASRGDLYDYISERQQLSEREARHFFRQIVSAVHYCHQNRVVHRDLKLENILLDANGNIKIADFGLSNLYHQGKFLQTFCGSPLYASPEIVNGKPYTGPEVDSWSLGVLLYILVHGTMPFDGHDHKILVKQISNGAYREPPKPSDACGLIRWLLMVNPTRRATLEDVASHWWVNWGYATRVGEQEAPHEGGHPGSDSARASMADWLRRSSRPLLENGAKVCSFFKQHAPGGGSTTPGLERQHSLKKSRKENDMAQSLHSDTADDTAHRPGKSNLKLPKGILKKKVSASAEGVQEDPPELSPIPASPGQAAPLLPKKGILKKPRQRESGYYSSPEPSESGELLDAGDVFVSGDPKEQKPPQASGLLLHRKGILKLNGKFSQTALELAAPTTFGSLDELAPPRPLARASRPSGAVSEDSILSSESFDQLDLPERLPEPPLRGCVSVDNLTGLEEPPSEGPGSCLRRWRQDPLGDSCFSLTDCQEVTATYRQALRVCSKLT

SEQ ID NO: 49548 - protein, 90 aa, Homo sapiens
MMAQKRKGKMVKLYVLGSVLALFGVVLGLMETVCSPFTAARRLRDQEAAVAELQAALERQALQKQALQEKGKQQDTVLGGRALSNRQHAS

SEQ ID NO: 49549 - protein, 637 aa, Homo sapiens
MAAESTESPENVALSADPEGKEDGEEPPGTSQTSPEEFTDAKHESLFSLETNFLEEESGDNSSLKASQDPFLQHVNKELKEKAIQAVATNPKTTHELKWPILGQLFFSSKFQKLETFKPPKDIDLKSLHLQKPLESTWTKTNSQFLSGPQKSSSPFTPLQKELFLIMNSYRDLFYPERTALKNGEEIRHVYCLHVINHILKANAQVLGNNSRRRSQKFGVGDDDDFRDQGLTRPKVLIVVPFREAALRVVQLFISLLEGDSKKKIIVSNKKRFQGEYGSDPEERPPNLKRPEDYEAVFVGNIDDHFRIGVAILQRSIRLYAPFYSSDILIASPLGLRTIIGGEGEKKRDFDFLSSIELLIIDQADIYLMQNWEHVLHLMNHMNLLPLDSHGVDFSRVRMWSLNNWSKYYRQTLLFGALQDAQINSVFNKYCVNMQGQVAVRNVPMTGSISHVLVQLPHVFQRMEAENLASVIDARFNFFVNKILPQYRDAVMSHTLIYIPSYFDFVRLRNYFKKEELNFTHICEYTQKSGVSRARHFFLQGEKQFLLFTERFHFYKRYTIKGIRNLIFYELPTYPHFYSEICNMLRATNRGEEATWTCTVLYSKYDAQRLAAVVGVERAAQMLQSNKNVHLFITGEK

SEQ ID NO: 49550 - protein, 960 aa, Homo sapiens
MAGGRRGLVAPQNTFLENIVRRSNDTNFVLGNAQIVDWPIVYSNDGFCKLSGYHRAEVMQKSSTCSFMYGELTDKDTIEKVRQTFENYEMNSFEILMYKKNRTPVWFFVKIAPIRNEQDKVVLFLCTFSDITAFKQPIEDDSCKGWGKFARLTRALTSSRGVLQQLAPSVQKGENVHKHSRLAEVLQLGSDILPQYKQEAPKTPPHIILHYCVFKTTWDWIILILTFYTAILVPYNVSFKTRQNNVAWLVVDSIVDVIFLVDIVLNFHTTFVGPAGEVISDPKLIRMNYLKTWFVIDLLSCLPYDVINAFENVDEGISSLFSSLKVVRLLRLGRVARKLDHYIEYGAAVLVLLVCVFGLAAHWMACIWYSIGDYEIFDEDTKTIRNNSWLYQLAMDIGTPYQFNGSGSGKWEGGPSKNSVYISSLYFTMTSLTSVGFGNIAPSTDIEKIFAVAIMMIGSLLYATIFGNVTTIFQQMYANTNRYHEMLNSVRDFLKLYQVPKGLSERVMDYIVSTWSMSRGIDTEKVLQICPKDMRADICVHLNRKVFKEHPAFRLASDGCLRALAMEFQTVHCAPGDLIYHAGESVDSLCFVVSGSLEVIQDDEVVAILGKGDVFGDVFWKEATLAQSCANVRALTYCDLHVIKRDALQKVLEFYTAFSHSFSRNLILTYNLRKRIVFRKISDVKREEEERMKRKNEAPLILPPDHPVRRLFQRFRQQKEARLAAERGGRDLDDLDVEKGNVLTEHASANHSLVKASVVTVRESPATPVSFQAASTSGVPDHAKLQAPGSECLGPKGGGGDCAKRKSWARFKDACGKSEDWNKVSKAESMETLPERTKASGEATLKKTDSCDSGITKSDLRLDNVGEARSPQDRSPILAEVKHSFYPIPEQTLQATVLEVRHELKEDIKALNAKMTNIEKQLSEILRILTSRRSSQSPQELFEISRPQSPESERDIFGAS

SEQ ID NO: 49551 - protein, 432 aa, Homo sapiens [sequence omitted]

SEQ ID NO: 49552 - protein, 178 aa, Homo sapiens
MASNQNSPIRTFGLNLSSDSSALGAVASDSEQSKTEEERESRSLFPGSLKPKLGKRDYLEKAGELIKLALKKEEEDDYEAASDFYRKGVDLLLEGVQGESSPTRREAVKRRTAEYLMRAESISSLYGKPQLDDVSQPPGSLSSRPLWNLRSPAEELKAFRVLGVIDKVANCGHISVNF

SEQ ID NO: 49553 - protein, 45 aa, Homo sapiens
MVVALDALHREGIVCRDLNPNNILLNDRGQELLQMHFFLFAVASN

SEQ ID NO: 49554 - protein, 199 aa, Homo sapiens
MWIKQVLNQDLTFQHIKIIYPTAPPRSYTPMKGGISNVWFDRFKITNDCPEHLESIDVMCQVLTDLIDEEVKSGIKKNRILIGGFSMGGCMAIHLAYRNHQDVAGVFALSSFLNKASAVYQALQKSNGVLPELFQCHGTADELVLHSWAEETNSMLKSLGVTTKFHSFPNVYHELSKTELDILKLWILTKLPGEMEKQK

SEQ ID NO: 49555 - protein, 283 aa, Homo sapiens
MRLVASAYSIAQKAGMIVRRVIAEGDLGIVEKTCATDLQTKADRLAQMSICSSLARKFPKLTIIGEEDLPSEEVDQELIEDSQWEEILKQPCPSQYSAIKEEDLVVWVDPLDGTKEYTEGLLDNVTVLIGIAYEGKAIAGVINQPYYNYENNEKQQLREHRNEAKAGPDAVLGRTIWGVLGLGAFGFQLKEVPAGKHIITTTRSHSNKLVTDCVAAMNPDAVLRVGGAGNKIIQLIEGKASAYVFASPGCKKWDTCAPEVILHAVGGKLTDIHGNVLQYHKDV

SEQ ID NO: 49556 - protein, 300 aa, Homo sapiens [sequence omitted]

SEQ ID NO: 49557 - protein, 1188 aa, Homo sapiens
MLMYRGEALEDFTGPDCRFVNFKKGDPVYVYYKLARGWPEVWAGSVGRTFGYFPKDLIQVVHEYTKEELQVPTDETDFVCFDGGRDDFHNYNVEELLGFLELYNSAATDSEKAVEKTLQDMEKNPELSKEREPEPEPVEANSEESDSVFSENTEDLQEQFTTQKHHSHANSQANHAQGEQASFESFEEMLQDKLKVPESENNKTSNSSQVSNEQDKIDAYKLLKKEMTLDLKTKFGSTADALVSDDETTRLVTSLEDDFDEELDTEYYAVGKEDEENQEDFDELPLLTFTDGEDMKTPAKSGVEKYPTDKEQNSNEEDKVQLTVPPGIKNDDKNILTTWGDTIFSIVTGGEETRDTMDLESSSSEEEKEDDDDALVPDSKQGKPQSATDYSDPDNVDDGLFIVDIPKTNNDKEVNAEHHIKGKGRGVQESKRGLVQDKTELEDENQEGMTVHSSVHSNNLNSMPAAEKGKDTLKSAYDDTENDLKGAAIHISKGMLHEEKPGEQILEGGSESESAQKAAGNQMNDRKIQQESLGSAPLMGDDHPNASRDSVEGDALVNGAKLHTLSVEHQREELKEELVLKTQNQPRFSSPDEIDLPRELEDEVPILGRNLPWQQERDVAATASKQMSEKIRLSEGEAKEDSLDEEFFHHKAMQGTEVGQTDQTDSTGGPAFLSKVEEDDYPSEELLEDENAINAKRSKEKNPGNQGRQFDVNLQVPDRAVLGTIHPDPEIEESKQETSMILDSEKTSETAAKGVNTGGREPNTMVEKERPLADKKAQRPFERSDFSDSIKIQTPELGEVFQNKDSDYLKNDNPEEHLKTSGLAGEPEGELSKEDHENTEKYMGTESQGSAAAEPEDDSFHWTPHTSVEPGHSDKREDLLIISSFFKEQQSLQRFQKYFNVHELEALLQEMSSKLKSAQQESLPYNMEKVLDKVFRASESQILSIAEKMLDTRVAENRDLGMNENNIFEEAAVLDDIQDLIYFVRYKHSTAEETATLVMAPPLEEGLGGAMEEMQPLHEDNFSREKTAELNVQVPEEPTHLDQRVIGDTHASEVSQKPNTEKDLDPGPVTTEDTPMDAIDANKQPETAAEEPASVTPLENAILLIYSFMFYLTKSLVATLPDDVQPGPDFYGLPWKPVFITAFLGIASFAIFLWRTVLVVSKLMHTLTHKFKYGFIITVLLFLFQFLI

SEQ ID NO: 49558 - protein, 1127 aa, Homo sapiens
MPMFLTVYLSNNEQHFTEVPVTPETICRDVVDLCKEPGESDCHLAEVWCGSERPVADNERMFDVLQRFGSQRNEVRFFLRHERPPGRDIVSGPRSQDPSLKRNGVKVPGEYRRKENGVNSPRMDLTLAELQEMASRQQQQIEAQQQLLATKEQRLKFLKQQDQRQQQQVAEQEKLKRLKEIAENQEAKLKKVRALKGHVEQKRLSNGKLVEEIEQMNNLFQQKQRELVLAVSKVEELTRQLEMLKNGRIDSHHDNQSAVAELDRLYKELQLRNKLNQEQNAKLQQQRECLNKRNSEVAVMDKRVNELRDRLWKKKAALQQKENLPVSSDGNLPQQAASAPSRVAAVGPYIQSSTMPRMPSRPELLVKPALPDGSLVIQASEGPMKIQTLPNMRSGAASQTKGSKIHPVGPDWSPSNADLFPSQGSASVPQSTGNALDQVDDGEVPLREKEKKVRPFSMFDAVDQSNAPPSFGTLRKNQSSEDILRDAQVANKNVAKVPPPVPTKPKQINLPYFGQTNQPPSDIKPDGSSQQLSTVVPSMGTKPKPAGQQPRVLLSPSIPSVGQDQTLSPGSKQESPPAAAVRPFTPQPSKDTLLPPFRKPQTVAASSIYSMYTQQQAPGKNFQQAVQSALTKTHTRGPHFSSVYGKPVIAAAQNQQQHPENIYSNSQGKPGSPEPETEPVSSVQENHENERIPRPLSPTKLLPFLSNPYRNQSDADLEALRKKLSNAPRPLKKRSSITEPEGPNGPNIQKLLYQRTTIAAMETISVPSYPSKSASVTASSESPVEIQNPYLHVEPEKEVVSLVPESLSPEDVGNASTENSDMPAPSPGLDYEPEGVPDNSPNLQNNPEEPNPEAPHVLDVYLEEYPPYPPPPYPSGEPEGPGEDSVSMRPPEITGQVSLPPGKRTNLRKTGSERIAHGMRVKFNPLALLLDSSLEGEFDLVQRIIYEVDDPSLPNDEGITALHNAVCAGHTEIVKFLVQFGVNVNAADSDGWTPLHCAASCNNVQVCKFLVESGAAVFAMTYSDMQTAADKCEEMEEGYTQCSQFLYGVQEKMGIMNKGVIYALWDYEPQNDDELPMKEGDCMTIIHREDEDEIEWWWARLNDKEGYVPRNLLGLYPRIKPRQRSLA

SEQ ID NO: 49559 - protein, 287 aa, Homo sapiens
MKPDPNLIWIIIMMVLTQLGAFYIVKDLDWKWVIFGAYAFGSCINHSMTLAIHEIAHNAAFGNCKAMWNRWFGMFANLPIGIPYSISFKRYHMDHHRYLGADGVDVDIPTDFEGWFFCTAFRKFIWVILQPLFYAFRPLFINPKPITYLEVINTVAQVTFDILIYYFLGIKSLVYMLAASLLGLGLHPISGHFIAEHYMFLKGHETYSYYGPLNLLTFNVGYHNEHHDFPNIPGKSLPLVRKIAAEYYDNLPHYNSWIKVLYDFVMDDTISPYSRMKRHQKGEMVLE

SEQ ID NO: 49560 - protein, 455 aa, Homo sapiens
MKFTATMSTPDKKASQKIGFRLRNLLKLPKAHKWCIYEWFYSNIDKPLFEGDNDFCVCLKESFPNLKTRKLTRVEWGKIRRLMGKPRRCSSAFFEEERSALKQKRQKIRLLQQRKVADVSQFKDLPDEIPLPLVIGTKVTARLRGVHDGLFTGQIDAVDTLNATYRVTFDRTGLGTHTIPDYEVLSNEPHETMPIAAFGQKQRPSRFFMTPPRLHYTPPLQSPIIDNDPLLGQSPWRSKISGSDTETLGGFPVEFLIQVTRLSKILMIKKEHIKKLREMNTEAEKLKSYSMPISIEFQRRYATIVLELEQLNKDLNKVLHKVQQYCYELAPDQGLQPADQPTDMRRRCEEEAQEIVRHANSSTGQPCVENENLTDLISRLTAILLQIKCLAEGGDLNSFEFKSLTDSLNDIKSTIDASNISCFQNNVEIHVAHIQSGLSQMGNLHAFAANNTNRD

SEQ ID NO: 49561 - protein, 865 aa, Homo sapiens
MVFKAEGVHTSARLVVTELPVSFSRPLQDVVTTEKEKVTLECELSRPNVDVRWLKDGVELRAGKTMAIAAQGACRSLTIYRCEFADQGVYVCDAHDAQSSASVKVQGRTYTLIYRRVLAEDAGEIQFVAENAESRAQLRVKELPVTLVRPLRDKIAMEKHRGVLECQVSRASAQVRWFKGSQELQPGPKYELVSDGLYRKLIISDVHAEDEDTYTCDAGDVKTSAQFFVEEQSITIVRGLQDVTVMEPAPAWFECETSIPSVRPPKWLLGKTVLQAGGNVGLEQEGTVHRLMLRRTCSTMTGPVHFTVGKSRSSARLVVSDIPVVLTRPLEPKTGRELQSVVLSCDFRPAPKAVQWYKDDTPLSPSEKFKMSLEGQMAELRILRLMPADAGVYRCQAGSAHSSTEVTVEAREVTVTGPLQDAEATEEGWASFSCELSHEDEEVEWSLNGMPLYNDSFHEISHKGRRHTLVLKSIQRADAGIVRASSLKVSTSARLEVRVKPVVFLKALDDLSAEERGTLALQCEVSDPEAHVVWRKDGVQLGPSDKYDFLHTAGTRGLVVHDVSPEDAGLYTCHVGSEETRARVRVHDLHVGITKRLKTMEVLEGESCSFECVLSHESASDPAMWTVGGKTVGSSSRFQATRQGRKYILVVREAAPSDAGEVVFSVRGLTSKASLIVRERPAAIIKPLEDQWVAPGEDVELRCELSRAGTPVHWLKDRKAIRKSQKYDVVCEGTMAMLVIRGASLKDAGEYTCEVEASKSTASLHVEEKANCFTEELTNLQVEEKGTAVFTCKTEHPAATVTWRKGLLELRASGKHQPSQEGLTLRLTISALEKADSDTYTCDIGQAQSRAQLLVQGEAAKCARA

SEQ ID NO: 49562 - protein, 497 aa, Homo sapiens
MPLLYPLFVYLHLNLVQNSPKSTVESFYSRFHGMFLQNASQKDVIEQLQTTQTIQDILSNFKLRAFLDNKYVVRLQEDSYNYLIRYLQSDNNTALCKVLTLHIHLDVQPAKRTDYQLYASGSSSRSENNGLEPPDMPSPILQNEAALEVLQESIKRVKDGPPSLTTICFYAFYNTEQLLNTAEISPDSKLLAAGFDNSCIKLWSLRSKKLKSEPHQVDVSRIHLACDILEEEDDEDDNAGTEMKILRGHCGPVYSTRFLADSSGLLSCSEDMSIRYWDLGSFTNTVLYQGHAYPVWDLDISPYSLYFASGSHDRTARLWSFDRTYPLRIYAGHLADVDCVKFHPNSNYLATGSTDKTVRLWSAQQGNSVRLFTGHRGPVLSLAFSPNGKYLASAGEDQRLKLWDLASGTLYKELRGHTDNITSLTFSPDSGLIASASMDNSVRVWDIRNTYCSAPADGSSSELVGVYTGQMSNVLSVQFMACNLLLVTGITQENQEH

SEQ ID NO: 49563 - protein, 366 aa, Homo sapiens
MHSELWGVVHGATVLSPTAVFGTLASLYLGALDHTADRLQAILGVPWKDKNCTSRLDAHKVLSALQAVQGLLVAQGRADSQAQLLLSTVVGVFTAPGLHLKQPFVQGLALYTPVVLPRSLDFTELDVAAEKIDRFMQAVTGWKTGCSLMGASVDSTLAFNTYVHFQGKMKGFSLLAEPQEFWVDNSTSVSVPMLSGMGTFQHWSDIQDNFSVTQVPFTESACLLLIQPHYASDLDKVEGLTFQQNSLNWMKKLSPRTIHLTMPQLVLQGSYDLQDLLAQAELPAILHTELNLQKLSNDRIRVGEVLNSIFFELEADEREPTESTQQLNKPEVLEVTLNRPFLFAVYDQSATALHFLGRVANPLSTA

SEQ ID NO: 49564 - protein, 129 aa, Homo sapiens
MFAIAALEQTAYFIGIFTFLWVERPMTAKKKPNFILLLKALLLSSYGKLLLIPAVIWEHDYTSVCLKLIKVFVLTSNFQAIRVTLNINRKLSFLAVLSGLLLESIMVYFFQSMEWDVGSDYAIFKSQDF

SEQ ID NO: 49565 - protein, 283 aa, Homo sapiens [sequence omitted]

SEQ ID NO: 49566 - protein, 282 aa, Homo sapiens
MSQEQGPGSSTPPSSPTLLDALLQNLYDFGGTEGETEQKKIIKKRENKKRDVMASAALAAEPSPLPGSLIRGQRKSASSFFKELREERHCAPSGTPTGPEILAAAVPPSSLKNNREQVEVVEFHSNKKRKLTPDHNKNTKANPSVLERDVDTQEFNLEKARLEVHRFGITGYGKGKERILEQERAIMLGAKPPKKSYVNYKVLQEQIKEKKAAKEEEKRLAQETDIFKKKKRKGQEDRKSKKKSAPSILSNGRIGQVGKFKNGTLILSPVDIKKINSSRVAK

SEQ ID NO: 49567 - protein, 262 aa, Homo sapiens
MKPRADVAFHFNPRFKRAGCIVCNTLINEKWGREEITYDTPFKREKSFEIVIMVLKDKFQVAVNGKHTLLYGHRIGPEKIDTLGIYGKVNIHSIGFSFSSDLQSTQASSLELTEISRENVPKSGTPQLRLPFAARLNTPMGPGRTVVVKGEVNANAKSFNVDLLAGKSKDIALHLNPRLNIKAFVRNSFLQESWGEEERNITSFPFSPGMYFEMIIYCDVREFKVAVNGVHSLEYKHRFKELSSIDTLEINGDIHLLEVRSW

SEQ ID NO: 49568 - protein, 245 aa, Homo sapiens
MKPRADVAFHFNPRFKRAGCIVCNTLINEKWGREEITYDTPFKREKSFEIVIMVLKDKFQVPKSGTPQLPSNRGGDISKIAPRTVYTKSKDSTVNHTLTCTKIPPMNYVSKRLPFAARLNTPMGPGRTVVVKGEVNANAKSFNVDLLAGKSKDIALHLNPRLNIKAFVRNSFLQESWGEEERNITSFPFSPGMYFEMIIYCDVREFKVAVNGVHSLEYKHRFKELSSIDTLEINGDIHLLEVRSW

SEQ ID NO: 49569 - protein, 304 aa, Homo sapiens
MKPRADVAFHFNPRFKRAGCIVCNTLINEKWGREEITYDTPFKREKSFEIVIMVLKDKFQVAVNGKHTLLYGHRIGPEKIDTLGIYGKVNIHSIGFSFSSDLQSTQASSLELTEISRENVPKSGTPQLPSNRGGDISKIAPRTVYTKSKDSTVNHTLTCTKIPPMNYVSKRLPFAARLNTPMGPGRTVVVKGEVNANAKSFNVDLLAGKSKDIALHLNPRLNIKAFVRNSFLQESWGEEERNITSFPFSPGMYFEMIIYCDVREFKVAVNGVHSLEYKHRFKELSSIDTLEINGDIHLLEVRSW

SEQ ID NO: 49570 - protein, 1956 aa, Homo sapiens
MDFICSLVTKSVKVFAEYPGSSAQLRVLLAFYASTIVSALVAAEDVSDNIIAKLFPYIQKGLKSSLPDYRAATYMIICQISVKVTMENTFVNSLASQIIKTLTKIPSLIKDGLSCLIVLLQRQKPESLGKKPFPHLCNVPDLITILHGISETYDVSPLLHYMLPHLVVSIIHHVTGEETEGMDGQIYKRHLEAILTKISLKNNLDHLLASLLFEEYISYSSQEEMDSNKVSLLNEQFLPLIRLLESKYPRTLDVVLEEHLKEIADLKKQELFHQFVSLSTSGGKYQFLADSDTSLMLSLNHPLAPVRILAMNHLKKIMKTSKEGVDESFIKEAVLARLGDDNIDVVLSAISAFEIFKEHFSSEVTISNLLNLFQRAELSKNGEWYEVLKIAADILIKEEILSENDQLSNQVVVCLLPFMVINNDDTESAEMKIAIYLSKSGICSLHPLLRGWEEALENVIKSTKPGKLIGVANQKMIELLADNINLGDPSSMLKMVEDLISVGEEESFNLKQKVTFHVILSVLVSCCSSLKETHFPFAIRVFSLLQKKIKKLESVITAVEIPSEWHIELMLDRGIPVELWAHYVEELNSTQRVAVEDSVFLVFSLKKFIYALKAPKSFPKGDIWWNPEQLKEDSRDYLHLLIGLFEMMLNGADAVHFRVLMKLFIKVHLEDVFQLFKFCSVLWTYGSSLSNPLNCSVKTVLQTQALYVGCAMLSSQKTQCKHQLASISSPVVTSLLINLGSPVKEVRRAAIQCLQALSGVASPFYLIIDHLISKAEEITSDAAYVIQDLATLFEELQREKKLKSHQKLSETLKNLLSCVYSCPSYIAKDLMKVLQGVNGEMVLSQLLPMAEQLLEKIQKEPTAVLKDEAMVLHLTLGKYNEFSVSLLNEDPKSLDIFIKAVHTTKELYAGMPTIQITALEKITKPFFAAISDEKVQQKLLRMLFDLLVNCKNSHCAQTVSSVFKGISVNAEQVRIELEPPDKAKPLGTVQQKRRQKMQQKKSQDLESVQEVGGSYWQRVTLILELLQHKKKLRSPQILVPTLFNLLSRCLEPLPQEQGNMEYTKQLILSCLLNICQKLSPDGGKIPKDILDEEKFNVELIVQCIRLSEMPQTHHHALLLLGTVAGIFPDKVLHNIMSIFTFMGANVMRLDDTYSFQVINKTVKMVIPALIQSDSGDSIEVSRNVEEIVVKIISVFVDALPHVPEHRRLPILVQLVDTLGAEKFLWILLILLFEQYVTKTVLAAAYGEKDAILEADTEFWFSVCCEFSVQHQIQSLMNILQYLLKLPEEKEETIPKAVSFNKSESQEEMLQVFNVETHTSKQLRHFKFLSVSFMSQLLSSNNFLKKVVESGGPEILKGLEERLLETVLGYISAVAQSMERNADKLTVKFWRALLSKAYDLLDKVNALLPTETFIPVIRGLVGNPLPSVRRKALDLLNNKLQQNISWKKTIVTRFLKLVPDLLAIVQRKKKEGEEEQAINRQTALYTLKLLCKNFGAENPDPFVPVLNTAVKLIAPERKEEKNVLGSALLCIAEVTSTLEALAIPQLPSLMPSLLTTMKNTSELVSSEVYLLSALAALQKVVETLPHFISPYLEGILSQVIHLEKITSEMGSASQANIRLTSLKKTLATTLAPRVLLPAIKKTYKQIEKNWKNHMGPFMSILQEHIGVMKKEELTSHQSQLTAFFLEALDFRAQHSENDLEEVGKTENCIIDCLVAMVVKLSEVTFRPLFFKLFDWAKTEDAPKDRLLTFYNLADCIAEKLKGLFTLFAGHLVKPFADTLNQVNISKTDEAFFDSENDPEKCCLLLQFILNCLYKIFLFDTQHFISKERAEALMMPLVDQLENRLGGEEKFQERVTKHLIPCIAQFSVAMADDSLWKPLNYQILLKTRDSSPKVRFAALITVLALAEKLKENYIVLLPESIPFLAELMEDECEEVEHQCQKTIQQLETVLGEPLQSYF

SEQ ID NO: 49571 - protein, 72 aa, Homo sapiens
MTSLQLSEKLKLTYEEKCEIEESQLKFLRNKNHGRARWLTPVIPALWEAEAGESRGQEIETILANMVKPRFY

SEQ ID NO: 49572 - protein, 32 aa, Homo sapiens
MESFAFLWAGGRASYGVSKGKVCFEMKVNAIL

SEQ ID NO: 49573 - protein, 80 aa, Homo sapiens
MGKPQVSEQDSLNNNESCTLSCEVAAGENLQNTLCEASRDEQAFLGKDKKIPGKRSPRSKKGTAKKIPPDSRILFPGGGL

SEQ ID NO: 49574 - protein, 224 aa, Homo sapiens
MIMHSGNPAYKCTICGKAFYFLNSVERHQRTHTGEKPYKCKQCGKAFTVSGSCLIHERTHTGEKPYECKECGKTFRFSCSFKTHERTHTGERPYKCTKCDKAFSCSTSLRYHGSIHTGERPYECKQCGKAFSRLSSLCNHRSTHTGEKPYECKQCDQAFSRLSSLHLHERIHTGEKPYECKKCGKAYTRSSHLTRHERSHDIEAGCSDSAYNPSTLGGQGVWIA

SEQ ID NO: 49575 - protein, 507 aa, Homo sapiens
MSRVHGMHPKETTRQLSLAVKDGLIVETLTVGCKGSKAGIEQEGYWLPGDEISIKKKNTNKQEMGTYLRFIVSRMKERAIDLNKKGKDNKHPMYRRLVHSAVDVPTIQEKVNEGKYRSYEEFKADAQLLLHNTVIFYGDSEQADIARMLYKDTCHELDELQLCKNCFYLSNARPDNWFCYPCIPNHELVWAKMKGFGFWPAKVMQKEDNQVDVRFFGHHHQRAWIPSENIQDITVNIHRLHVKRSMGWKKACDELELHQRFLREGRFWKSKNEDRGEEEAESSISSTSNEQLKVTQEPRAKKGRRNQSVEPKKEEPEPETEAVSSSQEIPTMPQPIEKVSVSTQTKKLSASSPRMLHRSTQTTNDGVCQSMCHDKYTKIFNDFKDRMKSDHKRETERVVREALEKLRSEMEEEKRQAVNKAVANMQGEMDRKCKQVKEKCKEEFVEEIKKLATQHKQLISQTKKKQWCYNCEEEAMYHCCWNTSYCSIKCQQEHWHAEHKRTCRRKR

SEQ ID NO: 49576 - protein, 615 aa, Homo sapiens
MNALALGPSEYDSLPENSETGGNESQPDSQEDPREVLKKTLEFCLSRENLASDMYLISQMDSDQYVPITTVANLDHIKKLSTDVDLIVEVLRSLPLVQVDEKGEKVRPNQNRCIVILREISESTPVEEVEALFKGDNLPKFINCEFAYNDNWFITFETEADAQQAYKYLREEVKTFQGKPIKARIKAKAIAINTFLPKNGFRPLDVSLYAQQRYATSFYFPPMYSPQQQFPLYSLITPQTWSATHSYLDPPLVTPFPNTGFINGFTSPAFKPAASPLTSLRQYPPRSRNPSKSHLRHAIPSAERGPGLLESPSIFNFTADRLINGVRSPQTRQAGQTRTRIQNPSAYAKREAGPGRVEPGSLESSPGLGRGRKNSFGYRKKREEKFTSSQTQSPTPPKPPSPSFELGLSSFPPLPGAAGNLKTEDLFENRLSSLIIGPSKERTLSADASVNTLPVVVSREPSVPASCAVSATYERSPSPAHLPDDPKVAEKQRETHSVDRLPSALTATACKSVQVNGAATELRKPSYAEICQRTSKEPPSSPLQPQKEQKPNTVGCGKEEKKLAEPAERYREPPALKSTPGAPRDQRRPAGGRPSPSAMGKRLSREQSTPPKSPQ

SEQ ID NO: 49577 - protein, 912 aa, Homo sapiens
MLNRSLSTFMNAFTASDYTLYPFSTQNPKDFQNLLSVYLDATFFPCLRELDFWQEGWRLEHENPSDPQTPLVFKGVVFNEMKGAFTDNERIFSQHLQNRLLPDHTYSVVSGGDPLCIPELTWEQLKQFHATHYHPSNARFFTYGNFPLEQHLKQIHEEALSKFQKIEPSTVVPAQTPWDKPREFQITCGPDSFATDPSKQTTISVSFLLPDITDTFEAFTLSLLSSLLTSGPNSPFYKALIESGLGTDFSPDVGYNGYTREAYFSVGLQGIAEKDIETVRSLIDRTIDEVVEKGFEDDRIEALLHKIEIQMKHQSTSFGLMLTSYIASCWNHDGDPVELLKLGNQLAKFRQCLQENPKFLQEKVKQYFKNNQHKLTLSMRPDDKYHEKQAQVEATKLKQKVEALSPGDRQQIYEKGLELRSQQSKPQDASCLPALKVSDIEPTIPVTELDVVLTAGDIPVQYCAQPTNGMVYFRAFSSLNTLPEELRPYVPLFCSVLTKLGCGLLDYREQAQQIELKTGGMSASPHVLPDDSHMDTYEQGVLFSSLCLDRNLPDMMQLWSEIFNNPCFEEEEHFKVLVKMTAQELANGIPDSGHLYASIRAGRTLTPAGDLQETFSGMDQVRLMKRIAEMTDIKPILRKLPRIKKHLLNGDNMRCSVNATPQQMPQTEKAVEDFLRSIGRSKKERRPVRPHTVEKPVPSSSGGDAHVPHGSQVIRKLVMEPTFKPWQMKTHFLMPFPVNYVGECIRTVPYTDPDHASLKILARLMTAKFLHTEIREKGGAYGGGAKLSHNGIFTLYSYRDPNTIETLQSFGKAVDWAKSGKFTQQDIDEAKLSVFSTVDAPVAPSDKGMDHFLYGLSDEMKQAHREQLFAVSHDKLLAVSDRYLGTGKSTHGLAILGPENPKIAKDPSWIIQ

SEQ ID NO: 49578 - protein, 59 aa, Homo sapiens
MKGAFTDNERIFSQHLQNRLLPDHTYSVVSGGDPLCIPELTWEQLKQFHATHYHPSNAR

SEQ ID NO: 49579 - protein, 192 aa, Homo sapiens
MSCSELSFCLSHPRVQDLPLDESNMVIPSDTDFLDTWEAMEDLVITGLVKNIGVSNFNHEQLERLLNKPGLRFKPLTNQIECHPYLTQKNLISFCQSRDVSVTAYRPLGGSCEGVDLIDNPVIKRIAKEHGKSPAQILIRFQIQRNVIVIPGSITPSHIKENIQVFDFELTQHDMDNILSLNRNLRLAMFPM

SEQ ID NO: 49580 - protein, 505 aa, Homo sapiens [sequence omitted]

SEQ ID NO: 49581 - protein, 288 aa, Homo sapiens
MCLRRGPWAQLPARFCSRDPAGAGRRESEPRPTSARQLDGIRNIVLSNPKKRNALSLAMLKSLQSDILHDADSNDLKVIIISAEGPVFSSGHDLKELTEEQGRDYHAEVFQTCSKVMMHIRNHPVPVIAMVNGLAAAAGCQLVASCDIAVASDKSSFATPGVNVGLFCSTPGVALARAVPRKVALEMLFTGEPISAQEALLHGLLSKVVPEAELQEETMRIARKIASLSRPVVSLGKATFYKQLPQDLGTAYYLTSQAMVDNLALRDGQEGITAFLQKRKPVWSHEPV

SEQ ID NO: 49582 - protein, 2149 aa, Homo sapiens
MQVSSTGNELAIRFKTDLSINGRGFNASWQAVTGGCGGIFQAPSGEIHSPNYPSPYRSNTDCSWVIRVDRNHRVLLNFTDFDLEPQDSCIMAYDGLSSTMSRLARTCGREQLANPIVSSGNSLFLRFQSGPSRQNRGFRAQFRQACGGHILTSSFDTVSSPRFPANYPNNQNCSWIIQAQPPLNHITLSFTHFELERSTTCARDFVEILDGGHEDAPLRGRYCGTDMPHPITSFSSALTLRFVSDSSISAGGFHTTVTASVSACGGTFYMAEGIFNSPGYPDIYPPNVECVWNIVSSPGNRLQLSFISFQLEDSQDCSRDFVEIREGNATGHLVGRYCGNSFPLNYSSIVGHTLWVRFISDGSGSGTGFQATFMKIFGNDNIVGTHGKVASPFWPENYPHNSNYQWTVNVNASHVVHGRILEMDIEEIQNCYYDKLRIYDGPSIHARLIGAYCGTQTESFSSTGNSLTFHFYSDSSISGKGFLLEWFAVDAPDGVLPTIAPGACGGFLRTGDAPVFLFSPGWPDSYSNRVDCTWLIQAPDSTVELNILSLDIESHRTCAYDSLVIRDGDNNLAQQLAVLCGREIPGPIRSTGEYMFIRFTSDSSVTRAGFNASFHKSCGGYLHADRGIITSPKYPETYPSNLNCSWHVLVQSGLTIAVHFEQPFQIPNGDSSCNQGDYLVLRNGPDICSPPLGPPGGNGHFCGSHASSTLFTSDNQMFVQFISDHSNEGQGFKIKYEAKSLACGGNVYIHDADSAGYVTSPNHPHNYPPHADCIWILAAPPETRIQLQFEDRFDIEVTPNCTSNYLELRDGVDSDAPILSKFCGTSLPSSQWSSGEVMYLRFRSDNSPTHVGFKAKYSIAQCGGRVPGQSGVVESIGHPTLPYRDNLFCEWHLQGLSGHYLTISFEDFNLQNSSGCEKDFVEIWDNHTSGNILGRYCGNTIPDSIDTSSNTAVVRFVTDGSVTASGFRLRFESSMEECGGDLQGSIGTFTSPNYPNPNPHGRICEWRITAPEGRRITLMFNNLRLATHPSCNNEHVIVFNGIRSNSPQLEKLCSSVNVSNEIKSSGNTMKVIFFTDGSRPYGGFTASYTSSEDAVCGGSLPNTPEGNFTSPGYDGVRNYSRNLNCEWTLSNPNQGNSSISIHFEDFYLESHQDCQFDVLEFRVGDADGPLMWRLCGPSKPTLPLVIPYSQVWIHFVTNERVEHIGFHAKYSFTDCGGIQIGDSGVITSPNYPNAYDSLTHCSSLLEAPQGHTITLTFSDFDIEPHTTCAWDSVTVRNGGSPESPIIGQYCGNSNPRTIQSGSNQLVVTFNSDHSLQGGGFYATWNTQTLGCGGIFHSDNGTIRSPHWPQNFPENSRCSWTAITHKSKHLEISFDNNFLIPSGDGQCQNSFVKVWAGTEEVDKALLATGCGNVAPGPVITPSNTFTAVFQSQEAPAQGFSASFVSRCGSNFTGPSGYIISPNYPKQYDNNMNCTYVIEANPLSVVLLTFVSFHLEARSAVTGSCVNDGVHIIRGYSVMSTPFATVCGDEMPAPLTIAGPVLLNFYSNEQITDFGFKFSYRIISCGGVFNFSSGIITSPAYSYADYPNDMHCLYTITVSDDKVIELKFSDFDVVPSTSCSHDYLAIYDGANTSDPLLGKFCGSKRPPNVKSSNNSMLLVFKTDSFQTAKGWKMSFRQTLGPQQGCGGYLTGSNNTFASPDSDSNGMYDKNLNCVWIIIAPVNKVIHLTFNTFALEAASTRQRCLYDYVKLYDGDSENANLAGTFCGSTVPAPFISSGNFLTVQFISDLTLEREGFNATYTIMDMPCGGTYNATWTPQNISSPNSSDPDVPFSICTWVIDSPPHQQVKITVWALQLTSQDCTQNYLQLQDSPQGHGNSRFQFCGRNASAVPVFYSSMSTAMVIFKSGVVNRNSRMSFTYQIADCNRDYHKAFGNLRSPGWPDNYDNDKDCTVTLTAPQNHTISLFFHSLGIENSVECRNDFLEVRNGSNSNSPLLGKYCGTLLPNPVFSQNNELYLRFKSDSVTSDRGYEIIWTSSPSGCGGTLYGDRGSFTSPGYPGTYPNNTYCEWVLVAPAGRLVTINFYFISIDDPGDCVQNYLTLYDGPNASSPSSGPYCGGDTSIAPFVASSNQVFIKFHADYARRPSAFRLTWDS

SEQ ID NO: 49583 - protein, 914 aa, Homo sapiens
MTCNKHGCRQAFHVTCAQFAGLLCEEEGNGADNVQYCGYCKYHFSKLKKSKRGSNRSYDQSLSDSSSHSQDKHHEKEKKKYKEKDKHKQKHKKQPEPSPALVPSLTVTTEKTYTSTSNNSISGSLKRLEDTTARFTNANFQEVSAHTSSGKDVSETRGSEGKGKKSSAHSSGQRGRKPGGGRNPGTTVSAASPFPQGSFSGTPGSVKSSSGSSVQSPQDFLSFTDSDLRNDSYSHSQQSSATKDVHKGESGSQEGGVNSFSTLIGLPSTSAVTSQPKSFENSPGDLGNSSLPTAGYKRAQTSGIEEETVKEKKRKGNKQSKHGPGRPKGNKNQENVSHLSVSSASPTSSVASAAGSITSSSLQKSPTLLRNGSLQSLSVGSSPVGSEISMQYRHDGACPTTTFSELLNAIHNGIYNSNDVAVSFPNVVSGSGSSTPVSSSHLPQQSSGHLQQVGALSPSAVSSAAPAVATTQANTLSGSSLSQAPSHMYGNRSNSSMAALIAQSENNQTDQDLGDNSRNLVGRGSSPRGSLSPRSPVSSLQIRYDQPGNSSLENLPPVAASIEQLLERQWSEGQQFLLEQGTPSDILGMLKSLHQLQVENRRLEEQIKNLTAKKERLQLLNAQLSVPFPTITANPSPSHQIHTFSAQTAPTTDSLNSSKSPHIGNSFLPDNSLPVLNQDLTSSGQSTSSSSALSTPPPAGQSPAQQGSGVSGVQQVNGVTVGALASGMQPVTSTIPAVSAVGGIIGALPGNQLAINGIVGALNGVMQTPVTMSQNPTPLTHTTVPPNATHPMPATLTNSASGLGLLSDQQRQILIHQQQFQQLLNSQQLTPEQHQAFLYQLMQHHHQQHHQPELQQLQIPGPTQIPINNLLAGTQAPPLHTATTNPFLTIHGDNASQKVARLSDKTGPVAQEKS

SEQ ID NO: 49584 - protein, 1264 aa, Homo sapiens
MDRKREAFLEHLKQKYPHHASAIMGHQERLRDQTRSPKLSHSPQPPSLGDPVEHLSETSADSLEAMSEGDAPTPFSRGSRTRASLPVVRSTNQTKERSLGVLYLQYGDETKQLRMPNEITSADTIRALFVSAFPQQLTMKMLESPSVAIYIKDESRNVYYELNDVRNIQDRSLLKVYNKDPAHAFNHTPKTMNGDMRMQRELVYARGDGPGAPRPGSTAHPPHAIPNSPPSTPVPHSMPPSPSRIPYGGTRSMVVPGNATIPRDRISSLPVSRPISPSPSAILERRDVKPDEDMSGKNIAMYRNEGFYADPYLYHEGRMSIASSHGGHPLDVPDHIIAYHRTAIRSASAYCNPSMQAEMHMEQSLYRQKSRKYPDSHLPTLGSKTPPASPHRVSDLRMIDMHAHYNAHGPPHTMQPDRASPSRQAFKKEPGTLVYIEKPRSAAGLSSLVDLGPPLMEKQVFAYSTATIPKDRETSEKMMKTTANRNHTDSAGTPHVSGGKMLSALESTVPPSQPPPVGTSAIHMSLLEMRRSVAELRLQLQQMRQLQLQNQELLRAMMKKAELEISGKVMETMKRLEDPVQRQRVLVEQERQKYLHEEEKIVKKLCELEDFVEDLKKDSTAASRLVTLKDVEDGAFLLRQVGEAVATLKGEFPTLQNKMRAILRIEVEAVRFLKEEPHKLDSLLKRVRSMTDVLTMLRRHVTDGLLKGTDAAQAAQYMAMEKATAAEVLKSQEEAAHTSGQPFHSTGAPGDAKSEVVPLSGMMVRHAQSSPVVIQPSQHSVALLNPAQNLPHVASSPAVPQEATSTLQMSQAPQSPQIPMNGSAMQSLFIEEIHSVSAKNRAVSIEKAEKKWEEKRQNLDHYNGKEFEKLLEEAQANIMKSIPNLEMPPATGPLPRGDAPVDKVELSEDSPNSEQDLEKLGGKSPPPPPPPPRRSYLPGSGLTTTRSGDVVYTGRKENITAKASSEDAGPSPQTRATKYPAEEPASAWTPSPPPVTTSSSKDEEEEEEEGDKIMAELQAFQKCSFMDVNSNSHAEPSRADSHVKDTRSGATVPPKEKKGSSGAPQTSRMPVPMSAKNRPGTLDKPGKQSKLQDPRQYRQANGSAKKSGGDFKPTSPSLPASKIPALSPSSGKSSSLPSSSGDSSNLPNPPATKPSIASNPLSPQTGPPAHSASLIPSVSNGSLKFQSLTHTGKGHHLSFSPQSQNGRAPPPLSFSSSPPSPASSVSLNQGAKGTRTIHTPSLTSYKAQNGSSSKATPSTAKETS

SEQ ID NO: 49585 - protein, 53 aa, Homo sapiens [sequence omitted]

SEQ ID NO: 49586 - protein, 456 aa, Homo sapiens [sequence omitted]

SEQ ID NO: 49587 - protein, 1196 aa, Homo sapiens
MKKPVWEEELRMSGPAKWQNVSLESWNQPRKLGRQMSDGDGERLFQDLYPFIQGEHVLNSQNKGKSRSLPRVLSPESLSCTEIPIPLNERHSPKMPPYPPTCAPNLDSTRNSEKSGCSAPFPRPKFGRPLKPPSYSSHQQSRGGADSSDSQDSQQMDAYVPRHELCLSDPGLEPPVYVPPPSYRSPPQNIPNPYLEDTVPINVCGGHSQQQSPTEKAGASGQPPSGPPGTGNEYGVSPRLPQGLPAHPRPVTAYDGFVQYIPFDDPRLRHFKLAQPQGFCEDIKLDDKSYNSSPVTAQEPAHGGMQPDGAIWNPQSLIPPSGDERGLVLADSSPRWLWGQPPGDGENSGLPNQRDRCVARGQWPDVRGSQHGHTGRQVSSPYSQGESTCETQTKLKKFQTGTRTKKSSKKKMNETIFCLVSIPVKSESHLPDRDMDNNDLKPSADQKNGSDKSPALQEQSLLSMSSTDLELQALTGSMGGRTEFQKQDLGEPEEDRQTNDLSFIHLTKHRELKHSGSWPGHRYRDQQTQTSFSEEPQSSQLLPGAKLGGPSRAALSPKCSDPAASEAQTHTAFPTGDHKQRPSARNLKGHRSLSPSSNSAFSRTSLSVDQAPTPKAGRSQPCVDVHGLGAHPGPKREVVKGEPTGPCNSKQLFGQFLLKPVSRRPWDLISQLESFNKELQEEEESSSSSSSSSSSSEESEAEPQQENRAHCRQEDVGFRGNSPEMRVEPQPRMWVPESPVCRSGRGESKSESWSEELQPGHPRAWPPSPGRFRVEEGGGAPFCSADGSTSAEKRHLEVSNGMDELAGSPFPVTRMSSRSSDAKPLPASYPAEPREPQESPKITSAFSSVKPSEAVPRKFDSGGERGAGLPLSLSNKNRGLSAPDLRSVGLTPGQEQGASELEGSLGEASTIEIPPGESLQARAARILGIEVAVESLLPGIRRAGQNQPAEPDASACTPESPQEELLSRPAPADVPRVSTDAFYGRRKCGWTKSPLFVGDRDSARRAPQAFEHSDVDGVVTSTDPVPEPEPSPLESKFFEQKDVETKPPFRSTLFHFVERTPSVAGSEKRLRSPSKVIESLQEKLASPPRRADPDRLMRMKEVSSVSRMRVLSFRNADSQEDAEELKATTRGQAGLPGGLVSPGSGDRAQRLGHSLSVSKDSISREEKEHPAAQKEKSMDQDFWCPDSYDPSRVERV

SEQ ID NO: 49588 - protein, 23 aa, Homo sapiens
MHTKQLKMTQLIYHAPDTALSTL

SEQ ID NO: 49589 - protein, 906 aa, Homo sapiens
MTSHKSGRDQRHVTQSGCNRKFKCTECGKAFKYKHHLKEHLRIHSGEKPYECPNCKKRFSHSGSYSSHISSKKCISLIPVNGRPRTGLKTSQCSSPSLSASPGSPTRPQIRQKIENKPLQEQLSVNQIKTEPVDYEFKPIVVASGINCSTPLQNGVFTGGGPLQATSSPQGMVQAVVLPTVGLVSPISINLSDIQNVLKVAVDGNVIRQVLENNQANLASKEQETINASPIQQGGHSVISAISLPLVDQDGTTKIIINYSLEQPSQLQVVPQNLKKENPVATNSCKSEKLPEDLTVKSEKDKSFEGGVNDSTCLLCDDCPGDINALPELKHYDLKQPTQPPPLPAAEAEKPESSVSSATGDGNLSPSQPPLKNLLSLLKAYYALNAQPSAEELSKIADSVNLPLDVVKKWFEKMQAGQISVQSSEPSSPEPGKVNIPAKNNDQPQSANANEPQDSTVNLQSPLKMTNSPVLPVGSTTNGSRSSTPSPSPLNLSSSRNTQGYLYTAEGAQEEPQVEPLDLSLPKQQGELLERSTITSVYQNSVYSVQEEPLNLSCAKKEPQKDSCVTDSEPVVNVIPPSANPINIAIPTVTAQLPTIVAIADQNSVPCLRALAANKQTILIPQVAYTYSTTVSPAVQEPPLKVIQPNGNQDERQDTSSEGVSNVEDQNDSDSTPPKKKMRKTENGMYACDLCDKIFQKSSSLLRHKYEHTGKRPHECGICKKAFKHKHHLIEHMRLHSGEKPYQCDKCGKRFSHSGSYSQHMNHRYSYCKREAEERDSTEQEEAGPEILSNEHVGARASPSQGDSDERESLTREEDEDSEKEEEEEDKEMEELQEEKECEKPQGDEEEEEEEEEVEEEEVEEAENEGEEAKTEGLMKDDRAESQASSLGQKVGESSEQVSEEKTNEA

SEQ ID NO: 49590 - protein, 771 aa, Homo sapiens
MLENYSNLVSVGYCVHKPEVIFRLQQGEEPWKQEEEFPSQSFPEVWTADHLKERSQENQSKHLWEVVFINNEMLTKEQGDVIGIPFNVDVSSFPSRKMFCQCDSCGMSFNTVSELVISKINYLGKKSDEFNACGKLLLNIKHDETHTQEKNEVLKNRNTLSHHEETLQHEKIQTLEHNFEYSICQETLLEKAVFNTQKRENAEENNCDYNEFGRTLCDSSSLLFHQISPSRDNHYEFSDCEKFLCVKSTLSKPHGVSMKHYDCGESGNNFRRKLCLSHLQKGDKGEKHFECNECGKAFWEKSHLTRHQRVHTGQKPFQCNECEKAFWDKSNLTKHQRSHTGEKPFECNECGKAFSHKSALTLHQRTHTGEKPYQCNACGKTFCQKSDLTKHQRTHTGLKPYECYECGKSFRVTSHLKVHQRTHTGEKPFECLECGKSFSEKSNLTQHQRIHIGDKSYECNACGKTFYHKSLLTRHQIIHTGWKPYECYECGKTFCLKSDLTVHQRTHTGQKPFACPECGKFFSHKSTLSQHYRTHTGEKPYECHECGKIFYNKSYLTKHNRTHTGEKPYECNECGKAFYQKSQLTQHQRIHIGEKPYKCNECGKAFCHKSALIVHQRTHTQEKPYKCNECGKSFCVKSGLIFHERKHTGEKPYECNECGKFFRHKSSLTVHHRAHTGEKSCQCNECGKIFYRKSELAQHQRSHTGEKPYECNTCRKTFSQKSNLIVHQRRHIGENLMNEMDIRNFQPQVSLHNASEYSHCGESPDDILNVQ

SEQ ID NO: 49591 - protein, 1052 aa, Homo sapiens
MEQEDVGLGELSSEEGSVGSDRGSIVDTEEEKEEEESDEDFAHHSDNEQNQHTTQMSDEEEDDDGCDLFADSEKEEEDIEDIEENTRPKRSRPTSFADELAARIKGDAMGRVDEEPTNEEDNLFAPPKLTDEDFSPFGSGGGLFSGGKGLFDDEDEESDLFTEASQDRQAGASVKEESSSSKPGKKIPAGAVSVFLGDTDVFGAASVPSLKEPQKPEQPTPRKSPYGPPPTGLFDDDDGDDDDDFFSAPHSKPSKTRKVQSTADIFGDEEGDLFKEKAVASPEATVSQTDENKARAEKKVTLSYSKNLKPSSETKTQKGLFSDEEDSEDLFSSQSASNLKGASLLPGKLPTSVSLFDDEDEEDNLFGGTAAKKQTLSLQAQREEKAKASELSKKKASALLFSSDEEDQWNIPASQTHLASDSRSKGEPRDSGTLQSQEAKAVKKTSLFEEDKEDDLFAIAKDSQKKTQRVSLLFEDDVDSGGSLFGSPPTSVPPATKEGLLTRSAQETVKHSDLFSSSSPWDKGTKPRTKTVLSLFDEEEDKMEDQNIIQAPQKEVGKGCDPDAHPKSTGVFQDEELLFSHKLQKDNDPDVDLFAGTKKTKLLEPSVGSLFGDDEDDDLFSSAKSQPLVQEKKRVVKKDHSVNSFKNQKHPESIQGSKEKGIWKPETPQANLAINPAALLPTAASQISEVKPVLPELAFPSSEHRRSHGLESVPVLPGSGEAGVSFDLPAQADTLHSANKSRVKMRGKRRPQTRAARRLAAQESSEAEDMSVPRGPIAQWADGAISPNGHRPQLRAASGEDSTEEALAAAAAPWEGGPVPGVDTSPFAKSLGHSRGEADLFDSGDIFSTGTGSQSVERTKPKAKIAENPANPPVGGKAKSPMFPALGEASSDDDLFQSAKPKPAKKTNPFPLLEDEDDLFTDQKVKKNETKSSSQQDVILTTQDIFEDDIFATEAIKPSQKTREKEKTLESNLFDDNIDIFADLTVKPKEKSKKKVEAKSIFDDDMDDIFSTGIQAKTTKPKSRSAQAAPEPRFEHKVSNIFDDPLNAFGGQ

SEQ ID NO: 49592 - protein, 1267 aa, Homo sapiens
MLMPVQETAWEELIRTGQMTPFGTQIPQKQEKKPRKIMLNEASGFEKYLADQAKLSFERKKQGCNKRAARKAPAPVTPPAPVQNKNKPNKKARVLSKKEERLKKHIKKLQKRALQFQGKVGLPKARRPWESDMRPEAEGDSEGEESEYFPTEEEEEEEDDEVEGAEADLSGDGTDYELKPLPKGGKRQKKVPVQEIDDDFFPSSGEEAEAASVGEGGGGGRKVGRYRDDGDEDYYKQRLRRWNKLRLQDKEKRLKLEDDSEESDAEFDEGFKVPGFLFKKLFKYQQTGVRWLWELHCQQAGGILGDEMGLGKTIQIIAFLAGLSYSKIRTRGSNYRFEGLGPTVIVCPTTVMHQWVKEFHTWWPPFRVAILHETGSYTHKKEKLIRDVAHCHGILITSYSYIRLMQDDISRYDWHYVILDEGHKIRNPNAAVTLACKQFRTPHRIILSGSPMQNNLRELWSLFDFIFPGKLGTLPVFMEQFSVPITMGGYSNASPVQVKTAYKCACVLRDTINPYLLRRMKSDVKMSLSLPDKNEQVLFCRLTDEQHKVYQNFVDSKEVYRILNGEMQIFSGLIALRKICNHPDLFSGGPKNLKGLPDDELEEDQFGYWKRSGKMIVVESLLKIWHKQGQRVLLFSQSRQMLDILEVFLRAQKYTYLKMDGTTTIASRQPLITRYNEDTSIFVFLLTTRVGGLGVNLTGANRVVIYDPDWNPSTDTQARERAWRIGQKKQVTVYRLLTAGTIEEKIYHRQIFKQFLTNRVLKDPKQRRFFKSNDLYELFTLTSPDASQSTETSAIFAGTGSDVQTPKCHLKRRIQPAFGADHDVPKRKKFPASNISVNDATSSEEKSEAKGAEVNAVTSNRSDPLKDDPHMSSNVTSNDRLGEETNAVSGPEELSVISGNGECSNSSGTGKTSMPSGDESIDEKLGLSYKRERPSQAQTEAFWENKQMENNFYKHKSKTKHHSVAEEETLEKHLRPKQKPKNSKHCRDAKFEGTRIPHLVKKRRYQKQDSENKSEAKEQSNDDYVLEKLFKKSVGVHSVMKHDAIMDGASPDYVLVEAEANRVAQDALKALRLSRQRCLGAVSGVPTWTGHRGISGAPAGKKSRFGKKRNSNFSVQHPSSTSPTEKCQDGIMKKEGKDNVPEHFSGRAEDADSSSGPLASSSLLAKMRARNHLILPERLESESGHLQEASALLPTTEHDDLLVEMRNFIAFQAHTDGQASTREILQEFESKLSASQSCVFRELLRNLCTFHRTSGGEGIWKLKPEYC

SEQ ID NO: 49593 - protein, 835 aa, Homo sapiens
MLMPVQETAWEELIRTGQMTPFGTQIPQKQEKKPRKIMLNEASGFEKYLADQAKLSFERKKQGCNKRAARKAPAPVTPPAPVQNKNKPNKKARVLSKKEERLKKHIKKLQKRALQFQGKVGLPKARRPWESDMRPEAEGDSEGEESEYFPTEEEEEEEDDEVEGAEADLSGDGTDYELKPLPKGGKRQKKVPVQEIDDDFFPSSGEEAEAASVGEGGGGGRKVGRYRDDGDEDYYKQRLSPKMPRTLSLHEITDLLETDDSIEASAIVIQPPENATAPVSDEESGDEEGGTINNLPGSLLHTAAYLIQDGSDAESDSDDPSYAPKDDSPDEVPSTFTVQQPPPSRRRKMTKILCKWKKADLTVQPVAGRVTAPPNDFFTVMRTPTEILELFLDDEVIELIVKYSNLYACSKGVHLGLTSSEFKCFLGIIFLSGYVSVPRRRMFWEQRTDVHNVLVSAAMRRDRFETIFSNLHVADNANLDPVDKFSKLRPLISKLNERCMKFVPNETYFSFDEFMVPYFGRHGCKQFIRGKPIRFGYKFWCGATCLGYICWFQPYQGKNPNTKHEEYGVGASLVLQFSEALTEAHPGQYHFVFNNFFTSIALLDKLSSMGHQATGTVRKDHIDRVPLESDVALKKKERGTFDYRIDGKGNIVCRWNDNSVVTVASSGAGIHPLCLVSRYSQKLKKKIQVQQPNMIKVYNQFMGGVDRADENIDKYRASIRGKKWYSSPLLFCFELVLQNAWQLHKTYDEKPVDFLEFRRRVVCHYLETHGHPPEPGQKGRPQKRNIDSRYDGINHVIVKQGKQTRCAECHKNTTFRCEKCDVALHVKCSVEYHTE

SEQ ID NO: 49594 - protein, 606 aa, Homo sapiens [sequence omitted]

SEQ ID NO: 49595 - protein, 360 aa, Homo sapiens [sequence omitted]

SEQ ID NO: 49596 - protein, 24 aa, Homo sapiens
MEDLGDKAVYCRCWRSKKVGYITC

SEQ ID NO: 49597 - protein, 88 aa, Homo sapiens [sequence omitted]

SEQ ID NO: 49598 - protein, 120 aa, Homo sapiens [sequence omitted]

SEQ ID NO: 49599 - protein, 894 aa, Homo sapiens
MEETNTQIAWPSKLKIGAKSKKDPHIKVSGKKEDVKEAKEMIMSVLDTKSNRVTLKMDVSHTEHSHVIGKGGNNIKKVMEETGCHIHFPDSNRNNQAEKSNQVSIAGQPAGVESARVRIRELLPLVLMFELPIAGILQPVPDPNSPSIQHISQTYNISVSFKQRSRMYGATVIVRGSQNNTSAVKEGTAMLLEHLAGSLASAIPVSTQLDIAAQHHLFMMGRNGSNIKHIMQRTGAQIHFPDPSNPQKKSTVYLQGTIESVCLARQYLMGCLPLVLMFDMKEEIEVDPQFIAQLMEQLDVFISIKPKPKQPSKSVIVKSVERNALNMYEARKCLLGLESSGVTIATSPSPASCPAGLACPSLDILASAGLGLTGLGLLGPTTLSLNTSTTPNSLLNALNSSVSPLQSPSSGTPSPTLWAPPLANTSSATGFSAIPHLMIPSTAQATLTNILLSGVPTYGHTAPSPPPGLTPVDVHINSMQTEGKKISAALNGHAQSPDIKYGAISTSSLGEKVLSANHGDPSIQTSGSEQTSPKSSPTEGCNDAFVEVGMPRSPSHSGNAGDLKQMMCPSKVSCAKRQTVELLQGTKNSHLHSTDRLLSDPELSATESPLADKKAPGSERAAERAAAAQQNSERAHLAPRSSYVNMQAFDYEQKKLLATKAMLKKPVVTEVRTPTNTWSGLGFSKSMPAETIKELRRANHVSYKPTMTTTYEGSSMSLSRSNSREHLGGGSESDNWRDRNGIGPGSHSEFAASIGSPKRKQNKSTEHYLSSSNYMDCISSLTGSNGCNLNSSFKGSDLPELFSKLGLGKYTDVFQQQEIDLQTFLTLTDQDLKELGITTFGARRKMLLAISELNKNRRKLFESPNARTSFLEGGASGRLPRQYHSDIASVSGRW

SEQ ID NO: 49600 - protein, 1585 aa, Homo sapiens
MVKLLLDRGAKIDAKTRDGLTPLHCGARSGHEQVVEMLLDRAAPILSKTKNGLSPLHMATQGDHLNCVQLLLQHNVPVDDVTNDYLTALHVAAHCGHYKVAKVLLDKKANPNAKALNGFTPLHIACKKNRIKVMELLLKHGASIQAVTESGLTPIHVAAFMGHVNIVSQLMHHGASPNTTNVRGETALHMAARSGQAEVVRYLVQDGAQVEAKAKDDQTPLHISARLGKADIVQQLLQQGASPNAATTSGYTPLHLSAREGHEDVAAFLLDHGASLSITTKKGFTPLHVAAKYGKLEVANLLLQKSASPDAAGKSGLTPLHVAAHYDNQKVALLLLDQGASPHAAAKNGYTPLHIAAKKNQMDIATTLLEYGADANAVTRQGIASVHLAAQEGHVDMVSLLLGRNANVNLSNKSGLTPLHLAAQEDRVNVAEVLVNQGAHVDAQTKMGYTPLHVGCHYGNIKIVNFLLQHSAKVNAKTKNGYTPLHQAAQQGHTHIINVLLQNNASPNELTVNGNTALGIARRLGYISVVDTLKIVTEETMTTTTVTEKHKMNVPETMNEVLDMSDDEVRKANAPEMLSDGEYISDVEEGEDAMTGDTDKYLGPQDLKELGDDSLPAEGYMGFSLGARSASLRSFSSDRSYTLNRSSYARDSMMIEELLVPSKEQHLTFTREFDSDSLRHYSWAADTLDNVNLVSSPIHSGFLVSFMVDARGGSMRGSRHHGMRIIIPPRKCTAPTRITCRLVKRHKLANPPPMVEGEGLASRLVEMGPAGAQFLGPVIVEIPHFGSMRGKERELIVLRSENGETWKEHQFDSKNEDLTELLNGMDEELDSPEELGKKRICRIITKDFPQYFAVVSRIKQESNQIGPEGGILSSTTVPLVQASFPEGALTKRIRVGLQAQPVPDEIVKKILGNKATFSPIVTVEPRRRKFHKPITMTIPVPPPSGEGVSNGYKGDTTPNLRLLCSITGGTSPAQWEDITGTTPLTFIKDCVSFTTNVSARFWLADCHQVLETVGLATQLYRELICVPYMAKFVVFAKMNDPVESSLRCFCMTDDKVDKTLEQQENFEEVARSKDIEVLEGKPIYVDCYGNLAPLTKGGQQLVFNFYSFKENRLPFSIKIRDTSQEPCGRLSFLKEPKTTKGLPQTAVCNLNITLPAHKKIEKTDRRQSFASLALRKRYSYLTEPGMSPQSPCERTDIRMAIVADHLGLSWTELARELNFSVDEINQIRVENPNSLISQSFMLLKKWVTRDGKNATTDALTSVLTKINRIDIVTLLEGPIFDYGNISGTRSFADENNVFHDPVDGYPSLQVELETPTGLHYTPPTPFQQDDYFSDISSIESPLRTPSRLSDGLVPSQGNIEHSADGPPVVTAEDASLEDSKLEDSVPLTEMPEAVDVDESQLENVCLSWQNETSSGNLESCAQARRVTGGLLDRLDDSPDQCRDSITSYLKGEAGKFEANGSHTEITPEAKTKSYFPESQNDVGKQSTKETLKPKIHGSGHVEEPASPLAAYQKSLEETSKLIIEETKPCVPVSMKKMSRTSPADGKPRLSLHEEEGSSGSEQKQGEGFKVKTKKEIRHVEKKSHS

SEQ ID NO: 49601 - protein, 384 aa, Homo sapiens
MGKFSIDPQYPGASCYPEGIINIVSAGILQGVTSPASTTASSSVTSASPNPLATGPLGVCTMSQTQPDLDHLYSPPPPPPPYSGCAGDLYQDPSAFLSAATTSTSSSLAYPPPPSYPSPKPATDPGLFPMIPDYPGFFPSQCQRDLHGTAGPDRKPFPCPLDTLRVPPPLTPLSTIRNFTLGGPSAGVTGPGASGGSEGPRLPGSSSAAAAAAAAAAYNPHHLPLRPILRPRKYPNRPSKTPVHERPYPCPAEGCDRRFSRSDELTRHIRIHTGHKPFQCRICMRNFSRSDHLTTHIRTHTGEKPFACDYCGRKFARSDERKRHTKIHLRQKERKSSAPSASVPAPSTASCSGGVQPGGTLCSSNSSSLGGGPLAPCSSRTRTP

SEQ ID NO: 49602 - protein, 243 aa, Homo sapiens
MKLTQSEQAHLSLELQRDSHMKQLLLIQERWKRAQREERLKAQQNTDKDAAAHLQTSHKPSAEDAEGQSPLSQKYSPSTEKCLPEIQGIFDRDPDTLLYLLQQKSEPAEPCIGSKAPKDDKTIIEEQATKIADLKRHVEFLVAENERLRKENKQLKAEKARLLKGPIEKELDVDADFVETSELWSLPPHAETATASSTWQKFAANTGKAKDIPIPNLPPLDFPSPELPLMELSEDILKGFMNN

SEQ ID NO: 49603 - protein, 72 aa, Homo sapiens
MHQKIAREMNLSETAFIRKLHPTDNFAQSSCFGLRWFTPASEVPLCGHATLASAAVLFHKISNVIFFNESNT

SEQ ID NO: 49604 - protein, 299 aa, Homo sapiens
MKTEDGKVEKHYLFYDGESVSGKVNLAFKQPGKRLEHQGIRIEFVGQIELFNDKSNTHEFVNLVKELALPGELTQSRSYDFEFMQVEKPYESYIGANVRLRYFLKVTIVRRLTDLVKEYDLIVHQLATYPDVNNSIKMEVGIEDCLHIEFEYNKSKYHLKDVIVGKIYFLLVRIKIQHMELQLIKKEITGIGPSTTTETETIAKYEIMDGAPVKGESIPIRLFLAGYDPTPTMRDVNKKFSVRYFLNLVLVDEEDRRYFKQQEIILWRKAPEKLRKQRTNFHQRFESPESQASAEQPEM

SEQ ID NO: 49605 - protein, 223 aa, Homo sapiens
MKTEDGKVEKHYLFYDGESVSGKVNLAFKQPGKRLEHQGIRIEFVGQIELFNDKSNTHEFVNLVKELALPGELTQSRSYDFEFMQVEKPYESYIGANVRLRYFLKVTIVRRLTDLVKEYDLIVHQLATYPDVNNSIKMEVGIEDCLHIEFEYNKSKYHLKDVIVGKIYFLLVRIKIQHMELQLIKKEITGIGPSTTTETETIAKYEIMDGAPVKGDNFMEKSS

SEQ ID NO: 49606 - protein, 245 aa, Homo sapiens
MVDYNGNINEALQEIRTLALMGPPGLPGQIGPPGAPGIPGQKGEIGLPGPPGHDGEKGPRGKPGDMGPPGPQGPPGKDGPPGVKGENGHPGSPGEKGEKGETGQAGSPVPGLPGPEGPPGPPGLQGVPGPKGEAGLDGAKGEKGFQGEKGDRGPLGLPGTPGPIGVPGPAGPKGERGSKGDPGMTGPTGAAGLPGLHGPPGDKGNRGHRGFKGEKGEPGLPGLDGLDAPCPLGEDGLPVQGCWNK

SEQ ID NO: 49607 - protein, 336 aa, Homo sapiens
MLVDMKDSFHHNVAALRASVETGFAKKTFISYSVTFKDNFRQGLVVGIDLKNQMVLLQGGEALPFSHLILATGSTGPFPGKFNEVSSQQAAIQAYEDMVRQVQRSRFIVVVGGGSAGVEMAAEIKTEYPEKEVTLIHSQVALADKELLPSVRQEVKEILLRKGVQLLLSERVSNLEELPLNEYREYIKVQTDKGTEVATNLVILCTGIKINSSAYRKAFESRLASSGALRVNEHLQVEGHSNVYAIGDCADVRTPKMAYLAGLHANIAVANIVNSVKQRPLQAYKPGALTFLLSMGRNDGVGQISGFYVGRLMVRLTKSRDLFVSTSWKTMRQSPP

SEQ ID NO: 49608 - protein, 26 aa, Homo sapiens
MEVFMCSVLKRQGYGEGFRWLSQYID

SEQ ID NO: 49609 - protein, 127 aa, Homo sapiens [sequence omitted]

SEQ ID NO: 49610 - protein, 291 aa, Homo sapiens [sequence omitted]

SEQ ID NO: 49611 - protein, 1615 aa, Homo sapiens
MGDSCIFCALKGIFNQFQCSSEKVLPSDTLRSALAKTFQDEQRFQLGIMDDAAECFENLLMRIHFHIADETKEDICTAQHCISHQKFAMTLFEQCVCTSCGATSDPLPFIQMVHYISTTSLCNQAICMLERREKPSPSMFGELLQNASTMGDLRNCPSNCGERIRIRRVLMNAPQIITIGLVWDSDHSDLAEDVIHSLGTCLKLGDLFFRVTDDRAKQSELYLVGMICYYGKHYSTFFFQTKIRKWMYFDDAHVKEIGPKWKDVVTKCIKGHYQPLLLLYADPQGTPVSTQDLPPQAEFQSYSRTCYDSEDSGREPSISSDTRTDSSTESYPYKHSHHESVVSHFSSDSQGTVIYNVENDSMSQSSRDTGHLTDSECNQKHTSKKGSLIERKRSSGRVRRKGDEPQASGYHSEGETLKEKQAPRNASKPSSSTNRLRDFKETVSNMIHNRPSLASQTNVGSHCRGRGGDQPDKKPPRTLPLHSRDWEIESTSSESKSSSSSKYRPTWRPKRESLNIDSIFSKDKRKHCGYTQLSPFSEDSAKEFIPDEPSKPPSYDIKFGGPSPQYKRWGPARPGSHLLEQHPRLIQRMESGYESSERNSSSPVSLDAALPESSNVYRDPSAKRSAGLVPSWRHIPKSHSSSILEVDSTASMGGWTKSQPFSGEEISSKSELDELQEEVARRAQEQELRRKREKELEAAKGFNPHPSRFMDLDELQNQGRSDGFERSLQEAESVFEESLHLEQKGDCAAALALCNEAISKLRLALHGASCSTHSRALVDKKLQISIRKARSLQDRMQQQQSPQQPSQPSACLPTQAGTLSQPTSEQPIPLQVLLSQEAQLESGMDTEFGASSFFHSPASCHESHSSLSPESSAPQHSSPSRSALKLLTSVEVDNIEPSAFHRQGLPKAPGWTEKNSHHSWEPLDAPEGKLQGSRCDNSSCSKLPPQEGRGIAQEQLFQEKKDPANPSPVMPGIATSERGDEHSLGCSPSNSSAQPSLPLYRTCHPIMPVASSFVLHCPDPVQKTNQCLQGQSLKTSLTLKVDRGSEETYRPEFPSTKGLVRSLAEQFQRMQGVSMRDSTGFKDRSLSGSLRKNSSPSDSKPPFSQGQEKGHWPWAKQQSSLEGGDRPLSWEESTEHSSLALNSGLPNGETSSGGQPRLAEPDIYQEKLSQVRDVRSKDLGSSTDLGTSLPLDSWVNITRFCDSQLKHGAPRPGMKSSPHDSHTCVTYPERNHILLHPHWNQDTEQETSELESLYQASLQASQAGCSGWGQQDTAWHPLSQTGSADGMGRRLHSAHDPGLSKTSTAEMEHGLHEARTVRTSQATPCRGLSRECGEDEQYSAENLRRISRSLSGTVVSEREEAPVSSHSFDSSNVRKPLETGHRCSSSSSLPVIHDPSVFLLGPQLYLPQPQFLSPDVLMPTMAGEPNRLPGTSRSVQQFLAMCDRGETSQGAKYTGRTLNYQSLPHRSRTDNSWAPWSETNQHIGTRFLTTPGCNPQLTYTATLPERSKGLQVPHTQSWSDLFHSPSHPPIVHPVYPPSSSLHVPLRSAWNSDPVPGSRTPGPRRVDMPPDDDWRQSSYASHSGHRRTVGEGFLFVLSDAPRREQIRARVLQHSQW

SEQ ID NO: 49612 - protein, 623 aa, Homo sapiens
MDDAAECFENLLMRIHFHIADETKEDICTAQHCISHQKFAMTLFEQCVCTSCGATSDPLPFIQMVHYISTTSLCNQAICMLERREKPSPSMFGELLQNASTMGDLRNCPSNCGERIRIRRVLMNAPQIITIGLVWDSDHSDLAEDVIHSLGTCLKLGDLFFRVTDDRAKQSELYLVGMICYYGKHYSTFFFQTKIRKWMYFDDAHVKEIGPKWKDVVTKCIKGHYQPLLLLYADPQGTPVSTQDLPPQAEFQSYSRTCYDSEDSGHLTDSECNQKHTSKKGSLIERKRSSGRVRRKGDEPQASGYHSEGETLKEKQAPRNASKPSSSTNRLRDFKETVSNMIHNRPSLASQTNVGSHCRGRGGDQPDKKPPRTLPLHSRDWEIESTSSESKSSSSSKYRPTWRPKRESLNIDSIFSKDKRKHCGYTQLSPFSEDSAKEFIPDEPSKPPSYDIKFGGPSPQYKRWGPARPGSHLLEQHPRLIQRMESGYESSERNSSSPVSLDAALPESSNVYRDPSAKRSAGLVPSWRHIPKSHSSSILEVDSTASMGGWTKSQPFSGEEISSKSELDELQEEVARRAQEQELRRKREKELEAAKGFNPHPSRFMDLDELQNQVNSLSRSKYC

SEQ ID NO: 49613 - protein, 312 aa, Homo sapiens
MRNSPNTSPKLMRHDPLLIPGNDQIDNMDSNVKKYDSTGMFHWCAPKEIEKVILTRSEAAMTVLSGHVVVCIFGDVSSALIGLRNLVMPLRASNFHYHELKHIVFVGSIEYLKREWETLHNFPKVSILPGTPLSRADLRAVNINLCDMCVILSANQNNIDDTSLQDKECILASLNIKSMQFDDSIGVLQANSQGFTPPGMDRSSPDNSPVHGMLRQPSITTGVNIPIITELVNDTNVQFLDQDDDDDPDTELYLTQPFACGTAFAVSVLDSLMSAILLPHSSAPGCLHGKIKESHHLGCSASSESRQLCSEI

SEQ ID NO: 49614 - protein, 536 aa, Homo sapiens [sequence omitted]

SEQ ID NO: 49615 - protein, 165 aa, Homo sapiens
MAVQEVKKVRAAPGRVAASETIPTCKLENLSAGWIFMFHSGETGPGKRCYKKNDTVTIRTRKFMTNRLLQRKQMVIDVLHPGKATVPKTEIREKLAKMYKTTPDVIFVFGFRTHFGGGKTTGFGMIYDSLDYAKKNEPKHRLARVGVFSFVDQLLKTYFFNSVVL

SEQ ID NO: 49616 - protein, 328 aa, Homo sapiens
MSSMKPTLSHSDGSFPYDSVPWQQNTNQPPGSLSVVTTVWGVTNTSQSQVLGNPMANANNPMNPGGNPMASGMTTSNPGLNSPQFAGQQQQFSAKAGPAQPYIQQSMYGRPNYPGSGGFGASYPGGPNAPAGMGIPPHTRPPADFTQPAAAAAAAAVAAAAATATATATATVAALQETQNKDINQYGPVCSSFQMGPTQAYNSQFMNQPGPRGPASMGGSMNPASMAAGMTPSGMSGPPMGMNQPRPPGISPFGTHGQRMPQQTYPGPRPQSLPIQNIKRPYPGEVSAAVGAWEVGTGTPGLEDMGRGYGFGRGVAWTPAHLDKEAGA

SEQ ID NO: 49617 - skipped

SEQ ID NO: 49618 - protein, 445 aa, Homo sapiens [sequence omitted]

SEQ ID NO: 49619 - protein, 875 aa, Homo sapiens [sequence omitted]

SEQ ID NO: 49620 - protein, 325 aa, Homo sapiens
MVDAIDPTRKQKVEAQKQAEKLMKQIGVKNVKLSEYEMSIAAHLVDPLNMHVTWSDIAGLDDVITDLKDTVILPIKKKHLFENSRLLQPPKGVLLYGPPGCGKTLIAKATAKEAGCRFINLQPSTLTDKWYGESQKLAAAVFSLAIKLQPSIIFIDEIDSFLRNRSSSDHEATAMMKAQFMSLWDGLDTDHSCQVIVMGATNRPQDLDSAIMRRMPTRFHINQPALKQREAILKLILKNENVDRHVDLLEVAQETDGFSGSDLKEMCRDAALLCVREYVNSTSEESHDEDEIRPVQQQDLHRAIEKMKKSKDAAFQNVLTHVCLD

SEQ ID NO: 49621 - protein, 305 aa, Homo sapiens
MTGSLCAALLRRQTSGPLYLAVWDKAEDSGGRMTTACSPHNPQCTADLGAQYITCTPHYAKKHQRFYDELLAYGVLRPLSSPIEGMVMKEGDCNFVAPQGISSIIKHYLKESGAEVYFRHRVTQINLRDDKWEVSKQTGSPEQFDLIVLTMPVPEILQLQGDITTLISECQRQQLEAVSYSSRYALGLFYEAGTKIDVPWAGQYITSNPCIRFVSIDNKKRNIESSEIGPSLVIHTTVPFGVTYLEHSIEDVQELVFQQLENILPGLPQPIATKCQKWRHSQVPSAGVILGCAKSPWMMAIGFPI

SEQ ID NO: 49622 - protein, 67 aa, Homo sapiens
MGTDLPLLLFAARVQFFTHVRLCCVSRLRSVYGLWLQPSLCVLGALCFECWSESSASCFSYVHTWSD

SEQ ID NO: 49623 - protein, 1672 aa, Homo sapiens
MAQKFSFSKVFGPATTQKEFFQGCIMQPVKDLLKGQSRLIFTYGLTNSGKTYTFQGTEENIGILPRTLNVLFDSLQERLYTKMNLKPHRSREYLRLSSEQEKEEIASKSALLRQIKEVTVHNDSDDTLYGSLTNSLNISEFEESIKDYEQANLNMANSIKFSVWVSFFEIYNEYIYDLFVPVSSKFQKRKMLRLSQDVKGYSFIKDLQWIQVSDSKEAYRLLKLGIKHQSVAFTKLNNASSRSHSIFTVKILQIEDSEMSRVIRVSELSLCDLAGSERTMKTQNEGERLRETGNINTSLLTLGKCINVLKNSEKSKFQQHVPFRESKLTHYFQSFFNGKGKICMIVNISQCYLAYDETLNVLKFSAIAQKVCVPDTLNSSQEKLFGPVKSSQDVSLDSNSNSKILNVKRATISWENSLEDLMEDEDLVEELENAEETQNVETKLLDEDLDKTLEENKAFISHEEKRKLLDLIEDLKKKLINEKKEKLTLEFKIREEVTQEFTQYWAQREADFKETLLQEREILEENAERRLAIFKDLVGKCDTREEAAKDICATKVETEEATACLELKFNQIKAELAKTKGELIKTKEELKKRENESDSLIQELETSNKKIITQNQRIKELINIIDQKEDTINEFQNLKSHMENTFKCNDKADTSSLIINNKLICNETVEVPKDSKSKICSERKRVNENELQQDEPPAKKGSIHVSSAITEDQKKSEEVRPNIAEIEDIRVLQENNEGLRAFLLTIENELKNEKEEKAELNKQIVHFQQELSLSEKKNLTLSKEVQQIQSNYDIAIAELHVQKSKNQEQEEKIMKLSNEIETATRSITNNVSQIKLMHTKIDELRTLDSVSQISNIDLLNLRDLSNGSEEDNLPNTQLDLLGNDYLVSKQVKEYRIQEPNRENSFHSSIEAIWEECKEIVKASSKKSHQIEELEQQIEKLQAEVKGYKDENNRLKEKEHKNQDDLLKEKETLIQQLKEELQEKNVTLDVQIQHVVEGKRALSELTQGVTCYKAKIKELETILETQKVECSHSAKLEQDILEKESIILKLERNLKEFQEHLQDSVKNTKDLNVKELKLKEEITQLTNNLQDMKHLLQLKEEEEETNRQETEKLKEELSASSARTQNLKADLQRKEEDYADLKEKLTDAKKQIKQVQKEVSVMRDEDKLLRIKINELEKKKNQCSQELDMKQRTIQQLKEQLNNQKVEEAIQQYERACKDLNVKEKIIEDMRMTLEEQEQTQVEQDQVLEAKLEEVERLATELEKWKEKCNDLETKNNQRSNKEHENNTDVLGKLTNLQDELQESEQKYNADRKKWLEEKMMLITQAKEAENIRNKEMKKYAEDRERFFKQQNEMEILTAQLTEKDSDLQKWREERDQLVAALEIQLKALISSNVQKDNEIEQLKRIISETSKIETQIMDIKPKRISSADPDKLQTEPLSTSFEISRNKIEDGSVVLDSCEVSTENDQSTRFPKPELEIQFTPLQPNKMAVKHPGCTTPVTVKIPKARKRKSNEMEEDLVKCENKKNATPRTNLKFPISDDRNSSVKKEQKVAIRPSSKKTYSLRSQASIIGVNLATKKKEGTLQKFGDFLQHSPSILQSKAKKIIETMSSSKLSNVEASKENVSQPKRAKRKLYTSEISSPIDISGQVILMDQKMKESDHQIIKRRLRTKTAK

SEQ ID NO: 49624 - protein, 31 aa, Homo sapiens
MDLVLHWQNGTKAIFDSLRENSYKTSRIATF

SEQ ID NO: 49625 - protein, 298 aa, Homo sapiens [sequence omitted]

SEQ ID NO: 49626 - protein, 978 aa, Homo sapiens
MNNPAIKRIGNHITKSPEDKREYRGLELANGIKVLLISDPTTDKSSAALDVHIGSLSDPPNIAGLSHFCEHMLFLGTKKYPKENEYSQFLSEHAGSSNAFTSGEHTNYYFDVSHEHLEGALDRFAQFFLCPLFDESCKDREVNAVDSEHEKNVMNDAWRLFQLEKATGNPKHPFSKFGTGNKYTLETRPNQEGIDVRQELLKFHSAYYSSNLMAVCVLGRESLDDLTNLVVKLFSEVENKNVPLPEFPEHPFQEEHLKQLYKIVPIKDIRNLYVTFPIPDLQKYYKSNPGHYLGHLIGHEGPGSLLSELKSKGWVNTLVGGQKEGARGFMFFIINVDLTEEGLLHVEDIILHMFQYIQKLRAEGPQEWVFQECKDLNAVAFRFKDKERPRGYTSKIAGILHYYPLEEVLTAEYLLEEFRPDLIEMVLDKLRPENVRVAIVSKSFEGKTDRTEEWYGTQYKQEAIPDEVIKKWQNADLNGKFKLPTKNEFIPTNFEILPLEKEATPYPALIKDTAMSKLWFKQDDKFFLPKACLNFEFFSRYIYADPLHCNMTYLFIRLLKDDLKEYTYAARLSGLSYGIASGMNAILLSVKGYNDKQPILLKKIIEKMATFEIDEKRFEIIKEAYMRSLNNFRAEQPHQHAMYYLRLLMTEVAWTKDELKEALDDVTLPRLKAFIPQLLSRLHIEALLHGNITKQAALGIMQMVEDTLIEHAHTKPLLPSQLVRYREVQLPDRGWFVYQQRNEVHNNCGIEIYYQTDMQSTSENMFLELFCQIISEPCFNTLRTKEQLGYIVFSGPRRANGIQGLRFIIQSEKPPHYLESRVEAFLITMEKSIEDMTEEAFQKHIQALAIRRLDKPKKLSAECAKYWGEIISQQYNFDRDNTEVAYLKTLTKEDIIKFYKEMLAVDAPRRHKVSVHVLAREMDSCPVVGEFPCQNDINLSQAPALPQPEVIQNMTEFKRGLPLFPLVKPHINFMAAKL

SEQ ID NO: 49627 - protein, 829 aa, Homo sapiens
MNAYSSRSHSVFSVTIHMKETTIDGEELVKIGKLNLVDLAGSENIGRSGAVDKRAREAGNINQSLLTLGRVITALVERTPHVPYRESKLTRILQDSLGGRTRTSIIATISPASLNLEETLSTLEYAHRAKNILNKPEVNQKLTKKALIKEYTEEIERLKRDLAAAREKNGVYISEENFRVMSGKLTVQEEQIVELIEKIGAVEEELNRVTELFMDNKNELDQCKSDLQNKTQELETTQKHLQETKLQLVKEEYITSALESTEEKLHDAASKLLNTVEETTKDVSGLHSKLDRKKAVDQHNAEAQDIFGKNLNSLFNNMEELIKDGSSKQKAMLEVHKTLFGNLLSSSVSALDTITTVALGSLTSIPENVSTHVSQIFNMILKEQSLAAESKTVLQELINVLKTDLLSSLEMILSPTVVSILKINSQLKHIFKTSLTVADKIEDQKKELDGFLSILCNNLHELQENTICSLVESQKQCGNLTEDLKTIKQTHSQELCKLMNLWTERFCALEEKCENIQKPLSSVQENIQQKSKDIVNKMTFHSQKFCADSDGFSQELRNFNQEGTKLVEESVKHSDKLNGNLEKISQETEQRCESLNTRTVYFSEQWVSSLNEREQELHNLLEVVSQCCEASSSDITEKSDGRKAAHEKQHNIFLDQMTIDEDKLIAQNLELNETIKIGLTKLNCFLEQDLKLDIPTGTTPQRKSYLYPSTLVRTEPREHLLDQLKRKQPELLMMLNCSENNKEETIPDVDVEEAVLGQYTEEPLSQEPSVDAGVDCSSIGGVPFFQHKKSHGKDKENRGINTLERSKVEETTEHLVTKSRLPLRAQINL

SEQ ID NO: 49628 - protein, 157 aa, Homo sapiens
MAKKDPEGLFLQDNIVAEFSVDETGQMSATAKGRVRLLNNWDVCADMVGTFTDTEDPAKFKMKYWGVASFLQKGNDDHWIVDTDYDTYAVQYSCRLLNLDGTCADSYSFVFSRDPNGLPPEAQKIVRQRQEELCLARQYRLIVHNGYCDGRSERNLL

SEQ ID NO: 49629 - protein, 559 aa, Homo sapiens
MLMEQDPDVAVTVRKLVIVSLMELFKDITPSYKIRPLTEAEKSTKTRKETQKLREFEEGLVSQYKFYLENLEQMVKDWKQRKLKKSNVVSLKAYKGLAEVAVKSLCELLVALPHFNFHNNIIVLIVPLMNDMSKLISEMCCEAVKKLFKQDKLGQASLGVIKVISGFVKGRNYEVRPEMLKTFLCLRIKEVEVKKDTEDINKPKKFMTFKEKRKSLSRMQRKWKKAEEKLERELREAEASESTEKKLKLHTETLNIVFVTYFRILKKAQRSPLLPAVLEGLAKFAHLINVEFFDDLLVVLHTLIESGDLSYQESLHCVQTAFHILSGQGDVLNIDPLKFYTHLYKTLFKLHAGATNEGVEIVLQCLDVMLTKRRKQVSQQRALAFIKRLCTLALHVLPNSSIGILATTRILMHTFPKTDLLLDSESQGSGVFLPELDEPEYCNAQNTALWELHALRRHYHPIVQRFAAHLIAGAPSEGSGALKPELSRRSATELFEAYSMAEMTFNPPVESSNPKIKGKFLQGDSFLNEDLNQLIKRYSSEVATESPLDFTKYLKTSLH

SEQ ID NO: 49630 - protein, 809 aa, Homo sapiens
MLEEEEQLEAAGLERERKMLEKARMSWDRESTEIRYRRLQHLLEKSNIYSKFLLTKMEQQQLEEQKKKEKLERKKESLKVKKGKNSIDASEEKPVMRKKRGREDESYNISEVMSKEEILSVAKKNKKENEDENSSSTNLCVEDLQKNKDSNSIIKDRLSETVRQNTKFFFDPVRKCNGQPVPFQQPKHFTGGVMRWYQVEGMEWLRMLWENGINGILADEMGLGKTVQCIATIALMIQRGVPGPFLVCGPLSTLPNWMAEFKRFTPDIPTMLYHGTQEERQKLVRNIYKRKGTLQIHPVVITSFEIAMRDRNALQHCYWKYLIVDEGHRIKNMKCRLIRELKRFNADNKLLLTGTPLQNNLSELWSLLNFLLPDVFDDLKSFESWFDITSLSETAEDIIAKEREQNVLHMLHQILTPFLLRRLKSDVALEVPPKREVVVYAPLSKKQEIFYTAIVNRTIANMFGSSEKETIELSPTGRPKRRTRKSINYSKIDDFPNELEKLISQIQPEVDRERAVVEVNIPVESEVNLKLQNIMMLLRKCCNHPYLIEYPIDPVTQEFKIDEELVTNSGKFLILDRMLPELKKRGHKVLLFSQMTSMLDILMDYCHLRDFNFSRLDGSMSYSEREKNMHSFNTDPEVFIFLVSTRAGGLGINLTAADTVIIYDSDWNPQSDLQAQDRCHRIGQTKPVVVYRLVTANTIDQKIVERAAAKRKLEKLIIHKNHFKGGQSGLNLSKNFLDPKELMELLKSRDYEREIKGSREKVISDKDLELLLDRSDLIDQMNASGPIKEKMGIFKILENSEDSSPECLF

SEQ ID NO: 49631 - protein, 458 aa, Homo sapiens
MYIDDLPIWGIVGEADENGEDYYLWTYKKLEIGFNGNRIVDVNLTSEGKVKLVPNTKIQMSYSVKWKKSDVKFEDRFDKYLDPSFFQHRIHWFSIFNSFMMVIFLVGLVSMILMRTLRKDYARYSKEEEMDDMDRDLGDEYGWKQVHGDVFRPSSHPLIFSSLIGSGCQIFAVSLIVIIVAMIEDLYTERGSMLSTAIFVYAATSPVNGYFGGSLYARQGGRRWIKQMFIGAFLIPAMVCGTAFFINFIAIYYHASRAIPFGTMVAVCCICFFVILPLNLVGTILGRNLSGQPNFPCRVNAVPRPIPEKKWFMEPAVIVCLGGILPFGSIFIEMYFIFTSFWAYKIYYVYGFMMLVLVILCIVTVCVTIVCTYFLLNAEDYRWQWTSFLSAASTAIYVYMYSFYYYFFKTKMYGLFQTSFYFGYMAVFSTALGIMCGAIGYMGTSAFVRKIYTNVKID

SEQ ID NO: 49632 - protein, 64 aa, Homo sapiens
MTFEGEFKNGRVDGFGLLTFPDGSHGIPRNEGLFENNKLLRREKCSAIVQRAQSASKSARNLTA

SEQ ID NO: 49633 - protein, 215 aa, Homo sapiens
MLYLLPLCWVLTLLNSTLFLGNVEFFRVVSEYRASLQQRMNPKQEEHAFESPPPPDVGGKDGLMDSTPALTPTESLSSQDLTPGSVEEAEEAEPDEEFKDAIEEDDEGAPCPAEDELALQDNGFLSKNEVLRSKVSRLTERLRKRYPTNNFGNCTGCSATFSVLKKRRSCSNCGNSFCSRCCSFKVPKSSMGATAPEAQRETVFVCASCNQTLSK

SEQ ID NO: 49634 - protein, 368 aa, Homo sapiens [sequence omitted]

SEQ ID NO: 49635 - protein, 12 aa, Homo sapiens
MAGFAPFVNLQV

SEQ ID NO: 49636 - protein, 227 aa, Homo sapiens
MEAYVPGFAHIPRGTIGDMMQKLSGQLSDARNKENLQPQSSGVQGQVPISPEPLQRPEMLKEETRSSAAAAADTQDEATGAEEELLPGVDVLLEVFPTCSVEQAQWVLAKARGDLEEAVQMLVEGKEEGPAAWEGPNQDLPRRLRGPQKDELKSFILQKYMMVDSAEDQKIHRPMAPKEAPKKLIRYIDNQVVSTKGERFKDVRNPEAEEMKATYINLKPARKYRFH

SEQ ID NO: 49637 - protein, 1684 aa, Homo sapiens
MLLTGTVSSLEDHGYLVDIGVDGTRAFLPLLKAQEYIRQKNKGAKLKVGQYLNCIVEKVKGNGGVVSLSVGHSEVSTAIATEQQSWNLNNLLPGLVVKAQVQKVTPFGLTLNFLTFFTGVVDFMHLDPKKAGTYFSNQAVRACILCVHPRTRVVHLSLRPIFLQPGRPLTRLSCQNLGAVLDDVPVQGFFKKAGATFRLKDGVLAYARLSHLSDSKNVFNPEAFKPGNTHKCRIIDYSQMDELALLSLRTSIIEAQYLRYHDIEPGAVVKGTVLTIKSYGMLVKVGEQMRGLVPPMHLADILMKNPEKKYHIGDEVKCRVLLCDPEAKKLMMTLKKTLIESKLPVITCYADAKPGLQTHGFIIRVKDYGCIVKFYNNVQGLVPKHELSTEYIPDPERVFYTGQVVKVVVLNCEPSKERMLLSFKLSSDPEPKKEPAGHSQKKGKAINIGQLVDVKVLEKTKDGLEVAVLPHNIRAFLPTSHLSDHVANGPLLHHWLQAGDILHRVLCLSQSEGRVLLCRKPALVSTVEGGQDPKNFSEIHPGMLLIGFVKSIKDYGVFIQFPSGLSGLAPKAIMSDKFVTSTSDHFVEGQTVAAKVTNVDEEKQRMLLSLRLSDCGLGDLAITSLLLLNQCLEELQGVRSLMSNRDSVLIQTLAEMTPGMFLDLVVQEVLEDGSVVFSGGPVPDLVLKASRYHRAGQEVESGQKKKVVILNVDLLKLEVHVSLHQDLVNRKARKLRKGSEHQAIVQHLEKSFAIASLVETGHLAAFSLTSHLNDTFRFDSEKLQVGQGVSLTLKTTEPGVTGLLLAVEGPAAKRTMRPTQKDSETVDEDEEVDPALTVGTIKKHTLSIGDMVTGTVKSIKPTHVVVTLEDGIIGCIHASHILDDVPEGTSPTTKLKVGKTVTARVIGGRDMKTFKYLPISHPRFVRTIPELSVRPSELEDGHTALNTHSVSPMEKIKQYQAGQTVTCFLKKYNVVKKWLEVEIAPDIRGRIPLLLTSLSFKVLKHPDKKFRVGQALRATVVGPDSSKTLLCLSLTGPHKLEEGEVAMGRVVKVTPNEGLTVSFPFGKIGTVSIFHMSDSYSETPLEDFVPQKVVRCYILSTADNVLTLSLRSSRTNPETKSKVEDPEINSIQDIKEGQLLRGYVGSIQPHGVFFRLGPSVVGLARYSHVSQHSPSKKALYNKHLPEGKLLTARVLRLNHQKNLVELSFLPGDTGKPDVLSASLEGQLTKQEERKTEAEERDQKGEKKNQKRNEKKNQKGQEEVEMPSKEKQQPQKPQAQKRGGRECRESGSEQERVSKKPKKAGLSEEDDSLVDVYYREGKEEAEETNVLPKEKQTKPAEAPRLQLSSGFAWNVGLDSLTPALPPLAESSDSEEDEKPHQATIKKSKKERELEKQKAEKELSRIEEALMDPGRQPESADDFDRLVLSSPNSSILWLQYMAFHLQATEIEKARAVAERALKTISFREEQEKLNVWVALLNLENMYGSQESLTKVFERAVQYNEPLKVFLHLADIYAKSEKFQEAGELYNRMLKRFRQEKAVWIKYGAFLLRRSQAAASHRVLQRALECLPSKEHVDVIAKFAQLEFQLGDAERAKAIFENTLSTYPKRTDVWSVYIDMTIKHGSQKDVRDIFERVIHLSLAPKRMKFFFKRYLDYEKQHGTEKDVQAVKAKALEYVEAKSSVLED

SEQ ID NO: 49638 - protein, 1128 aa, Homo sapiens
MVEIDILASCDHPNIVKLLDAFYYENNLWILIEFCAGGAVDAVMLELERPLTESQIQVVCKQTLDALNYLHDNKIIHRDLKAGNILFTLDGDIKLADFGVSAKNTRTIQRRDSFIGTPYWMAPEVVMCETSKDRPYDYKADVWSLGITLIEMAEIEPPHHELNPMRVLLKIAKSEPPTLAQPSRWSSNFKDFLKKCLEKNVDARWTTSQLLQHPFVTVDSNKPIRELIAEAKAEVTEEVEDGKEEDEEEETENSLPIPASKRASSDLSIASSEEDKLSQNACILESVSEKTERSNSEDKLNSKILNEKPTTDEPEKAVEDINEHITDAQLEAMTELHDRTAVIKENEREKRPKLENLPDTEDQETVDINSVSEGKENNIMITLETNIEHNLKSEEEKDQEKQQMFENKLIKSEEIKDTILQTVDLVSQETGEKEANIQAVDSEVGLTKEDTQEKLGEDDKTQKDVISNTSDVIGTCEAADVAQKVDEDSAEDTQSNDGKEVVEVGQKLINKPMVGPEAGGTKEVPIKEIVEMNEIEEGKNKEQAINSSENIMDINEEPGTTEGEEITESSSTEEMEVRSVVADTDQKALGSEVQDASKVTTQIDKEKKEIPVSIKKEPEVTVVSQPTEPQPVLIPSININSDSGENKEEIGSLSKTETILPPESENPKENDNDSGTGSTADTSSIDLNLSISSFLSKTKDSGSISLQETRRQKKTLKKTRKFIVDGVEVSVTTSKIVTDSDSKTEELRFLRRQELRELRFLQKEEQRAQQQLNSKLQQQREQIFRRFEQEMMSKKRQYDQEIENLEKQQKQTIERLEQEHTNRLRDEAKRIKGEQEKELSKFQNMLKNRKKEEQEFVQKQQQELDGSLKKIIQQQKAELANIERECLNNKQQLMRAREAAIWELEERHLQEKHQLLKQQLKDQYFMQRHQLLKRHEKETEQMQRYNQRLIEELKNRQTQERARLPKIQRSEAKTRMAMFKKSLRINSTATPDQDRDKIKQFAAQEEKRQKNERMAQHQKHENQMRDLQLQCEANVRELHQLQNEKCHLLVEHETQKLKELDEEHSQELKEWREKLRPRKKTLEEEFARKLQEQEVFFKMTGESECLNPSTQSRISKFYPIPSLHSTGS

SEQ ID NO: 49639 - protein, 854 aa, Homo sapiens
MERDFQGVLHELSGDKSLEKFRIEYERLHAVMKKSYDNEKRLMAKCRELNAEIVVNSAKVATALKLSQDDQTTIASLKKEIEKAWKMVDSAYDKEQKAKETILALKEEIVNLTKLVEQGSGLSMDQHSNIRDLLRFKEEVTKERDQLLSEVVKLRESLAQTTEQQQETERSKEEAEHAISQFQQEIQQRQNEASREFRKKEKLEKELKQIQADMDSRQTEIKALQQYVQKSKEELQKLEQQLKEQKILNERAAKELEQFQMRNAKLQQENEQHSLVCEQLSQENQQKALELKAKEEEVHQMRLDIGKLNKIREQIHKKLHHTEDQKAEVEQHKETLKNQIVGLEREVEASKKQAELDRKAMDELLRERDILNKNMLKAVNATQKQTDLVKLHEQAKRNLEGEIQNYKDEAQKQRKIIFHLEKERDRYINQASDLTQKVLMNMEDIKVRETQIFDYRKKIAESEIKLKQQQNLYEAVRSDRNLYSKNLVEAQDEITDMKRKLKIMIHQVDELKEDISAKESALVKLHLEQQRIEKEKETLKAELQKLRQQALETKHFIEKQEAEERKLLRIIAEADGERLRQKKELDQVISERDILGSQLVRRNDELALLYEKIKIQQSVLNKGESQYNQRLEDMRILRLEIKKLRREKGILARSMANVEELRQEFFHMQRELLKERTRCRALEEELENPLNVHRWRKLEASDPNAYELIQKIHTLQKRLISKTEEVVEKELLLQEKEKLYMELKHVLARQPGPEAAEQLKLYRRTLHDKKQQLKVLSSELNMYEVQSKEYKYEVEKLTNELQNLKKKYLAQKRKEQLQKNKDTAPMDNTFLMVKPNGPGFTGGGFPLRSTKMTF

SEQ ID NO: 49640 - protein, 538 aa, Homo sapiens [sequence omitted]

SEQ ID NO: 49641 - protein, 49 aa, Homo sapiens
MRNSEYVTEPIQAYIIPSGDAHQVLWLGRILVTAEGAAALYSGRPGFGS

SEQ ID NO: 49642 - protein, 345 aa, Homo sapiens
MIDSVLWYWPLHTTGGSVNFIMLINWTVMILYNYFNAMFVGPGFVPLGWKPEISQDTMYLQYCKVCQAYKAPRSHHCRKCNRCVMKMDHHCPWINNCCGYQNHASFTLFLLLAPLGCIHAAFIFVMTMYTQLYHRLSFGWNTVKIDMSAARRDPLPIVPFGLAAFATTLFALGLALGTTIAVGMLFFIQMKIILRNKTSIESWIEEKAKDRIQYYQLDEVFVFPYDMGSRWRNFKQVFTWSGVPEGDGLEWPVREGCHQYSLTIEQLKQKADKRVRSVRYKVIEDYSGACCPLNKGIKTFFTSPCTEEPRIQLQKGEFILATRGLRYWLYGDKILDDSFIEGVLV

SEQ ID NO: 49643 - protein, 478 aa, Homo sapiens
MIPDLTSPYLPNGSLSPTARTYLQMKWPLLDVQAGSLQSRQALKDARSPSPAHIVSNKVPVVQHPHHVHPLTPLITYSNEHFTPGNPPPHLPADVDPKTGIPRPPHPPDISPYYPLSPGTVGQIPHPLGWLVPQQGQPVYPITTGGFRHPYPTALTVNASMSSFLSSRFPPHMVPPHHTLHTTGIPHPAIVTPTVKQESSQSDVGSLHSSKHQDSKKEEEKKKPHIKKPLNAFMLYMKEMRAKVVAECTLKESAAINQILGRRWHALSREEQAKYYELARKERQLHMQLYPGWSARDNYGKKKKRKRDKQPGETNDANTPKKCRALFGLDRQTLWCKPCRRKKKCVRYIQGEGSCLSPPSSDGSLLDSPPPSPNLLGSPPRDAKSQTEQTQPLSLSLKPDPLAHLSMMPPPPALLLAEATHKASALCPNGALDLPPAALQPAAPSSSIAQPSTSSLHSHSSLAGTQPQPLSLVTKSLE

SEQ ID NO: 49644 - protein, 62 aa, Homo sapiens
MIHRSTSQGSINSPVYSRHSYTPTTSRSPQHFHRPDQGINIYRKPPIYKQHVLFEVILLLLI

SEQ ID NO: 49645 - protein, 663 aa, Homo sapiens [sequence omitted]

SEQ ID NO: 49646 - protein, 390 aa, Homo sapiens
MEALKQKSLYNCRCKRGMKKEKNCLRIYWSMYQSLQGNDLLEDSPYEPVNSRLSDIFRVVPFISDVFQQVEHIPKGNNCLDAAKACNLDDICKKYRSAYITPCTTSVSNDVCNRRKCHKALRQFFDKVPAKHSYGMLFCSCRDIACTERRRQTIVPVCSYEEREKPNCLNLQDSCKTNYICRSRLADFFTNCQPESRSVSSCLKENYADCLLAYSGLIGTVMTPNYIDSSSLSVAPWCDCSNSGNDLEECLKFLNFFKDNTCLKNAIQAFGNGSDVTVWQPAFPVQTTTATTTTALRVKNKPLGPAGSENEIPTHVLPPCANLQAQKLKSNVSGNTHLCISNGNYEKEGLGASSHITTKSMAAPPSCGLSPLLVLVVTALSTLLSLTETS

SEQ ID NO: 49647 - protein, 385 aa, Homo sapiens
MEALKQKSLYNCRCKRGMKKEKNCLRIYWSMYQSLQGNDLLEDSPYEPVNSRLSDIFRVVPFISVEHIPKGNNCLDAAKACNLDDICKKYRSAYITPCTTSVSNDVCNRRKCHKALRQFFDKVPAKHSYGMLFCSCRDIACTERRRQTIVPVCSYEEREKPNCLNLQDSCKTNYICRSRLADFFTNCQPESRSVSSCLKENYADCLLAYSGLIGTVMTPNYIDSSSLSVAPWCDCSNSGNDLEECLKFLNFFKDNTCLKNAIQAFGNGSDVTVWQPAFPVQTTTATTTTALRVKNKPLGPAGSENEIPTHVLPPCANLQAQKLKSNVSGNTHLCISNGNYEKEGLGASSHITTKSMAAPPSCGLSPLLVLVVTALSTLLSLTETS

SEQ ID NO: 49648 - protein, 1272 aa, Homo sapiens
MVLDIEDLDNIQTPESVLLSAVSGEDTQDRTDRLLLTPWVKFLWESYRQCLDLLRNNSRVERLYHDIAQQAFKFCLQYTRKAEFRKLCDNLRMHLSQIQRHHNQSTAINLNNPESQSMHLETRLVQLDSAISMELWQEAFKAVEDIHGLFSLSKKPPKPQLMANYYNKVSTVFWKSGNALFHASTLHRLYHLSREMRKNLTQDEMQRMSTRVLLATLSIPITPERTDIARLLDMDGIIVEKQRRLATLLGLQAPPTRIGLINDMVRFNVLQYVVPEVKDLYNWLEVEFNPLKLCERVTKVLNWVREQPEKEPELQQYVPQLQNNTILRLLQQVSQIYQSIEFSRLTSLVPFVDAFQLERAIVDAARHCDLQVRIDHTSRTLSFGSDLNYATREDAPIGPHLQSMPSEQIRNQLTAMSSVLAKALEVIKPAHILQEKEEQHQLAVTAYLKNSRKEHQRILARRQTIEERKERLESLNIQREKEELEQREAELQKVRKAEEERLRQEAKEREKERILQEHEQIKKKTVRERLEQIKKTELGAKAFKDIDIEDLEELDPDFIMAKQVEQLEKEKKELQERLKNQEKKIDYFERAKRLEEIPLIKSAYEEQRIKDMDLWEQQEEERITTMQLEREKALEHKNRMSRMLEDRDLFVMRLKAARQSVYEEKLKQFEERLAEERHNRLEERKRQRKEERRITYYREKEEEEQRRAEEQMLKEREERERAERAKREEELREYQERVKKLEEVERKKRQRELEIEERERRREEERRLGDSSLSRKDSRWGDRDSEGTWRKGPEADSEWRRGPPEKEWRRGEGRDEDRSHRRDEERPRRLGDDEDREPSLRPDDDRVPRRGMDDDRGPRRGPEEDRFSRRGADDDRPSWRNTDDDRPPRRIADEDRGNWRHADDDRPPRRGLDEDRGSWRTADEDRGPRRGMDDDRGPRRGGADDERSSWRNADDDRGPRRGLDDDRGPRRGMDDDRGPRRGMDDDRGPRRGMDDDRGPRRGLDDDRGPWRNADDDRIPRRGAEDDRGPWRNMDDDRLSRRADDDRFPRRGDDSRPGPWRPLVKPGGWREKEKAREESWGPPRESRPSEEREWDREKERDRDNQDREENDKDPERERDRERDVDREDRFRRPRDEGGWRRGPAEESSSWRDSSRRDDRDRDDRRRERDDRRDLRERRDLRDDRDRRGPPLRSEREEVSSWRRADDRKDDRVEERDPPRRVPPPALSRDRERDRDREREGEKEKASWRAEKDRESLRRTKNETDEDGWTTVRR

SEQ ID NO: 49649 - protein, 19 aa, Homo sapiens
MLGVGLIALTKDRGAVGNV

SEQ ID NO: 49650 - protein, 123 aa, Homo sapiens
MEPQDLELELCKKHHFGINKPEKIIPSPDDSKFLLKTFTHIKSNVSAPNKKKVKESKEKEKLERRLLEELLKMFMDSESFYYSLTYDLTNSVQRQSTGERDGRPLWQKVPLTARRAGFALGKK

SEQ ID NO: 49651 - protein, 807 aa, Homo sapiens
MATLSLARPSFSLVEDTTLEPEEPPTKYQISQPEVYVAAPGESLEVRCLLKDAAVISWTKDGVHLGPNNRTVLIGEYLQIKGATPRDSGLYACTASRTVDSETWYFMVNVTDAISSGDDEDDTDGAEDFVSENSNNKRAPYWTNTEKMEKRLHAVPAANTVKFRCPAGGNPMPTMRWLKNGKEFKQEHRIGGYKVRNQHWSLIMESVVPSDKGNYTCVVENEYGSINHTYHLDVVERSPHRPILQAGLPANASTVVGGDVEFVCKVYSDAQPHIQWIKHVEKNGSKYGPDGLPYLKVLKAAGVNTTDKEIEVLYIRNVTFEDAGEYTCLAGNSIGISFHSAWLTVLPAPGREKEITASPDYLEIAIYCIGVFLIACMVVTVILCRMKNTTKKPDFSSQPAVHKLTKRIPLRRQVTVSAESSSSMNSNTPLVRITTRLSSTADTPMLAGVSEYELPEDPKWEFPRDKLTLGKPLGEGCFGQVVMAEAVGIDKDKPKEAVTVAVKMLKDDATEKDLSDLVSEMEMMKMIGKHKNIINLLGACTQDGPLYVIVEYASKGNLREYLRARRPPGMEYSYDINRVPEEQMTFKDLVSCTYQLARGMEYLASQKCIHRDLAARNVLVTENNVMKIADFGLARDINNIDYYKKTTNGRLPVKWMAPEALFDRVYTHQSDVWSFGVLMWEIFTLGGSPYPGIPVEELFKLLKEGHRMDKPANCTNELYMMMRDCWHAVPSQRPTFKQLVEDLDRILTLTTNEEYLDLSQPLEQYSPSYPDTRSSCSSGDDSVFSPDPMPYEPCLPQYPHINGSVKT

SEQ ID NO: 49652 - protein, 718 aa, Homo sapiens
MATLSLARPSFSLVEDTTLEPEDAISSGDDEDDTDGAEDFVSENSNNKRAPYWTNTEKMEKRLHAVPAANTVKFRCPAGGNPMPTMRWLKNGKEFKQEHRIGGYKVRNQHWSLIMESVVPSDKGNYTCVVENEYGSINHTYHLDVVERSPHRPILQAGLPANASTVVGGDVEFVCKVYSDAQPHIQWIKHVEKNGSKYGPDGLPYLKVLKAAGVNTTDKEIEVLYIRNVTFEDAGEYTCLAGNSIGISFHSAWLTVLPAPGREKEITASPDYLEIAIYCIGVFLIACMVVTVILCRMKNTTKKPDFSSQPAVHKLTKRIPLRRQVTVSAESSSSMNSNTPLVRITTRLSSTADTPMLAGVSEYELPEDPKWEFPRDKLTLGKPLGEGCFGQVVMAEAVGIDKDKPKEAVTVAVKMLKDDATEKDLSDLVSEMEMMKMIGKHKNIINLLGACTQDGPLYVIVEYASKGNLREYLRARRPPGMEYSYDINRVPEEQMTFKDLVSCTYQLARGMEYLASQKCIHRDLAARNVLVTENNVMKIADFGLARDINNIDYYKKTTNGRLPVKWMAPEALFDRVYTHQSDVWSFGVLMWEIFTLGGSPYPGIPVEELFKLLKEGHRMDKPANCTNELYMMMRDCWHAVPSQRPTFKQLVEDLDRILTLTTNEEYLDLSQPLEQYSPSYPDTRSSCSSGDDSVFSPDPMPYEPCLPQYPHINGSVKT

SEQ ID NO: 49653 - protein, 971 aa, Homo sapiens
MYSSPVADDIIQPAAPADLESPTLAASSYHGDVVGQVSTDLIAQRSSDSEEAFETPESTTPVKAPPAPPPPPPEVIPEPEVSTQPPPEEPGCGSETVPVPDGPRSDSVEGSPFRPPSHSFSAVFDEDKPIASSGTYNLDFDNIELVDTFQTLEPRASDAKNQEGKVNTRRKSTDSVPISKSTLSRSLSLQASDFDGASSSGNPEAVALAPDAYSTGSSSASSTLKRTKKPRPPSLKKKQTTKKPTETPPVKETQQEPDEESLVPSGENLASETKTESAKTEGPSPALLEETPLEPAVGPKAACPLDSESAEGVVPPASGGGRVQNSPPVGRKTLPLTTAPEAGEVTPSDSGGQEDSPAKGLSVRLEFDYSEDKSSWDNQQENPPPTKKIGKKPVAKMPLRRPKMKKTPEKLDNTPASPPRSPAEPNDIPIAKGTYTFDIDKWDDPNFNPFSSTSKMQESPKLPQQSYNFDPDTCDESVDPFKTSSKTPSSPSKSPASFEIPASAMEANGVDGDGLNKPAKKKKTPLKTDTFRVKKSPKRSPLSDPPSQDPTPAATPETPPVISAVVHATDEEKLAVTNQKWTCMTVDLEADKQDYPQPSDLSTFVNETKFSSPTEELDYRNSYEIEYMEKIGSSLPQDDDAPKKQALYLMFDTSQESPVKSSPVRMSESPTPCSGSSFEETEALVNTAAKNQHPVPRGLAPNQESHLQVPEKSSQKELEAMGLGTPSEAIEIREAAHPTDVSISKTALYSRIGTAEVEKPAGLLFQQPDLDSALQIARAEIITKEREVSEWKDKYEESRREVMEMRKIVAEYEKTIAQMIEDEQREKSVSHQTVQQLVLEKEQALADLNSVEKSLADLFRRYEKMKEVLEGFRKNEEVLKRCAQEYLSRVKKEEQRYQALKVHAEEKLDRANAEIAQVRGKAQQEQAAHQASLRKEQLRVDALERTLEQKNKEIEELTKICDELIAKMGKS

SEQ ID NO: 49654 - protein, 69 aa, Homo sapiens
MRTDVVDFLMETFIMFKNLIGKNVYPFDWVIMNMVQNNQLHDISSITTAGGWRKAAVHDYLLFCGQPFP

SEQ ID NO: 49655 - protein, 615 aa, Homo sapiens
MPNGILEEQEQQRVMLLSRSPSGPKKYFPIPVEHLEEEIRIRSADDCKQFREEFNSLPSGHIQGTFELANKEENREKNRYPNILPNDHSRVILSQLDGIPCSDYINASYIDGYKEKNKFIAAQGPKQETVNDFWRMVWEQKSATIVMLTNLKERKEEKCHQYWPDQGCWTYGNIRVCVEDCVVLVDYTIRKFCIQPQLPDGCKAPRLVSQLHFTSWPDFGVPFTPIGMLKFLKKVKTLNPVHAGPIVVHCSAGVGRTGTFIVIDAMMAMMHAEQKVDVFEFVSRIRNQRPQMVQTDMQYTFIYQALLEYYLYGDTELDVSSLEKHLQTMHGTTTHFDKIGLEEEFRKLTNVRIMKENMRTGNLPANMKKARVIQIIPYDFNRVILSMKRGQEYTDYINASFIDGYRQKDYFIATQGPLAHTVEDFWRMIWEWKSHTIVMLTEVQEREQDKCYQYWPTEGSVTHGEITIEIKNDTLSEAISIRDFLVTLNQPQARQEEQVRVVRQFHFHGWPEIGIPAEGKGMIDLIAAVQKQQQQTGNHPITVHCSAGAGRTGTFIALSNILERVKAEGLLDVFQAVKSLRLQRPHMVQTLEQYEFCYKVVQDFIDIFSDYANFK

SEQ ID NO: 49656 - protein, 186 aa, Homo sapiens [sequence omitted]

SEQ ID NO: 49657 - protein, 414 aa, Homo sapiens
MHGYKAVKEALLDYKDEFSGRGDLPAFHAHRDRGIIFNNGPTWKDIRRFSLTTLRNYGMGKQGNESRIQREAHFLLEALRKTQGQPFDPTFLIGCAPCNVIADILFRKHFDYNDEKFLRLMYLFNENFHLLSTPWLQLYNNFPSFLHYLPGSHRKVIKNVAEVKEYVSERVKEHHQSLDPNCPRDLTDCLLVEMEKEKHSAERLYTMDGITVTVADLFFAGTETTSTTLRYGLLILMKYPEIEEKLHEEIDRVIGPSRIPAIKDRQEMPYMDAVVHEIQRFITLVPSNLPHEATRDTIFRGYLIPKGTVVVPTLDSVLYDNQEFPDPEKFKPEHFLNENGKFKYSDYFKPFSTGKRVCAGEGLARMELFLLLCAILQHFNLKPLVDPKDIDLSPIHIGFGCIPPRYKLCVIPRS

SEQ ID NO: 49658 - protein, 139 aa, Homo sapiens
MEFVDVTESNARWVQDFRLKAYASPAKLESIDGARYHALLIPSCPGALTDLASSGSLARILQHFHSESKPICAVGHGVAALCCATNEDRSWVFDSYSLTGPSVCELVRAPGFARLPLVVEDFVKDSGACFSDPDRLTYC

SEQ ID NO: 49659 - protein, 215 aa, Homo sapiens [sequence omitted]

SEQ ID NO: 49660 - protein, 204 aa, Homo sapiens
MLSELVQEYDEPILKHLQDIKVKFSDPGQPMSFVLEFHFEPNDYFTNSVLTKTYKMKSEPDKADPFSFEGPEIVDCDGCTIDWKKGKNVTVKTIKKKQKHKGRGTVRTITKQVPNESFFNFFNPLKASGDGESLDEDSEFTLASDFEIGHFFRERIVPRAVLYFTGEAIEDDDNFEEGEEGEEEELEGDEEGEDEDDAEINPKV

SEQ ID NO: 49661 - protein, 9 aa, Homo sapiens
MCSHRSQVL

SEQ ID NO: 49662 - protein, 835 aa, Homo sapiens
MNWLSRLASRGPGHRIPQGANLQTPVMADPETCLMVFKNHWSQVVRILERQGPRAAPGGADDLSAVRNHTYQMLTLLAEDRAVPSAPTGPGPLLEFALHEDLLTRVLTWQLQWDELGDGVEERRAEQLKLFEMLVSEARQPLLRHGPVREALLTLLDACGRPVPSSPALDEGLVLLLSQLCVCVAQEPSLLEFFLQPPPEPGAAPRLLLFSRLVPFVHREGTLGQQARDALLLLMALSAGSPTVGRYIADHSYFCPVLATGLSALYSSLPRKIEVPGDDWHCLRREDWLGVPALALFMSSLEFCNAVIQVAHPLVQKQLVDYIHNGFLVPVMGPALHKTSVEEMIASTAYLELFLRSISEPALLRTFLRFLLLHRHDTHTILDTLVARIGSNSRLCMVSLSLFRTLLNLSCEDVLLQLVLRYLVPCNHVMLSQKPAVRDVDLYGRAADKFLSLIPRCCRHHAPSPPRPEHASWARGPGSPSVDSSSVTTVPRPSTPSRLALFLRQQSLGGSESPGPAPCSPGLSASPASSPGRRPTPAEEPGELEDNYLEYLREARRGVDRCVRACRTWSAPYDGERPSPEPSPFGSRTKKRSLLPEEDRNNVGEGEEEELGRRGRAGGAGEGPGHLPPPQLNGVPGSWPEGAKKVRLVPKEGAGELLEGISEGMAGLEGFGQELRELEVALSNGGTGSESPLEPPLPLEEEEAYESFTCPPEPPGPFLSSPLRTLNQLPSQPFTGKLLSLGLPFCVLFACSRHVCAGFLDLLAMSFLCTCLAPHPSCLHHFQIRVMSYLCPCVCLYVFHACAGLSIDLHLSLVCMSYVHVPPLSLVWPFPAICN

SEQ ID NO: 49663 - protein, 648 aa, Homo sapiens
MEAMQQAPDGAHDPEDPHPLSVVAGRPLSCPNHEGKTMEFYCEACETAMCGECRAGEHREHHKAALQRQLEAVRGRLPQLSAAIALVGGISQQLQERKAEALAQISAAFEDLEQALQQRKQALVSDLETICGAKQKVLQSQLDTLRQGQEHIGSSCSFAEQALRLGSAPEVLLVRKHMRERLAALAAQAFPERPHENAQLELVLEVDGLRRSVLNLGALLTTSATAHETVATGEGLRQALVGQPASLTVTTKDKDGRLVRTGSAELRAEITGPDGTRLPVPVVDHKNGTYELVYTARTEGELLLSVLLYGQPVRGSPFRVRALRPGDLPPSPDDVKRRVKSPGGPGSHVRQKAVRRPSSMYSTGGKRKDNPIEDELVFRVGSRGREKGEFTNLQGVSAASSGRIVVADSNNQCIQVFSNEGQFKFRFGVRGRSPGQLQRPTGVAVDTNGDIIVADYDNRWVSIFSPEGKFKTKIGAGRLMGPKGVAVDRNGHIIVVDNKSCCVFTFQPNGKLVGRFGGRGATDRHFAGPHFVAVNNKNEIVVTDFHNHSVKVYSADGEFLFKFGSHGEGNGQFNAPTGVAVDSNGNIIVADWGNSRIQVFDSSGSFLSYINTSAEPLYGPQGLALTSDGHVVVADAGNHCFKAYRYLQ

SEQ ID NO: 49664 - protein, 509 aa, Homo sapiens
MTADPRKGRMGLQACLLGLFALILSGKCSYSPEPDQRRTLPPGWVSLGRADPEEELSLTFALRQQNVERLSELVQAVSDPSSPQYGKYLTLENVADLVRPSPLTLHTVQKWLLAAGAQKCHSVITQDFLTCWLSIRQAELLLPGAEFHHYVGGPTETHVVRSPHPYQLPQALAPHVDFVGGLHRFPPTSSLRQRPEPQVTGTVGLHLGVTPSVIRKRYNLTSQDVGSGTSNNSQACAQFLEQYFHDSDLAQFMRLFGGNFAHQASVARVVGQQGRGRAGIEASLDVQYLMSAGANISTWVYSSPGDSGAGCWSVSGRHQFRPTFPASSPYVTTVGGTSFQEPFLITNEIVDYISGGGFSNVFPRPSYQEEAVTKFLSSSPHLPPSSYFNASGRAYPDVAALSDGYWVVSNRVPIPWVSGTSASTPVFGGILSLINEHRILSGRPPLGFLNPRLYQQHGAGLFDVTRGCHESCLDEEVEGQGFCSGPGWDPVTGWGTPNFPALLKTLLNP

SEQ ID NO: 49665 - protein, 225 aa, Homo sapiens [sequence omitted]

SEQ ID NO: 49666 - protein, 1188 aa, Homo sapiens [sequence omitted]

SEQ ID NO: 49667 - protein, 1142 aa, Homo sapiens
MPKGLAFKTQADPREPQFHAFIITREDGSRTFGFALTFYEEVTSKQICSAMQTLYHMHNAEYDVLHAPPADDRDQSSMEDGEDTPVTKLQRFNSYDISRDTLYVSKCICLITPMSFMKACRSVLEQLHQAVTSPQPPPLPLESYIYNVLYEVPLPPPGRSLKFSGVYGPIICQRPSTNELPLFDFPVKEVFELLGVENVFQLFTCALLEFQILLYSQHYQRLMTVAETITALMFPFQWQHVYVPILPASLLHFLDAPVPYLMGLHSNGLDDRSKLELPQEANLCFVDIDNHFIELPEDLPQFPNKLEFVQEVSEILMAFGIPPEGNLHCSESASKLKRLRASELVSDKRNGNIAGSPLHSYELLKENETIARLQALVKRTGVSLEKLEVREDPSSNKDLKVQCDEEELRIYQLNIQIREVFANRFTQMFADYEVFVIQPSQDKESWFTNREQMQNFDKASFLSDQPEPYLPFLSRFLETQMFASFIDNKIMCHDDDDKDPVLRVFDSRVDKIRLLNVRTPTLRTSMYQKCTTVDEAEKAIELRLAKIDHTAIHPHLLDMKIGQGKYEPGFFPKLQSDVLSTGPASNKWTKRNAPAQWRRKDRQKQHTEHLRLDNDQREKYIQEARTMGSTIRQPKLSNLSPSVIAQTNWKFVEGLLKECRNKTKRMLVEKMGREAVELGHGEVNITGVEENTLIASLCDLLERIWSHGLQVKQGKSALWSHLLHYQDNRQRKLTSGSLSTSGILLDSERRKSDASSLMPPLRISLIQDMRHIQNIGEIKTDVGKARAWVRLSMEKKLLSRHLKQLLSDHELTKKLYKRYAFLRCDDEKEQFLYHLLSFNAVDYFCFTNVFTTILIPYHILIVPSKKLGGSMFTANPWICISGELGETQIMQIPRNVLEMTFECQNLGKLTTVQIGHDNSGLYAKWLVEYVMVRNEITGHTYKFPCGRWLGKGMDDGSLERILVGELLTSQPEVDERPCRTPPLQQSPSVIRRLVTISPNNKPKLNTGQIQESIGEAVNGIVKHFHKPEKERGSLTLLLCGECGLVSALEQAFQHGFKSPRLFKNVFIWDFLEKAQTYYETLEKNEVVPEENWHTRARNFCRFVTAINNTPRNIGKDEITSYTTGLPCWLTAPSLHTCMRMWH

SEQ ID NO: 49668 - protein, 722 aa, Homo sapiens
MAPRVLQQTLNYINQGVSHALTWKNLKPHIQGIIQDVIFPLMCYTDADEELWQEDPYEYIRMKFDVFEDFISPTTAAQTLLFTACSKRKEVLQKTMGFCYQILTEPNADPRKKDGALHMIGSLAEILLKKKIYKDQMEYMLQNHVFPLFSSELGYMRARACWVLHYFCEVKFKSDQNLQTALELTRRCLIDDREMPVKVEAAIALQVLISNQEKAKEYITPFIRPVMQALLHIIRETENDDLTNVIQKMICEYSEEVTPIAVEMTQHLAMTFNQVIQTGPDEEGSDDKAVTAMGILNTIDTLLSVVEDHKEITQQLEGICLQVIGTVLQQHVLEFYEEIFSLAHSLTCQQVSPQMWQLLPLVFEVFQQDGFDYFTDMMPLLHNYVTVDTDTLLSDTKYLEMIYSMCKKVLTGVAGEDAECHAAKLLEVIILQCKGRGIDQCIPLFVEAALERLTREVKTSELRTMCLQVAIAALYYNPHLLLNTLENLRFPNNVEPVTNHFITQWLNDVDCFLGLHDRKMCVLGLCALIDMEQIPQVLNQVSGQILPAFILLFNGLKRAYACHAEHENDSDDDDEAEDDDETEELGSDEDDIDEDGQEYLEILAKQAGEDGDDEDWEEDDAEETALEGYSTIIDDEDNPVDEYQIFKAIFQTIQNRNPVWYQALTHGLNEEQRKQLQDIATLADQRRAAHESKMIEKHGGYKFSAPVVPSSFNFGGPAPGMN

SEQ ID NO: 49669 - protein, 612 aa, Homo sapiens
MRTVGPRLDHERAKSLMDQYFARMCSLMLSKELPARIRFLLQDTVELREHHWVPRKAFLDNGPKTINQIRQDAVKDLGVFIPAPMAQGMRSDFFLEGPFMPPRMKMDRDPLGGLADMFGQMPGSGIGTGPGVIQDRFSPTMGRHRSNQLFNGHGGHIMPPTQSQFGEMGGKFMKSQISLRPAQSFLMNKNQVPKLQPQITMIPPSAQPPRTQTPPLGQTPQLGLKTNPPLIQEKPAKTSKKPPPSKEELLKLTETVVTEYLNSGNANEAVNGVREMRAPKHFLPEMLSKVIILSLDRSDEDKEKASSLISLLKQEGIATSDNFMQAFLNVLDQCPKLEVDIPLVKSYLAQFAARAIISELVSISELAQPLESGTHFPLFLLCLQQLAKLQDREWLTELFQQSKVNMQKMLPEIDQNKDRMLEILEGKGLSFLFPLLKLEKELLKQIKLDPSPQTIYKWIKDNISPKLHVDKGFVNILMTSFLQYISSEVNPPSDETDSSSAPSKEQLEQEKQLLLSFKPVMQKFLHDHVDLQVSALYALQVHCYNSNFPKGMLLRFFVHFYDMEIIEEEAFLAWKEDITQEFPGKGKALFQVNQWLTWLETAEEEESEEEAD

SEQ ID NO: 49670 - protein, 139 aa, Homo sapiens
MGAGKKEHTGRLVIGDHKSTSHFRTGEEDKKINEELESQYQQSMDSKLSGRYRRHCGLGFSEVEDHDGEGDVAGDDDDDDDDSPDPESPDDSESDSESEKEESAEELQAAEHPDEVEDPKNKKDAKSNYKMMFVKSSGS

SEQ ID NO: 49671 - protein, 158 aa, Homo sapiens
MEFDCEGLRRLLGKYKFRDLTVEELRNVNVFFPHFKYSMDTYVFKDSSQKDLLNFTGTIPVMYQGNTYNIPIRFWILDSHPFAPPICFLKPTANMGILVGKHVDAQGRIYLPYLQNWSHVRSIWIFYRKLFFFFKYLSLILLVQISMILHFLSMIFFM

SEQ ID NO: 49672 - protein, 699 aa, Homo sapiens
MVSRLAKNRYTWHGRHNLNKTLGTLKSIGEENKYAEQIMMIKKKEYEQEFDFIKSYSIEDHIIKSNTGPNGHPDMCFVELPGVEFRAASVNSRKDKSLRVMSQKFVMLFLVSTPQIVSLEVAAKILIGEDHVEDLDKSKFKTKIRRLYDIANVLSSLDLIKKVHVTEERGRKPAFKWTGPEISPNTSGSSPVIHFTPSDLEVRRSSKENCAKNLFSTRGKPNFTRHPSLIKLVKSIESDRRKINSAPSSPIKTNKAESSQNSAPFPSKMAQLAAICKMQLEEQSSESRQKVKVQLARSGPCKPVAPLDPPVNAEMELTAPSLIQPLGMVPLIPSPLSSAVPLILPQAPSGPSYAIYLQPTQAHQSVTPPQGLSPTVCTTHSSKATGSKDSTDATTEKAANDTSKASASTRPGSLLPAPERQGAKSRTREPAGERGSKRASMLEDSGSKKKFKEDLKGLENVSATLFPSGYLIPLTQCSSLGAESILSGKENSSALSPNHRIYSSPIAGVIPVTSSELTAVNFPSFHVTPLKLMVSPTSVAAVPVGNSPALASSHPVPIQNPSSAIVNFTLQHLGLISPNVQLSASPGSGIVPVSPRIESVNVAPENAGTQQGRATNYDSPVPGQSQPNGQSVAVTGAQQPVPVTPKGSQLVAESFFRTPGGPTKPTSSSCMDFEGANKTSLGTLFVPQRKLEVSTEDVH

SEQ ID NO: 49673 - protein, 181 aa, Homo sapiens
MQNKSVFILGASGETGRVLLKEILEQGLFSKVTLIGRRKLTFDEEAYKNVNQEVVDFEKLDDYASAFQGHDVGFCCLGTTRGKAGAGEVEAKVEELKFDRYSVFRPGVLLCDRQESRPGEWLVRKFFGSLPDSWASGHSVPVVTVVRAMLNNVVRPRDKQMELLENKAIHDLGKAHGSLKP

SEQ ID NO: 49674 - protein, 104 aa, Homo sapiens
MVVFVSVRRLDANHITSVPEDSFEGLVQLRHLWLDDNSLTEVPVHPLSNLPTLQALTLALNKISSIPDFAFTNLSSLVVLHLHNNKIRSLSQHCFDGLDNLETL

SEQ ID NO: 49675 - protein, 170 aa, Homo sapiens
MFVCDINEKDISGPSPSKKLKKSQCTPLFMNAYTMRGAGAVIHTHSKAAVMATLLFPGREFKITHQEMIKGIKKCTSGGYYRYDDMLVVPIIENTPEEKDLKDRMAHAMNEYPDSCAVLVRRHGVYVWGETWEKAKTMCECYDYLFDIAVSMKKVGLDPSQLPVGENGIV

SEQ ID NO: 49676 - protein, 296 aa, Homo sapiens
MEKALSIGFETCRYGFIEGHVVIPRIHPNSICAANNTGVYILTSNTSQYDTYCFNASAPPEEDCTSVTDLPNAFDGPITITIVNRDGTRYVQKGEYRTNPEDIYPSNPTDDDVSSGSSSERSSTSGGYIFYTFSTVHPIPDEDSPWITDSTDRIPATRDQDTFHPSGGSHTTHGSESDGHSHGSQEGGANTTSGPIRTPQIPEWLIILASLLALALILAVCIAVNSRRRCGQKKKLVINSGNGAVEDRKPSGLNGEASKSQEMVHLVNKESSETPDQFMTADETRNLQNVDMKIGV

SEQ ID NO: 49677 - protein, 275 aa, Homo sapiens
MEKALSIGFETCRYGFIEGHVVIPRIHPNSICAANNTGVYILTSNTSQYDTYCFNASAPPEEDCTSVTDLPNAFDGPITITIVNRDGTRYVQKGEYRTNPEDIYPSNPTDDDVSSGSSSERSSTSGGYIFYTFSTVHPIPDEDSPWITDSTDRIPATRHSHGSQEGGANTTSGPIRTPQIPEWLIILASLLALALILAVCIAVNSRRRCGQKKKLVINSGNGAVEDRKPSGLNGEASKSQEMVHLVNKESSETPDQFMTADETRNLQNVDMKIGV

SEQ ID NO: 49678 - protein, 634 aa, Homo sapiens
MEKALSIGFETCRYGFIEGHVVIPRIHPNSICAANNTGVYILTSNTSQYDTYCFNASAPPEEDCTSVTDLPNAFDGPITITIVNRDGTRYVQKGEYRTNPEDIYPSNPTDDDVSSGSSSERSSTSGGYIFYTFSTVHPIPDEDSPWITDSTDRIPATSTSSNTISAGWEPNEENEDERDRHLSFSGSGIDDDEDFISSTISTTPRAFDHTKQNQDWTQWNPSHSNPEVLLQTTTRMTDVDRNGTTAYEGNWNPEAHPPLIHHEHHEEEETPHSTSTIQATPSSTTEETATQKEQWFGNRWHEGYRQTPKEDSHSTTGTAAASAHTSHPMQGRTTPSPEDSSWTDFFNPISHPMGRGHQAGRRMDMDSSHSITLQPTANPNTGLVEDLDRTGPLSMTTQQSNSQSFSTSHEGLEEDKDHPTTSTLTSSNRNDVTGGRRDPNHSEGSTTLLEGYTSHYPHTKESRTFIPVTSAKTGSFGVTAVTVGDSNSNVNRSLSGDQDTFHPSGGSHTTHGSESDGHSHGSQEGGANTTSGPIRTPQIPEWLIILASLLALALILAVCIAVNSRRRCGQKKKLVINSGNGAVEDRKPSGLNGEASKSQEMVHLVNKESSETPDQFMTADETRNLQNVDMKIGV

SEQ ID NO: 49679 - protein, 364 aa, Homo sapiens
MEKALSIGFETCRYGFIEGHVVIPRIHPNSICAANNTGVYILTSNTSQYDTYCFNASAPPEEDCTSVTDLPNAFDGPITITIVNRDGTRYVQKGEYRTNPEDIYPSNPTDDDVSSGSSSERSSTSGGYIFYTFSTVHPIPDEDSPWITDSTDRIPATNRNDVTGGRRDPNHSEGSTTLLEGYTSHYPHTKESRTFIPVTSAKTGSFGVTAVTVGDSNSNVNRSLSGDQDTFHPSGGSHTTHGSESDGHSHGSQEGGANTTSGPIRTPQIPEWLIILASLLALALILAVCIAVNSRRRCGQKKKLVINSGNGAVEDRKPSGLNGEASKSQEMVHLVNKESSETPDQFMTADETRNLQNVDMKIGV

SEQ ID NO: 49680 - protein, 177 aa, Homo sapiens [sequence omitted]

SEQ ID NO: 49681 - protein, 473 aa, Homo sapiens
MEDFSNDLFSSFFDDPVLDEKSPLLDMELDSPTPGIQAEHSYSLSGDSAPQSPLVPIKMEDTTQDAEHGAWALGHKLCSIMVKQEQSPELPVDPLAAPSAMAAAAAMATTPLLGLSPLSRLPIPHQAPGEMTQLPVIKAEPLEVNQFLKVTPEDLVQMPPTPPSSHGSDSDGSQSPRSLPPSSPVRPMARSSTAISTSPLLTAPHKLQGTSGPLLLTEEEKRTLIAEGYPIPTKLPLTKAEEKALKRVRRKIKNKISAQESRRKKKEYVECLEKKVETFTSENNELWKKVETLENANRTLLQQLQKLQTLVTNKISRPYKMAATQTGTCLMVAALCFVLVLGSLVPCLPEFSSGSQTVKEDPLAADGVYTASQMPSRSLLFYDDGAGLWEDGRSTLLPMEPPDGWEINPGGPAEQRPRDHLQHDHLDSTHETTKYLSEAWPKDGGNGTSPDFSHSKEWFHDRDLGPNTTIKLS

SEQ ID NO: 49682 - protein, 114 aa, Homo sapiens
MWLDLELLRRLLSAPSFTKSRPAGSSPRTPTRSPSSLCSRKGTGRPHPWLSLGDRVPDSPQHSRALPCPPAETAPGGPRPLPSSQQGARAEPAVEGSGSRGLYRRRGSAAGKRS

SEQ ID NO: 49683 - protein, 489 aa, Homo sapiens [sequence omitted]

SEQ ID NO: 49684 - protein, 234 aa, Homo sapiens
MKEYHCLLQLLCPDFPLELTQKAARIVLMDDAMDCLMSFSDFLFAFQIQFYYSEFLDSVAAIYEDLLSGKNPNTVIVPTSSSGQHRQRPALGGAGTLEGVEASLFYQCLENLCDRHKYSCPPPALVKEALSNVQRLTFYGFLMALSKHRGINQALGALPDKGDLMHDPAMDEELERLLAQVPGLVNSVTASPEASCLPSRTPPRVGSPWRPLHHSRKVDGESDGSTEETDESET

SEQ ID NO: 49685 - protein, 201 aa, Homo sapiens
MEQAFETCQAAERQRLLFFKDMLLTLHQHLDLSSSEKFHELHRDLHQGIEAASDEEDLRWWRSTHGPGMAMNWPQFEEWSLDTQRTISRKEKGGRSPDEVTLTSIVPTRDGTAPPPQSPGSPGTGQDEEWSDEESPRKAATGVRVRALYDYAGQEADELSFRAGEELLKMSEEDEQGWCQGQLQSGRIGLYPANYVECVGA

SEQ ID NO: 49686 - protein, 487 aa, Homo sapiens
MNGTLDHPDQPDLDAIKMFVGQVPRTWSEKDLRELFEQYGAVYEINVLRDRSQNPPQSKGCCFVTFYTRKAALEAQNALHNMKVLPGMHHPIQMKPADSEKNNAVEDRKLFIGMISKKCTENDIRVMFSSFGQIEECRILRGPDGLSRGCAFVTFTTRAMAQTAIKAMHQAQTMEGCSSPMVVKFADTQKDKEQKRMAQQLQQQMQQISAASVWGNLAGLNTLGPQYLALYLQLLQQTASSGNLNTLSSLHPMGGLNAMQLQNLAALAAAASAAQNTPSGTNALTTSSSPLSVLTSSAGSSPSSSSSNSVNPIASLGALQTLAGATAGLNVGSLAGMAALNGGLGSSGLSNGTGSTMEALTQAYSGIQQYAAAALPTLYNQNLLTQQSIGAAGSQKEGPEGANLFIYHLPQEFGDQDLLQMFMPFGNVVSAKVFIDKQTNLSKCFGFVSYDNPVSAQAAIQSMNGFQIGMKRLKVQLKRSKNDSKPY

SEQ ID NO: 49687 - protein, 141 aa, Homo sapiens
MAPRGKRLSSTPLEILFFLNGWYNATYFLLELFIFLYKGVLLPYPTANLVLDVVMLLLYLGIEVIRLFFGTKGNLCQRKMPLSISVALTFPSAMMASYYLLLQTYVLRLEAIMNGILLFFCGSELLLEVLTLAAFSSMDRI

SEQ ID NO: 49688 - protein, 226 aa, Homo sapiens
MGSTFNISLNKEEMEFQPNQEDEEDAHAGIIGRFLGLQSHDHHPPRANSRTKLLWPKRESLLHEGLPKNHKAAKQNVRGQEDNKAWKLKAVDAFKSAPLYQRPGYYSAPQTPLSPTPMFFPLEPSAPSKLHSVTGIDTKDKSLKTVSSGAKKSFELLSESDGALMEHPEVSQVRRKTVEFNLTDMPEIPENHLKEPLEQSPTNIHTTLKDHMDPYWALENRDEAHS

SEQ ID NO: 49689 - protein, 616 aa, Homo sapiens
MKVLNHPNIVKLFEVIETEKTLYLVMEYASGGEVFDYLVAHGRMKEKEARAKFRQIVSAVQYCHQKFIVHRDLKAENLLLDADMNIKIADFGFSNEFTFGNKLDTFCGSPPYAAPELFQGKKYDGPEVDVWSLGVILYTLVSGSLPFDGQNLKELRERVLRGKYRIPFYMSTDCENLLKKFLILNPSKRGTLEQIMKDRWMNVGHEDDELKPYVEPLPDYKDPRRTELMVSMGYTREEIQDSLVGQRYNEVMATYLLLGYKSSELEGDTITLKPRPSADLTNSSAPSPSHKVQRSVSANPKQRRFSDQAAGPAIPTSNSYSKKTQSNNAENKRPEEDRESGRKASSTAKVPASPLPGLERKKTTPTPSTNSVLSTSTNRSRNSPLLERASLGQASIQNGKDSTAPQRVPVASPSAHNISSSGGAPDRTNFPRGVSSRSTFHAGQLRQVRDQQNLPYGVTPASPSGHSQGRRGASGSIFSKFTSKFVRRNLSFRFARRPHVVGSGGNDKEKEEFREAKPRSLRFTWSMKTTSSMEPNEMMREIRKVLDANSCQSELHEKYMLLCMHGTPGHEDFVQWEMEVCKLPRLSLNGVRFKRISGTSMAFKNIASKIANELKL

SEQ ID NO: 49690 - protein, 685 aa, Homo sapiens
MKVLNHPNIVKLFEVIETEKTLYLVMEYASGGEVFDYLVAHGRMKEKEARAKFRQIVSAVQYCHQKFIVHRDLKAENLLLDADMNIKIADFGFSNEFTFGNKLDTFCGSPPYAAPELFQGKKYDGPEVDVWSLGVILYTLVSGSLPFDGQNLKELRERVLRGKYRIPFYMSTDCENLLKKFLILNPSKRGTLEQIMKDRWMNVGHEDDELKPYVEPLPDYKDPRRTELMVSMGYTREEIQDSLVGQRYNEVMATYLLLGYKSSELEGDTITLKPRPSADLTNSSAPSPSHKVQRSVSANPKQRRFSDQAAGPAIPTSNSYSKKTQSNNAENKRPEEDRESGRKASSTAKVPASPLPGLERKKTTPTPSTNSVLSTSTNRSRNSPLLERASLGQASIQNGKDSLTMPGSRASTASASAAVSAARPRQHQKSMSASVHPNKASGLPPTESNCEVPRPSTAPQRVPVASPSAHNISSSGGAPDRTNFPRGVSSRSTFHAGQLRQVRDQQNLPYGVTPASPSGHSQGRRGASGSIFSKFTSKFVRRNLSFRFARRNLNEPESKDRVETLRPHVVGSGGNDKEKEEFREAKPRSLRFTWSMKTTSSMEPNEMMREIRKVLDANSCQSELHEKYMLLCMHGTPGHEDFVQWEMEVCKLPRLSLNGVRFKRISGTSMAFKNIASKIANELKL

SEQ ID NO: 49691 - protein, 372 aa, Homo sapiens [sequence omitted]

SEQ ID NO: 49692 - protein, 37 aa, Homo sapiens
MWAELCPSAKGAIILYNRVQGSPTGAALGSPALLPPL

SEQ ID NO: 49693 - protein, 212 aa, Homo sapiens
MPDPAGPDGHLPAVATLCDLFDREIVVTISWAKSIPGFSSLSLSDQMSVLQSVWMEVLVLGVAQRSLPLQDELAFAEDLVLDEEGARAAGLGELGAALLQLVRRLQALRLEREEYVLLKALALANSDSVHIEDAEAVEQLREALHEALLEYEAGRAGPGGGAERRRAGRLLLTLPLLRQTAGKVLAHFYGVKLEGKVPMHKLFLEMLEAMMD

SEQ ID NO: 49694 - protein, 383 aa, Homo sapiens
MRCDRKMEVAFMVCAINPSIDLHTDSLELLQLQQKLLWLLYDLGHLERYPMALGNLADLEELEPTPGRPDPLTLYHKGIASAKTYYRDEHIYPYMYLAGYHCRNRNVREALQAWADTATVIQDYNYCREDEEIYKEFFEVANDVIPNLLKEAASLLEAGEERPGEQSQGTQSQGSALQDPECFAHLLRFYDGICKWEEGSPTPVLHVGWATFLVQSLGRFEGQVRQKVRIVSREAEAAEAEEPWGEEAREGRRRGPRRESKPEEPPPPKKPALDKGLGTGQGAVSGPPRKPPGTVAGTARGPEGGSTAQVPAPTASPPPEGPVLTFQSEKMKGMKELLVATKINSSAIKLQLTAQSQVQMKKQKVSTPSDYTLSFLKRQRKGL

SEQ ID NO: 49695 - protein, 425 aa, Homo sapiens
MRCDRKMEVAFMVCAINPSIDLHTDSLELLQLQQKLLWLLYDLGHLERYPMALGNLADLEELEPTPGRPDPLTLYHKGIASAKTYYRDEHIYPYMYLAGYHCRNRNVREALQAWADTATVIQETVSNLQCLTTIIQQWDFHPRPHAPLLILAFFLWADPDSIILHYNYCREDEEIYKEFFEVANDVIPNLLKEAASLLEAGEERPGEQSQGTQSQGSALQDPECFAHLLRFYDGICKWEEGSPTPVLHVGWATFLVQSLGRFEGQVRQKVRIVSREAEAAEAEEPWGEEAREGRRRGPRRESKPEEPPPPKKPALDKGLGTGQGAVSGPPRKPPGTVAGTARGPEGGSTAQVPAPTASPPPEGPVLTFQSEKMKGMKELLVATKINSSAIKLQLTAQSQVQMKKQKVSTPSDYTLSFLKRQRKGL

SEQ ID NO: 49696 - protein, 141 aa, Homo sapiens
MAVAMVKLCERAGLPLLAAPLLRSLLPRAPQPGPAQPRSVQGQRCPARHPPGNLVCERGAGVNGVTAGAGGRLRGLHRGGRALGCSAHRPLHSARVRPPAHLAAPPGSSARGCRLTELGLMHDHKPAAGPGVSAGWATGAL

SEQ ID NO: 49697 - protein, 76 aa, Homo sapiens
MHNIPVYKDITHGNRQMTVIRKVEGDIWALQKDVEDFLSPLLGKTPVTQVNEVTGTLRIKGYFDQELKAWLLEKGF

SEQ ID NO: 49698 - protein, 610 aa, Homo sapiens [sequence omitted]

SEQ ID NO: 49699 - protein, 611 aa, Homo sapiens [sequence omitted]

SEQ ID NO: 49700 - protein, 138 aa, Homo sapiens
MMAASLALTGAVVAHAYYLKHQFYPTVVYLTKSSPSMAVLYIQAFVLVFLLGKVMGKVFFGQLRAAEMEHLLERSWYAVTETCLAFTVFRDDFSPRFVALFTLLLFLKCFHWLAEDRVDFMERSPNISWLFHCRIVCE

SEQ ID NO: 49701 - protein, 1984 aa, Homo sapiens
MVLPPSLMVAGVYCLVVAVIFATIKTVNYRLHAMFDQGEIVEKRSSTMGELEEEPAQGDSNPPRDPGVEMTVFRKVSSTPPVRCSSQHSVFGFNQVSELLPRMEDSGPLRDIKELVREQGSNNVIVTSADREMLKLSSQEKLIGDLPQTPPGAVPDPSLASTDSSEPSPLAGDGAPWSGSSMADTPMSPLLKGSLSQELSKSFLTLTQPDRALVRTSSRREQRRGAGGYQPLDRRGSGEPTPQKAGSSDSCFSGTDRETLSSFKSEKTNSTHLDSPPGGPAPEGSDTDPPSEAELPASPDAGVPSDDTLRSFDTVIGAGTPPGLAEPLLVVRPKDLALLRPSKRQPPLRRHSPPGRAPRRPLLEGGGFFEDEDTSEGSELSPASSLRSQRRYSTDSSSSTSCYSPESSRGAAGGPRKRRAPHGAEEGTAVPPKRPYGTQRTPSTASAKTHARVLSMDGAGGDVLRPPLAGCKAELEAQVGVEQAASEPVVLPAEARRGPAANQPGWRGELQEEGAVGGAAEETGRRDRSSSVRRTQAIRRRHNAGSNPTPPASVMGSPPSSLQEAQRGRAASHSRALTLPSALHFASSLLLTRAGANVHEACTFDDTSEGAVHYFYDESGVRRSYTFGLAGGGYENPVGQQGEQTANGAWDRHSHSSSFHSADVPEATGGLNLLQPRPVVLQGMQVRRVPLEIPEEQTLMEEAPPRAQHSYKYWLLPGRWTSVRYERLALLALLDRTRGVLENIFGVGLSSLVAFLGYLLLLKGFFTDIWVFQFCLVIASCQYSLLKSVQPDAASPMHGHNWVIAYSRPVYFCICCLLIWLLDALGSAQPFPPVSLYGLTLFSASFFFCARDVATVFTLCFPFVFLLGLLPQVNTCLMYLLEQIDMHGFGGTAATSPLTAVFSLSRSLLAAALLYGFCLGAIKTPWPEQHVPVLFSVFCGLLVALSYHLSRQSSDPTVLWSLIRSKLFPELEERSLETARAEPPDPLPDKMRQSVREVLHSDLVMCVVIAVLTFAISASTVFIALKSVLGFVLYALAGAVGFFTHYLLPQLRKQLPWFCLSQPVLKPLEYSQYEVRGAAQVMWFEKLYAGLQCVEKYLIYPAVVLNALTVDAHTVVSHPDKYCFYCRALLMTVAGLKLLRSAFCCPPQQYLTLAFTVLLFHFDYPRLSQGFLLDYFLMSLLCSKLWDLLYKLRFVLTYIAPWQITWGSAFHAFAQPFAVPHSAMLFVQALLSGLFSTPLNPLLGSAVFIMSYARPLKFWERDYNTKRVDHSNTRLVTQLDRNPGADDNNLNSIFYEHLTRSLQHTLCGDLVLGRWGNYGPGDCFVLASDYLNALVHLIEVGNGLVTFQLRGLEFRGTYCQQREVEAITEGVEEDEGCCCCEPGHLPRVLSFNAAFGQRWLAWEVTASKYVLEGYSISDNNAASMLQVFDLRKILITYYVKSIIYYVSRSPKLEVWLSHEGITAALRPVRVPGYADSDPTFSLSVDEDYDLRLSGLSLPSFCAVHLEWIQYCASRRSQPVDQDWNSPLVTLCFGLCVLGRRALGTASHSMSASLEPFLYGLHALFKGDFRITSPRDEWVFADMDLLHRVVAPGVRMALKLHQDHFTSPDEYEEPAALYDAIAANEERLVISHEGDPAWRSAILSNTPSLLALRHVLDDASDEYKIIMLNRRHLSFRVIKVNRECVRGLWAGQQQELVFLRNRNPERGSIQNAKQALRNMINSSCDQPLGYPIYVSPLTTSLAGSHPQLRALWGGPISLGAIAHWLLRTWERLHKGCGAGCNSGGNVDDSDCSGGGGLTSLSNNPPVAHPTPENTAGNGDQPLPPGPGWGPRSSLSGSGDGRPPPLLQWPPPRLPGPPPASPIPTEGPRTSRPPGPGLLSSEGPSGKWSLGGRKGLGGSDGEPASGSPKGGTPKSQAPLDLSLSLSLSLSPDVSTEASPPRASQDIPCLDSSAPESGTPMGALGDWPAPIEERESPAAQPLLEHQY

SEQ ID NO: 49702 - protein, 217 aa, Homo sapiens [sequence omitted]

SEQ ID NO: 49703 - protein, 411 aa, Homo sapiens [sequence omitted]

SEQ ID NO: 49704 - protein, 713 aa, Homo sapiens
MQEKLFKEHVFIYLRMFATDSGFEILPCNRYSSEQNGAKIVATKEWKRNDKIELLVGCIAELSEIEENMLLRHGENDFSVMYSTRKNCAQLWLGPAAFINHDCRPNCKFVSTGRDTACVKALRDIEPGEEISCYYGDGFFGENNEFCECYTCERRGTGAFKSRVGLPAPAPVINSKYGLRETDKRLNRLKKLGDSSKNSDSQSVSSNTDADTTQEKNNATSNRKSSVGVKKNSKSRTLTRQSMSRIPASSNSTSSKLTHINNSRVPKKLKKPAKPLLSKIKLRNHCKRLEQKNASRKLEMGNLVLKEPKVVLYKNLPIKKDKEPEGPAQAAVASGCLTRHAAREHRQNPVRGAHSQGESSPCTYITRRSVRTRTNLKEASDIKLEPNTLNGYKSSVTEPCPDSGEQLQPAPVLQEEELAHETAQKGEAKCHKSDTGMSKKKSRQGKLVKQFAKIEESTPVHDSPGKDDAVPDLMGPHSDQGEHSGTVGVPVSYTDCAPSPVGCSVVTSDSFKTKDSFRTAKSKKKRRITRYDAQLILENNSGIPKLTLRRRHDSSSKTNDQENDGMNSSKISIKLSKDHDNDNNLYVAKLNNGFNSGSGSSSTKLKIQLKRDEENRGSYTEGLHENGVCCSDPLSLLESRMEVDDYSQYEEESTDDSSSSEGDEEEDDYDDDFEDDFIPLPPAKRLRLIVGKDSIDIDISSRRREDQSLRLNA

SEQ ID NO: 49705 - protein, 230 aa, Homo sapiens
MQEKLFKEHVFIYLRMFATDSGFEILPCNRYSSEQNGAKIVATKEWKRNDKIELLVGCIAELSEIEENMLLRHGENDFSVMYSTRKNCAQLWLGPAAFINHDCRPNCKFVSTGRDTACVKALRDIEPGEEISCYYGDGFFGENNEFCECYTCERRGTGAFKSRVGLPAPAPVINSKYGLRETDKRLNRLKKLGDSSKNSDSQSVSSNTDADTTQEKNNAKNPEEKGRCFP

SEQ ID NO: 49706 - protein, 417 aa, Homo sapiens
MWKGLVKRNASVETVDNKTSEDVTMAAASPVTLTKGTSAAHLNSMEVTTEDTSRTDVSEPATSGGAADGVTSIAPTAVASSTTAASITTAASSMTVASSAPTTAASSTTVASIAPTTAASSMTAASSTPMTLALPAPTSTSTGRTPSTTATGHPSLSTALAQVPKSSALPRTATLATLATRAQTVATTANTSSPMSTRPSPSKHMPSDTAASPVPPMRPQAQGPISQVSVDQPVVNTTNKSTPMPSNTTPEPAPTPTVVTTTKAQAREPTASPVPVPHTSPIPEMEAMSPTTQPSPMPYTQRAAGPGTSQAPEQVETEATPGTDSTGPTPRSSGGTKMPATDSCQPSTQGQYMVVTTEPLTQAVVDKTLLLVVLLLGVTLFITVLVLFALQAYESYKKKDYTQVDYLINGMYADSEM

SEQ ID NO: 49707 - protein, 422 aa, Homo sapiens [sequence omitted]

SEQ ID NO: 49708 - protein, 385 aa, Homo sapiens
MDRVDQSAVGFEYQGKTEKHASQKDYSSGFGGKYGVQADRVDKSAVGFDYQGKTEKHESQRDYSKGFGGKYGIDKDKVDKSAVGFEYQGKTEKHESQKDYVKGFGGKFGVQTDRQDKCALGWDHQEKLQLHESQKDYSKGFGGKYGVQKDRMDKNASTFEDVTQVSSAYQKTVPVEAVTSKTSNIRANFENLAKEKEQEDRRKAEAERAQRMAKERQEQEEARRKLEEQARAKTQTPPVSPAPQPTEERLPSSPVYEDAASFKAELSYRGPVSGTEPEPVYSMEAADYREASSQQGLAYATEAVYESAEAPGHYPAEDSTYDEYENDLGITAVALYDYQAAGDDEISFDPDDIITNIEMIDDGWWRGVCKGRYGLFPANYVELRQ

SEQ ID NO: 49709 - protein, 198 aa, Homo sapiens
MHAKHRGHEAMHAEMVLILIATLVVAQLLLVQWKQRHPRSYNMVTLFQMWVVPLYFTVKLHWWRFLVIWILFSAVTAFVTFRATRKPLVQTTPRLVYKWFLLIYKISYATGIVGYMAVMFTLFGLNLLFKIKPEDAMDFGISLLFYGLYYGVLERDFAEMCADYMASTIGRCSASTSSASVAGASWERSKRVPTAKRR

SEQ ID NO: 49710 - protein, 563 aa, Homo sapiens [sequence omitted]

SEQ ID NO: 49711 - protein, 1389 aa, Homo sapiens
MLLPGHRRRILAGLLRAHTSPAPAPRPTPRPVPMKRHIFRSPPVPATPPEPLPTTTEDEGLPAAPPIPPRRSCLPPTCFTTPSTAAPDPVLPPLPAKRHLAELSVPPVPPRTGPPRLLVSLPTKEEESLLPSLSSPPQPQSEEPLSTLPQGPPQPPSPPPCPPEIPPKPVRLFPEFDDSDYDEVPEEGPGAPARVMTKKEEPPPSRVPRAVRVASLLSEGEELSGDDQGDEEEDDHAYEGVPNGGWHTSSLSLSLPSTIAAPHPMDGPPGGSTPVTPVIKAGWLDKNPPQGSYIYQKRWVRLDTDHLRYFDSNKDAYSKRFISVACISHVAAIGDQKFEVITNNRTFAFRAESDVERKEWMQALQQAMAEQRARARLSSAYLLGVPGSEQPDRAGSLELRGFKNKLYVAVVGDKVQLYKNLEEYHLGIGITFIDMSVGNVKEVDRRSFDLTTPYRIFSFSADSELEKEQWLEAMQGAIAEALSTSEVAERIWAAAPNRFCADCGAPQPDWASINLCVVICKRCAGEHRGLGAGVSKVRSLKMDRKVWTETLIELFLQLGNGAGNRFWAANVPPSEALQPSSSPSTRRCHLEAKYREGKYRRYHPLFGNQEELDKALCAAVTTTDLAETQALLGCGAGINCFSGDPEAPTPLALAEQAGQTLQMEFLRNNRTTEVPRLDSMKPLEKHYSVVLPTVSHSGFLYKTASAGKLLQDRRAREEFSRRWCVLGDGVLSYFENERAVTPNGEIRASEIVCLAVPPPDTHGFEHTFEVYTEGERLYLFGLESAEQAHEWVKCIAKAFVPPLAEDLLARDFERLGRLPYKAGLSLQRAQEGWFSLSGSELRAVFPEGPCEEPLQLRKLQELSIQGDSENQVLVLVERRRTLYIQGERRLDFMGWLGAIQKAAASMGDTLSEQQLGDSDIPVIVYRCVDYITQCGLTSEGIYRKCGQTSKTQRLLESLRQDARSVHLKEGEQHVDDVSSALKRFLRDLPDGLFTRAQRLTWLEASEIEDEEEKVSRYRELLVRLPPVNRATVKALISHLYCVQCFSDTNQMNVHNLAIVFGPTLFQTDGQDYKAGRVVEDLINHYVVVFSVDEEELRKQREEITAIVKMRVAGTASGTQHAGDFICTVYLEEKKAETEQHIKVPASMTAEELTLEILDRRNVGIREKDYWTCFEVNEREEAERPLHFAEKVLPILHGLGTDSHLVVKKHQAMEAMLLYLASRVGDTKHGMMKFREDRSLLGLGLPSGGFHDRYFILNSSCLRLYKEVRSHRPEKEWPIKSLKVYLGVKKKLRPPTCWGFTVVHETEKHEKQQWYLCCDTQMELREWFATFLFVQHDGLVWPSEPSRVSRAVPEVRLGSVSLIPLRGSENEMRRSVAAFTADPLSLLRNV

SEQ ID NO: 49712 - protein, 1935 aa, Homo sapiens
MRKLFGGPGSRRPSADSESPGTPSPDGAAWEPPARESRQPPTPPPRTCFPLAGLRSARPLTGPETEGRLRRPQQQQERAQRPADGLHSWHIFSQPQAGARASCSSSSIAASYPVSRSRAASSSEEEEEGPPQLPGAQSPAYHGGHSSGSDDDRDGEGGHRWGGRPGLRPGSSLLDQDCRPDSDGLNLSSMNSAGVSGSPEPPTSPRAPREEGLREWGSGSPPCVPGPQEGLRPMSDSVGGAFRVAKVSFPSYLASPAGSRGSSRYSSTETLKDDDLWSSRGSGGWGVYRSPSFGAGEGLLRSQARTRAKGPGGTSRALRDGGFEPEKSRQRKSLSNPDIASETLTLLSFLRSDLSELRVRKPGGSSGDRGSNPLDGRDSPSAGGPVGQLEPIPIPAPASPGTRPTLKDLTATLRRAKSFTCSEKPMARRLPRTSALKSSSSELLLTGPGAEEDPLPLIVQDQYVQEARQVFEKIQRMGAQQDDGSDAPPGSPDWAGDVTRGQRSQEELSGPESSLTDEGIGADPEPPVAAFCGLGTTGMWRPLSSSSAQTNHHGPGTEDSLGGWALVSPETPPTPGALRRRRKVPPSGSGGSELSNGEAGEAYRSLSDPIPQRHRAATSEEPTGFSVDSNLLGSLSPKTGLPATSAMDEGLTSGHSDWSVGSEESKGYQEVIQSIVQGPGTLGRVVDDRIAGKAPKKKSLSDPSRRGELAGPGFEGPGGEPIREVEPMLPPSSSEPILVEQRAEPEEPGATRSRAQSERALPEALPPPATAHRNFHLDPKLADILSPRLIRRGSKKRPARSSHQELRRDEGSQDQTGSLSRARPSSRHVRHASVPATFMPIVVPEPPTSVGPPVAVPEPIGFPTRAHPTLQAPSLEDVTKQYMLNLHSGEVPAPVPVDMPCLPLAAPPSAEAKPPEAARPADEPTPASKCCSKPQVDMRKHVAMTLLDTEQSYVESLRTLMQGYMQPLKQPENSVLCDPSLVDEIFDQIPELLEHHEQFLEQVRHCMQTWHAQQKVGALLVQSFSKDVLVNIYSAYIDNFLNAKDAVRVAKEARPAFLKFLEQSMRENKEKQALSDLMIKPVQRIPRYELLVKDLLKHTPEDHPDHPLLLEAQRNIKQVAERINKGVRSAEEAERHARVLQEIEAHIEGMEDLQAPLRRFLRQEMVIEVKAIGGKKDRSLFLFTDLIVCTTLKRKSGSLRRSSMSLYTAASVIDTASKYKMLWKLPLEDADIIKGASQATNRENIQKAISRLDEDLTTLGQMSKLSESLGFPHQSLDDALRDLSAAMHRDLSEKQALCYALSFPPTKLELCATRPEGTDSYIFEFPHPDARLGFEQAFDEAKRKLASSKSCLDPEFLKAIPIMKTRSGMQFSCAAPTLNSCPEPSPEVWVCNSDGYVGQVCLLSLRAEPDVEACIAVCSARILCIGAVPGLQPRCHREPPPSLRSPPETAPEPAGPELDVEAAADEEAATLAEPGPQPCLHISIAGSGLEMTPGLGEGDPRPELVPFDSDSDDESSPSPSGTLQSQASRSTISSSFGNEETPSSKEATAETTSSEEEQEPGFLPLSGSFGPGGPCGTSPMDGRALRRSSHGSFTRGSLEDLLSVDPEAYQSSVWLGTEDGCVHVYQSSDSIRDRRNSMKLQHAASVTCILYLNNQVFVSLANGELVVYQREAGHFWDPQNFKSVTLGTQGSPITKMVSVGGRLWCGCQNRVLVLSPDTLQLEHMFYVGQDSSRCVACMVDSSLGVWVTLKGSAHVCLYHPDTFEQLAEVDVTPPVHRMLAGSDAIIRQHKAACLRITALLVCEELLWVGTSAGVVLTMPTSPGTVSCPRAPLSPTGLGQGHTGHVRFLAAVQLPDGFNLLCPTPPPPPDTGPEKLPSLEHRDSPWHRGPAPARPKMLVISGGDGYEDFRLSSGGGSSSETVGRDDSTNHLLLWRV

SEQ ID NO: 49713 - protein, 2073 aa, Homo sapiens
MSLLNSSEFQPQIRTVAKSHSDSCILSSNNLPTKDLLSALLEQGNKLRNAMVISAMKSSPETSMLLDQVHPPINEDSLRASTQIRAFSRNRFKDHIEDHLLPSTENTFWRHDTKADTRAIQLLLGSAELSQGNFWDGLGSPPDSPSPGSDVYCISELNDPQYDQSLLENLFYTAPKSDTSISDFLSEEDDIVPSKKISQSTALARSSKVLESSDHKLKKRSAGKRNRNLVEQQMLSETPEDAQTMTLSVDRLALLGRTHSVRIIIETMGVPPDSPQMTPGKKSYAGPPPKVTTAKKRTFFVEYHFPVGFSESGLGKTALITEVVRLASSKITDGKVKFQQRFVFPVQFGGPMIEHWWNSNLTFQIYVKKTPQKKPEVIGSVSLSLRAVIQSELLSFSDQLPVQQENGQSPFGPLKVTMELITDNKDFTGINTKLSGNTHYTPLCAPTSPNKALPELNQDMTCTKNPQNLNQIHEETAKKAQNLVLPNRKSPSPVAPHPSTFVATPASHNLVNQTNGTTKESALLLHVLLMVPDGKDFISGESEKQSPCNVYLNCKLFSTEEVTRSVIAWGTTQPVFNFSQVIPVSLSSKYLERLKNNVMVIETWNKVRSPGQDKLLGLVKLPLHQFYMSFKDAKISRLLLDAQYPVVAVDSYMPVIDVFSGHQNGSLRVFLAMGSSNQIMALQRLKNEEGTLPPFSPRPAHFLDQPTAASVAMAEDRGNGLMEHCFEIHIEMVKGLAPLQATVWGEADCYVQYYFPVQHSQSSVLKGPEFLENGITLKPFRTATTLCVPDPIFNSEHHHSLLLPAEVPVQRLLLSAFSAQGLVPGGGVQFEIWCRYYYPNVRDQKVAKGTLPLSRICAMVTTQHREDVGIQTFNLPLTPRIENRKELRNQSSGLLDVGLRYRRSPRTAEGVLAARTVSISVQIIRACGLQAAAKALAEREPALQFSATVGVNASVTTHLSFLPQGEQRRTHPVACSFCPEFSHHVEFTCNLVTQHCSGEACFLAELLEFAEVIFAVYHENTKSASDIISIESCKEYLLGVVKVPTKELLIKRSGITGWYPIILPEDGGLPHGLELMQKIVGGLELSISFTHRGDRERVLEAAEHLGWSFENSLKDFVRMDEGEPATVTISTPRLWLPIHCVLLAGHNHIHKNTYCYLRYKFYDHEAFWTPLKKPKESVNKKQIMVTFKASKRAEVTRGPSLLWYFREERLEIQVWRAYGNDSVERPHQTDSWIGSAYVDLARLGERSARTLTVSGVYPLFGRNASNLSGAALRVHVVLSSLSSHLEPTHELDSMDCSSHSESEQLPRRNDEVQLSPPEVISCHQKSPASTQVPCSSTTAEVRLTQEGPADLDGTFAVSILVERAMHLSLKGSPLTERKVSIPSCCVSFATADESSPVYTQVVENTDSPIWNFQQQSRLSKELLLDPQQTLVFKVWHKGDEERVIGFASVDLSPLLSGFQFVCGWYNITDFSGECQGQIKVAVSPLESLIHFKEERQARRGVETSKSLIPIYSPFSFPASDTYAAFSSHMARQTLDQLAHASSKELDFSSPGRSDTTRSQASRHEEHVQNIRRFHESLHLQGEAPLPCDDKLTTSPLSSQTSILTSLRKNLSELDQIQRYFRQKLTKPFLPLSPQTQTAISQHQESCRDHLGPGASSLDPGSQCILEKSSNLVLQVSSLITDLQTITRDSQAALSSHRARSRSNKATTLPDAQDTEALQERCTMPDEPLVRAPDKGTDSPSPPPLEETSNGGRMLHESLRHAVPITRMQSSEDTEAGPAYSDEDYEEDIIEPRTLNEITTVTDKTSPWSSVISDTSEVISPQPDEVQREGPSCPSPGPFCREELMVKSSFLSSPERAVNPHLPRQGSPSQSLVACECEASKARVGGESASANPQPIPCPTLSGAQQSSTFVGWSSPQTDQNKEPKSEAPAENEAATSELGDSADSFKKLPLNLASQSRRENHKGPPIDSSDIRQRQVTTGSETSTKQSLLLPGPIVVPNFFLPPQQLEASLRMLSLSATLPPAATTDQDKSEATRGALSQRPCRPRPNSLPLNLPEEETLRIARIFSSQYSQKD

SEQ ID NO: 49714 - protein, 496 aa, Homo sapiens
MLQSKPRMLEDSDEQLDYTVLPMKKDVDRTEVVFSSYPGFSTSETTKICSLPPIFEILPVKSLKARNQTLAPPFPELRYLSLAYNKIAKEDAVLPVALFPSLCEFVFHNNPLVAHTRGVPPLLKSFLQERLGIHLIRRKIVKPKHHVLMSRKESWKVKSEIPKVPKQPLVLHHPRMTTTKSPSKDMLEPEAELAEDLPTTKSTSVESEMPTENLEGHSPSCRTFVPLPPICSNSTVHSEETLSHLSDTTVRLSPERPSDEDSKSTESIFLTQVSELPSSVIHKDDLELKEKDQKKPPTAPREVKGTRRKLPTAFLPSKYHGYEELLTAKPDPAFIEPKGIQKNAQALQQMLKHPLLCHSSKPKLDTLQKPYVHKEKRAQRIPIPPPKKTRAQLLDDIFIRLRDPRNITEAPLGAVLHQWTERRLVNHKQYLEAKRLLKEFQARYRQLVSGSLRTVFGTTPLPMACPALSESQPKFGHFLEFMDEFCQEPTASDSQG

SEQ ID NO: 49715 - protein, 288 aa, Homo sapiens [sequence omitted]

SEQ ID NO: 49716 - protein, 328 aa, Homo sapiens [sequence omitted]

SEQ ID NO: 49717 - protein, 313 aa, Homo sapiens
MSSATQVLKAFNDNGENVLDLAQRFFKQNILQFIQGAEYEGKDLEDQETLAFPGHVAAFKGDLGMLKKLVEDGVININERADNGSTPMHKAAGQGHIECLQWLIKMGADSNITNKAGERPSDVAKRFAHLAAVKLLEELQKYDIDDENEIDENDVKYFIRHGVEGSTDAKDDLCLSDLDKTDARMRAYKKIVELRHLLEIAESNYKHLGGITEEDLKQKKEQLESEKTIKELQGQLEYERLRREKLECQLDEYRAEVDQLRETLEKIQVPNFVAMVGVLFNTFIFLKKYIQEWPRVQALGWGSLDLNPGYSLF

SEQ ID NO: 49718 - protein, 1189 aa, Homo sapiens
MEKLNSKGILQVLPDEITFPLSPLRKYTYQLPGNESSKENVEKNTEGIVTPVFKEEKDYSEQEIQESIIKTNVLSKDCKDTFNDSLQKLLSETSTPAIQPSGGKVHGKQVLEPSVSENRTWPQKTDFADTEEEVKGPEKIINEHVDKTVVHPKVKRNSLTASLDKLLKEATGTSPSPLQAKLAPVITGTNSKLEEGRFFGKGIEQSHNTSADKREILAPFPVRDETFGNTALLKKAESGECQLSTQNLIQMAAEDSHPLDPTSQLSRKGSFGDVASPPQDMLFPQDAHLVPQARVHPSQTEISETVEKVILPPRPVLNDVSAALQKLCGEVWLSYPAGREVGPGEVNPEFPEAVQPVCSPLNPPGVISPWATMDTIVPDRKDFYSSNVVPDKTHEVGSYLAAQMSPSDQTLSSFASIVAQYGKGLPQEVEEIVRETIVQPKSEFLEFSAGLEKLLKEETETFPSKYESDTGNLSPSKLIGSTEEPRRATSECHPEELKETVEKAEAPLITESAFDAGFEKLLKEITEAPPYQPQVSVREETHEKESSQSEQTRFLGTVPHFYRAASQTSEMKDKSNGLESQVNQCDKMLGGDALVTDLLVDFCGSRSGVEIPRTPQLYVAHEIGTIKTVTPPEDRDSESGVAGGQGTLQEPGFGEASEAISVSRNRQPIPLLMNKENSTKTSKVELTLASPYMKQEKEEEKEGFSESDFSDGNTSSNAESWRNPSSSEEEPSPVLKTLERSAARKMPSKSLEDISSDSSNQAKVDNQPEELVRSAEDDEKPDQKPVTNECVPRISTVPTQPDNPFSHPDKLKRMSKSVPAFLQDESDDRETDTASESSYQLSRHKKSPSSLTNLSSSSGMTSLSSVSGSVMSVYSGDFGNLEVKGNIQFAIEYVESLKELHVFVAQCKDLAAADVKKQRSDPYVKAYLLPDKGKMGKKKTLVVKKTLNPVYNEILRYKIEKQILKTQKLNLSIWHRDTFKRNSFLGEVELDLETWDWDNKQNKQLRWYPLKRKTAPVALEAENRGEMKLALQYVPEPVPGKKLPTTGEVHIWVKECLDLPLLRGSHLNSFVKCTILPDTSRKSRQKTRAVGKTTNPIFNHTMVYDGFRPEDLMEACVELTVWDHYKLTNQFLGGLRIGFGTGKSYGTEVDWMDSTSEEVALWEKMVNSPNTWIEATLPLRMLLIAKISK

SEQ ID NO: 49719 - protein, 671 aa, Homo sapiens
MIYKSTDLNKDDNQSFPRQRTDSLKARGAPRGILKRNSSSSSTDSETLRYNHNFEPKSKIVSPGLTIHERISEKEHSLEDNSSPNSLEPLKHVRFSAVKDELPQSPGLIHGREVGEFSVLESDRLKNGMEDAGDTEEFQSDPKPSQYRKPSLFHQSTSSPYVSKSETHQPMTSGSFPINGLHSHSEVLTARPQSMENSPTINEPKDKSSELTRLESVLPRSPADELSHCVEPEPSQVPGGSSRDRQQGSEEEPSPVLKTLERSAARKMPSKSLEDISSDSSNQAKVDNQPEELVRSAEDDEKPDQKPVTNECVPRISTVPTQPDNPFSHPDKLKRMSKSVPAFLQDEVSGSVMSVYSGDFGNLEVKGNIQFAIEYVESLKELHVFVAQCKDLAAADVKKQRSDPYVKAYLLPDKGKMGKKKTLVVKKTLNPVYNEILRYKIEKQILKTQKLNLSIWHRDTFKRNSFLGEVELDLETWDWDNKQNKQLRWYPLKRKTAPVALEAENRGEMKLALQYVPEPVPGKKLPTTGEVHIWVKECLDLPLLRGSHLNSFVKCTILPDTSRKSRQKTRAVGKTTNPIFNHTMVYDGFRPEDLMEACVELTVWDHYKLTNQFLGGLRIGFGTGKSYGTEVDWMDSTSEEVALWEKMVNSPNTWIEATLPLRMLLIAKISK

SEQ ID NO: 49720 - protein, 427 aa, Homo sapiens
MPAAKKQKLSSDENSNPDLSGDENDDAVSIESGTNTERPDTPTNTPNAPGRKSWGKGKWKSKKCKYSFKCVNSLKEDHNQPLFGVQFNWHSKEGDPLVFATVGSNRVTLYECHSQGEIRLLQSYVDADADENFYTCAWTYDSNTSHPLLAVAGSRGIIRIINPITMQCIKHYVGHGNAINELKFHPRDPNLLLSVSKDHALRLWNIQTDTLVAIFGGVEGHRDEVLSADYDLLGEKIMSCGMDHSLKLWRINSKRMMNAIKESYDYNPNKTNRPFISQKIHFPDFSTRDIHRNYVDCVRWLGDLILSKSCENAIVCWKPGKMEDDIDKIKPSESNVTILGRFDYSQCDIWYMRFSMDFWQKMLALGNQVGKLYVWDLEVEDPHKAKCTTLTHHKCGAAIRQTSFSRDSSILIAVCDDASIWRWDRLR

SEQ ID NO: 49721 - protein, 452 aa, Homo sapiens
MPAAKKQKLSSDENSNPDLSGDENDDAVSIESGTNTERPDTPTNTPNAPGRKSWGKGKWKSKKCKYSFKCVNSLKEDHNQPLFGVQFNWHSKEGDPLVFATVGSNRVTLYECHSQGEIRLLQSYVDADADENFYTCAWTYDSNTSHPLLAVAGSRGIIRIINPITMQCIKHYVGHGNAINELKFHPRDPNLLLSVSKDHALRLWNIQTDTLVAIFGGVEGHRDEVLSADYDLLGEKIMSCGMDHSLKLWRINSKRMMNAIKESYDYNPNKTNRPFISQKIHFPDFSTRDIHRNYVDCVRWLGDLILSKSGRAILHSHQQCMRDPVSPNLRQHLSCENAIVCWKPGKMEDDIDKIKPSESNVTILGRFDYSQCDIWYMRFSMDFWQKMLALGNQVGKLYVWDLEVEDPHKAKCTTLTHHKCGAAIRQTSFSRDSSILIAVCDDASIWRWDRLR

SEQ ID NO: 49722 - protein, 30 aa, Homo sapiens
MNVLLFWKTFLLYNQGPEYHYLHQMLGELS

SEQ ID NO: 49723 - protein, 4352 aa, Homo sapiens
MKLYGNNGVSSTAKLYVHIERINEHAPTIHVVTHVPFSLEKEPTYAVVTVDDLDDGANGEIESVSIVAGDPLDQFFLAKEGKWLNEYKIKERKQIDWESFPYGYNLTLQAKDKGSPQKCSALKAVYIGNPTRDTVPIRFEKEVYDVSISEFSPPGVVVAIVKLSPEPIDVEYKLSPGEDAVYFKINPRSGLIVTARPLNTVKKEVYKLEVTNKEGDLKAQVTISIEDANDHTPEFQQPLYDAYVNESVPVGTSVLTVSASDKDKGENGYITYSIASLNLLPFVINQFTGVISTTEELDFESSPEIYRFIVRASDWGSPYRHESEVNVTIRIGNVNDNSPLFEKVACQGVISYDFPVGGHITAVSAIDIDELELVKYKIISGNELGFFYLNPDSGVLQLKKSLTNSGIKNGNFALRITATDGENLADPMSINISVLHGKVSSKSFSCRETRVAQKLAEKLLIKAKANGKLNLEDGFLDFYSINRQGPYFDKSFPSDVAVKEDLPVGANILKIKAYDADSGFNGKVLFTISDGNTDSCFNIDMETGQLKVLMPMDREHTDLYLLNITIYDLGNPQKSSWRLLTINVEDANDNSPVFIQDSYSVNILESSGIGTEIIQVEARDKDLGSNGEVTYSVLTDTQQFAINSSTGIVYVADQLDRESKANYSLKIEARDKAESGQQLFSVVTLKVFLDDVNDCSPAFIPSSYSVKVLEDLPVGTVIAWLETHDPDLGLGGQVRYSLVNDYNGRFEIDKASGAIRLSKELDYEKQQFYNLTVRAKDKGRPVSLSSVSFVEVEVVDVNENLHTPYFPDFAVVGSVKENSRIGTSVLQVTARDEDSGRDGEIQYSIRDGSGLGRFSIDDESGVITAADILDRETMGSYWLTVYATDRGVVPLYSTIEVYIEVEDVNDNAPLTSEPIYYPVVMENSPKDVSVIQIQAEDPDSSSNEKLTYRITSGNPQNFFAINIKTGLITTTSRKLDREQQAEHFLEVTVTDGGPSPKQSTIWVVVQVLDENDNKPQFPEKVYQIKLPERDRKKRGEPIYRAFAFDRDEGPNAEISYSIVDGNDDGKFFIDPKTGMVSSRKQFTAGSYDILTIKAVDNGRPQKSSTARLHIEWIKKPPPSPIPLTFDEPFYNFTVMESDRVTEIVGVVSVQPANTPLWFDIVGGNFDSAFDAEKGVGTIVIAKPLDAEQRSIYNMSVEVTDGTNVAVTQVFIKVLDNNDNGPEFSQPNYDVTISEDVLPDTEILQIEATDRDEKHKLSYTVHSSIDSISMRKFRIDPSTGVLYTAERLDHEAQDKHILNIMVRDQEFPYRRNLARVIVNVEDANDHSPYFTNPLYEASVFESAALGSAVLQVTALDKDKGENAELIYTIEAGNTGNMFKIEPVLGIITICKEPDMTTMGQFVLSIKVTDQGSPPMSATAIVRISVTMSDNSHPKFIHKDYQAEVNENVDIGTSVILISAISQSTLIYEVKDGDINGIFTINPYSGVITTQKALDYERTSSYQLIIQATNMAGMASNATVNIQIVDENDNAPVFLFSQYSGSLSEAAPINSIVRSLDNSPLVIRATDADSNRNALLVYQIVESTAKKFFTVDSSTGAIRTIANLDHETIAHFHFHVHVRDSGSPQLTAESPVEVNIEVTDVNDNPPVFTQAVFETILLLPTYVGVEVLKVSATDPDSEVPPELTYSLMEGSLDHFLIDSNSGVLTIKNNNLSKDHYMLIVKVSDGKFYSTSMVTIMVKEAMDSGLHFTQSFYSTSISENNTNITKVAIVNAVGNRLNEPLKYSILNPGNKFKIKSTSGVIQTTGVPFDREEQELYELVVEASRELDHLRVARVVVRVNIEDINDNSPVFVGLPYYAAVQVDAEPGTLIYQVTAIDKDKGPNGEVTYVLQDDYGHFEINPNSGNVILKEAFNSDLSNIEYGVTILAKDGGKPSLSTSVELPITIVNKAMPVFDKPFYTASVNEDIRMNTPILSINATSPEGQGIIYIIIDGDPFKQFNIDFDTGVLKVVSPLDYEVTSAYKLTIRASDALTGARAEVTVDLLVNDVNDNPPIFDQPTYNTTLSEASLIGTPVLQVVSIDADSENNKMVHYQIVQDTYNSTDYFHIDSSSGLILTARMLDHELVQHCTLKVRSIDSGFPSLSSEVLVHIYISDVNDNPPVFNQLIYESYVSELAPRGHFVTCVQASDADSSDFDRLEYSILSGNDRTSFLMDSKSGVITLSNHRKQRMEPLYSLNVSVSDGLFTSTAQVHIRVLGANLYSPAFSQSTYVAEVRENVAAGTKVIHVRATDGDPGTYGQISYAIINDFAKDRFLIDSNGQVITTERLDRENPLEGDVSIFVRALDGGGRTTFCTVRVIVVDENDNAPQFMTVEYRASVRADVGRGHLVTQVQAIDPDDGANSRITYSLYSEASVSVADLLEIDPDNGWMVTKGNFNQLKNTVLSFFVKAVDGGIPVKHSLIPVYIHVLPPETFLPSFTQSQYSFTIAEDTAIGSTVDTLRILPSQNVWFSTVNGERPENNKGGIFVIEQETGTIKLDKRLDRETSPAFHFKVAATIPLDKVDIVFTVDVDIKVLDLNDNKPVFETSSYDTIIMEGMPVGTKLTQVRAIDMDWGANGQVTYSLHSDSQPEKVMEAFNIDSNTGWISTLKDLDHETDPTFTFSVVASDLGEAFSLSSTALVSVRVTDINDNAPVFAQEVYRGNVKESDPPGEVVAVLSTWDRDTSDVNRQVSYHITGGNPRGRFALGLVQSEWKVYVKRPLDREEQDIYFLNITATDGLFVTQAMVEVSVSDVNDNSPVCDQVAYTALLPEDIPSNKIILKVSAKDADIGSNGYIRYSLYGSGNSEFFLDPESGELKTLALLDRERIPVYSLMAKATDGGGRFCQSNIHLILEDVNDNPPVFSSDHYNTCVYENTATKALLTRVQAVDPDIGINRKVVYSLADSAGGVFSIDSSSGIIILEQPLDREQQSSYNISVRATDQSPGQSLSSLTTVTITVLDINDNPPVFERRDYLVTVPEDTSPGTQVLAVFATSKDIGTNAEITYLIRSGNEQGKFKINPKTGGISVSEVLDYELCKRFYLVVEAKDGGTPALSAVATVNINLTDVNDNPPKFSQDVYSAVISEDALVGDSVILLIAEDVDSQPNGQIHFSIVNGDRDNEFTVDPVLGLVKVKKKLDRERVSGYSLLVQAVDSGIPAMSSTATVNIDISDVNDNSPVFTPANYTAVIQENKPVGTSILQLVVTDRDSFHNGPPFSFSILSGNEEEEFVLDPHGILRSAVVFQHTESLEYVLCVQAKDSGKPQQVSHTYIRVRVIEESTHKPTAIPLEIFIVTMEDDFPGGVIGKIHATDQDMYDVLTFALKSEQKSLFKVNSHDGKIIALGGLDSGKYVLNVSVSDGRFQVPIDVVVHVEQLVHEMLQNTVTIRFENVSPEDFVGLHMHGFRRTLRNAVLTQKQDSLRIISIQPVAGTNQLDMLFAVEMHSSEFYKPAYLIQKLSNARRHLENIMRISAILEKNCSGLDCQEQHCEQGLSLDSHALMTYSTARISFVCPRFYRNVRCTCNGGLCPGSNDPCVEKPCPGDMQCVSYEASRRPFLCQCPPGKLGECSGHTSLSFAGNSYIKYRLSENSKEEDFKLALRLRTLQSNGIIMYTRANPCIILKIVDGKLWFQLDCGSGPGILGISGRAVNDGSWHSVFLELNRNFTSLSLDDSYVERRRAPLYFQTLSTESSIYFGALVQADNIRSLTDTRVTQVLSGFQGCLDSVILNNNELPLQNKRSSFAEVVGLTELKLGCVLYPDACKRSPCQHGGSCTGLPSGGYQCTCLSQFTGRNCESEITACFPNPCRNGGSCDPIGNTFICNCKAGLTGVTCEEDINECEREECENGGSCVNVFGSFLCNCTPGYVGQYCGLRPVVVPNIQAGHSYVGKEELIGIAVVLFVIFILVVLFIVFRKKVFRKNYSRNNITLVQDPATAALLNKSNGIPFRNLRGSGDGRNVYQEVGPPQVPVRPMAYTPCFQSDSRSNLDKIVDGLGGEHQEMTTFHPESPRILTARRGVVVCSVAPNLPAVSPCRSDCDSIRKNGWDAGTENKGVDDPGEVTCFAGSNKGSNSEVQSLSSFQSDSGDDNASIVTVIQLVNNVVDTIENEVSVMDQGQNYNRAYHWDTSDWMPGARLSDIEEVPNYENQDGGSAHQGSTRELESDYYLGGYDIDSEYPPPHEEEFLSQDQLPPPLPEDFPDQYEALPPSQPVSLASTLSPDCRRRPQFHPSQYLPPHPFPNETDLVGPPASCEFSTFAVSMNQGTEPTGPADSVSLSLHNSRGTSSSDVSANCGFDDSEVAMSDYESVGELSLASLHIPFVETQHQTQV

SEQ ID NO: 49724 - protein, 237 aa, Homo sapiens
MQKGLKDNFADVQVSVVDCPDLTKEPFTFPVKGICGKTRIAEVGGVPYLLPLVNQKKVYDLNKIAKEIKLPGAFILGAGAGPFQTLGFNSEVIEVKAKRRTGPLNFVTCMRETLEKHYGNKPIGMGGTFIIQKGKVKSHIMPAEFSSCPLNSDEEVNKWLHFYEMKAPLVCLPVFVSRDPGFDLRLEHTHFFSRHGEGGHYHYDTTPDIVEYLGYFLPAEFLYRIDQPKETHSIGRD

SEQ ID NO: 49725 - protein, 830 aa, Homo sapiens
MQSTNLSCFDEDKLAFSKTQHINNWLTNLDASNTQNVTAFSDILSKSNVLPSWEYFNSKEQNPSPLNGTVERATNTANNSVPFVSSPPMFVLDKKCEKTSETSTMRTTDSTSGAFKRERPLVTESPTFKFSKSQSTSDSLTQEVATFPDQEKYSELNQENGTTSIPTSCVPVATPLVLPSNIQSARPSAKNSIHIKEIDAVQCSDKLDELKDGKEEEIKYFNCNKEELPLFSDSFQDAYIPHNPDSKDEKQKLAETSSLSNVTSNYDFVGQHKKMKYNIHERNGVRFLKSILKKESKYEHGYLKALIINQSFKFGNQKAAAIRDSIELTKEKGAEIPKTIKKLRWFDETSNIENNAENSHSLKNKTGTTQQHSQQFHIQSGAGSNIISVSTCAVNSADTKKSREDSISENVTTLGGSGADHMPLNCFIPSGYNFAKHAWPASKKEESKIPVHDDSKTKQGKPQRGRAKIIRKPGSAKVQSGFICTNRKGAVIQPQSASKVNIFTQAQGKLIIPCPPPQSTSNIRSGKNIQVSQCQPVTPENPQNIITHNSFNSKHVLPTEHSLNQWNQESSSPLSNACSDLVTVIPSLPSYCSSECQTFAKINHSNGTQAVARQDATLYCTQRSPVCEESYPSVTLRTAEEESVPLWKRGPNVLHQNKRATGSTVMRRKRIAETKRRNILEQKRQNPGSVGQKYSEQINNFGQSVLLSSSEPKQTTRGTSYIEEVSDSTSEFLMAENLVKASVPEDEILTVLNSKQIQKSNLPLNKTQQFNICTLSAEEQKILESLNDLSERLHYIQESICKNPSIKNTLQIIPLLEKREDRTSSCRDKR

SEQ ID NO: 49726 - protein, 96 aa, Homo sapiens
MNVTAPTSPPVQQNMMNSASGPLPDGWEQAMTQDGEIYYINHKNKTTSWLDPRLDPRFGKGSSQNLFRCFWLLIFFVNILRKAHLNKIALLYSIKK

SEQ ID NO: 49727 - protein, 580 aa, Homo sapiens
MKYDFSCELYRMSTYSTFPAGVPVSERSLARAGFYYTGVNDKVKCFCCGLMLDNWKLGDSPIQKHKQLYPSCSFIQNLVSASLGSTSKNTSPMRNSFAHSLSPTLEHSSLFSGSYSSLSPNPLNSRAVEDISSSRTNPYSYAMSTEEARFLTYHMWPLTFLSPSELARAGFYYIGPGDRVACFACGGKLSNWEPKDDAMSEHRRHFPNCPFLENSLETLRFSISNLSMQTHAARMRTFMYWPSSVPVQPEQLASAGFYYVGRNDDVKCFCCDGGLRCWESGDDPWVEHAKWFPRCEFLIRMKGQEFVDEIQGRYPHLLEQLLSTSDTTGEENADPPIIHFGPGESSSEDAVMMNTPVVKSALEMGFNRDLVKQTVQSKILTTGENYKTVNDIVSALLNAEDEKREEEKEKQAEEMASDDLSLIRKNRMALFQQLTCVLPILDNLLKANVINKQEHDIIKQKTQIPLQARELIDTILVKGNAAANIFKNCLKEIDSTLYKNLFVDKNMKYIPTEDVSGLSLEEQLRRLQEERTCKVCMDKEVSVVFIPCGHLVVCQECAPSLRKCPICRGIIKGTVRTFLS

SEQ ID NO: 49728 - protein, 317 aa, Homo sapiens
MQEKQRMAGQMLLQTFFNIDQISPNKKAHPNMEAGPPESGESTDALKLCPHEEFLRLCKERAEEIYPIKERNNRTRLALIICNTEFDHLPPRNGADFDITGMKELLEGLDYSVDVEENLTARDMESALRAFATRPEHKSSDSTFLVLMSHGILEGICGTVHDEKKPDVLLYDTIFQIFNNRNCLSLKDKPKVIIVQACRGANRGELWVRDSPASLEVASSQSSENLEEDAVYKTHVEKDFIAFCSSTPHNVSWRDSTMGSIFITQLITCFQKYSWCCHLEEVFRKVQQSFETPRAKAQMPTIERLSMTRYFYLFPGN

SEQ ID NO: 49729 - protein, 304 aa, Homo sapiens
MQDSQGVLSSFPAPQAVQDNPAMPTSSGSEGNVKLCSLEEAQRIWKQKSAEIYPIMDKSSRTRLALIICNEEFDSIPRRTGAEVDITGMTMLLQNLGYSVDVKKNLTASDMTTELEAFAHRPEHKTSDSTFLVFMSHGIREGICGKKHSEQVPDILQLNAIFNMLNTKNCPSLKDKPKVIIIQACRGDSPGVVWFKDSVGVSGNLSLPTTEEFEDDAIKKAHIEKDFIAFCSSTPDNVSWRHPTMGSVFIGRLIEHMQEYACSCDVEEIFRKVRFSFEQPDGRAQMPTTERVTLTRCFYLFPGH

SEQ ID NO: 49730 - protein, 303 aa, Homo sapiens [sequence omitted]

SEQ ID NO: 49731 - protein, 302 aa, Homo sapiens
MLQSFINYCLLFLIYTVMLAFRSGSDNLLVILKRKWWKYILLGLADVEANYVIVRAYQYTTLTSVQLLDCFGIPVLMALSWFILHARYRVIHFIAVAVCLLGVGTMVGADILAGREDNSGSDVLIGDILVLLGASLYAISNVCEEYIVKKLSRQEFLGMVGLFGTIISGIQLLIVEYKDIASIHWDWKIALLFVAFALCMFCLYSFMPLVIKVTSATSVNLGILTADLYSLFVGLFLFGYKFSGLYILSFTVIMVGFILYCSTPTRTAEPAESSVPPVTSIGIDNLGLKLEENLQETHSAVL

SEQ ID NO: 49732 - protein, 429 aa, Homo sapiens
MFCSSSAFLPSSFCMYTTLIAMTGWYMDKTSIAVLGVAAGAILGWPFSAALGLPIAFDLLVMKHRWKSFFHWSLMALILFLVPVVVIDSYYYGKLVIAPLNIVLYNVFTPHGPDLYGTEPWYFYLINGFLNFNVAFALALLVLPLTSLMEYLLQRFHVQNLGHPYWLTLAPMYIWFIIFFIQPHKEERFLFPVYPLICLCGAVALSALQKCYHFVFQRYRLEHYTVTSNWLALGTVFLFGLLSFSRSVALFRGYHGPLDLYPEFYRIATDPTIHTVPEGRPVNVCVGKEWYRFPSSFLLPDNWQLQFIPSEFRGQLPKPFAEGPLATRIVPTDMNDQNLEEPSRYIDISKCHYLVDLDTMRETPREPKYSSNKEEWISLAYRPFLDASRSQFVAQAGLKLLGSSNPPTSASQNIGITGLSHRAWPLTSP

SEQ ID NO: 49733 - protein, 42 aa, Homo sapiens
MPLSTHRFKREPHWFPGHQPELDPPRYKCTEKSTYMNSYSKP

SEQ ID NO: 49734 - protein, 18 aa, Homo sapiens
MCHIAKSRITSLHELLVS

SEQ ID NO: 49735 - protein, 685 aa, Homo sapiens
MEEDQEEDECRTTLNKTMISPPQTAMKSAEEINSEAFLASVEKDAKERAKRRRENKVLADALKEKGNEAFAEGNYETAILRYSEGLEKLKDMKVLYTNRAQAYMKLEDYEKALVDCEWALKCDEKCTKAYFHMGKANLALKNYSVSRECYKKILEINPKLQTQVKGYLNQVDLQEKADLQEKEAHELLDSGKNTAVTTKNLLETLSKPDQIPLFYAGGIEILTEMINECTEQTLFRMHNGFSIISDNEVIRRCFSTAGNDAVEEMVCVSVLKLWQAVCSRNEENQRVLVIHHDRARLLAALLSSKVLAIRQQSFALLLHLAQTESGRSLIINHLDLTRLLEALVSFLDFSDKEANTAMGLFTDLALEERFQVWFQANLPGVLPALTGVLKTDPKVSSSSALCQCIAIMGNLSAEPTTRRHMAACEEFGDGCLSLLARCEEDVDLFREVIYTLLGLMMNLCLQAPFVSEVWAVEVSRRCLSLLNSQDGGILTRAAGVLSRTLSSSLKIVEEALRAGVVKKMMKFLKTGGETASRYAIKILAICTNSYHEAREEVIRLDKKLSVMMKLLSSEDEVLVGNAALCLGNCMEVPNVASSLLKTDLLQVLLKLAGSDTQKTAVQVNAGIALGKLCTAEPRVPAESSHLQFGRESAAPEALSPRRWEEMFHMLVFSLSSVDPPPPPPQTCYP

SEQ ID NO: 49736 - protein, 167 aa, Homo sapiens
MVWVDLEGPNLIIKQPDELLDSMSDWCKEHHGKSGLTKAVKESTITLQQAEYEFLSFVRQQTPPGLCPLAGNSVHEDKKFLDKYMPQFMKHLHYRIIDVSTVKELCRRWYPEEYEFAPKKAASHRALDDISESIKELQFYRNNIFKKKIDEKKRKIIENGENEKTVS

SEQ ID NO: 49737 - protein, 177 aa, Homo sapiens
MQQYEIWRELFSPLHALNFGIGGDTTRHVLWRLKNGELENIKPKVIVVWVGTNNHENTAEEVAGGIEAIVQLINTRQPQAKIIVLGLLPRGEKPNPLRQKNAKVNQLLKVSLPKLANVQLLDTDGGFVHSDGAISCHDMFDFLHLTGGGYAKICKPLHELIMQLLEETPEEKQTTIA

SEQ ID NO: 49738 - protein, 218 aa, Homo sapiens
MKEKFLVTPQDYARFKKSMVKGLDSYEEKEDKVIKEMAAQIREVEQSRQEVVRSVLEPQAVPDPEEGSSAPRSWKGMNSQVASSLQQPSNLDLPPAPELDWMETGPSLTFIGHQDIPGVGNIHSGATPPWMIQDEEYIAGNQEIGPSYEEFLKEKEKQKLKKLPPDRVGANFDHSSRTSAGWLPSFGRVWNNGRRWQSRHQFKTEAAAMKKQSHTEKS

SEQ ID NO: 49739 - protein, 797 aa, Homo sapiens
MVLDWCYGRLPAFELLIPFSCEDLSSLGPAPASLCQLVAQRYTPLKEVLPLMAAAGSHLLFVLHGLEHLNLDFRLAGTGLCSDPEEPQEPAAIIVNLLRKYMLPQASILVTTRPSAIGRIPSKYVGRYGEICGFSDTNLQKLYFQLRLNQPYCGYAVGGSGVSATPAQRDHLVQMLSRNLEGHHQIAAACFLPSYCWLVCATLHFLHAPTPAGQTLTSIYTSFLRLNFSGETLDSTDPSNLSLMAYAARTMGKLAYEGVSSRKTYFSEEDVCGCLEAGIRTEEEFQLLHIFRRDALRFFLAPCVEPGRAGTFVFTVPAMQEYLAALYIVLGLRKTTLQKVGKEVAELVGRVGEDVSLVLGIMAKLLPLRALPLLFNLIKVVPRVFGRMVGKSREAVAQAMVLEMFREEDYYNDDVLDQMGASILGVEGPRRHPDEPPEDEVFELFPMFMGGLLSAHNRAVLAQLGCPIKNLDALENAQAIKKKLGKLGRQVLPPSELLDHLFFHYEFQNQRFSAEVLSSLRQLNLAGVRMTPVKCTVVAAVLGSGRHALDEVNLASCQLDPAGLRTLLPVFLRARKLGLQLNSLGPEACKDLRDLLLHDQCQITTLRLSNNPLTAAGVAVLMEGLAGNTSVTHLSLLHTGLGDEGLELLAAQLDRNRQLQELNVAYNGAGDTAALALARAAREHPSLELLHLYFNELSSEGRQVLRDLGGAAEGGARVVVSLTEGTAVSEYWSVILSEVQRNLNSWDRARVQRHLELLLRDLEDSRGATLNPWRKAQLLRVEGEVRALLEQLGSSGS

SEQ ID NO: 49740 - protein, 280 aa, Homo sapiens
MILQELPDLEELFLCLNDYETVSCPSICCHSLKLLHITDNNLQDWTEIRKLGVMFPSLDTLVLANNHLNAIEEPDDSLARLFPNLRSISLHKSGLQSWEDIDKLNSFPKLEEVRLLGIPLLQPYTTEERRKLVIARLPSVSKLNGSVVTDGEREDSERFFIRYYVDVPQEEVPFRYHELITKYGKLEPLAEVDLRPQSSAKVEVHFNDQVEEMSIRLDQTVAELKKQLKTLVQLPTSNMLLYYFDHEAPFGPEEMKYSSRALHSFGIRDGDKIYVESKTK

SEQ ID NO: 49741 - protein, 374 aa, Homo sapiens
MILQELPDLEELFLCLNDYETVSCPSICCHSLKLLHITDNNLQDWTEIRKLGVMFPSLDTLVLANNHLNAIEEPDDSLARLFPNLRSISLHKSGLQSWEDIDKLNSFPKLEEVRLLGIPLLQPYTTEERRKLVIARLPSVSKLNGSVVTDGEREDSERFFIRYYVDVPQEEVPFRMNYSSFLRIWVSFIFALVQHQAQPRELMYPFWQNDTKTPKVDDGSSSEIKLAIPVFFFGVPYRTVYVNNNGVVSFNVLVSQFTPESFPLTDGRAFVAPFWADVHNGIRGEIYYRETMEPAILKRATKDIRKYFKDMATFSATWVFIVTWEEVTFYGGSSTTPVIIQIFCFPLHNLTSNSCPSSLPRRSLIIRAKECQFP

SEQ ID NO: 49742 - protein, 41 aa, Homo sapiens
MEAGLKFYIRSYLFQWMLWGTTSLRTKALQLPGIWLLTSHS

SEQ ID NO: 49743 - protein, 554 aa, Homo sapiens
MVVNDAGRPKVQVEYKGETKSFYPEEVSSMVLTKMKEIAEAYLGKTVTNAVVTVPAYFNDSQRQATKDAGTIAGLNVLRIINEPTAAAIAYGLDKKVGAERNVLIFDLGGGTFDVSILTIEDGIFEVKSTAGDTHLGGEDFDNRMVNHFIAEFKRKHKKDISENKRAVRRLRTACERAKRTLSSSTQASIEIDSLYEGIDFYTSITRARFEELNADLFRGTLDPVEKALRDAKLDKSQIHDIVLVGGSTRIPKIQKLLQDFFNGKELNKSINPDEAVAYGAAVQAAILSGDKSENVQDLLLLDVTPLSLGIETAGGVMTVLIKRNTTIPTKQTQTFTTYSDNQPGVLIQVYEGERAMTKDNNLLGKFELTGIPPAPRGVPQIEVTFDIDANGILNVSAVDKSTGKENKITITNDKGRLSKEDIERMVQEAEKYKAEDEKQRDKVSSKNSLESYAFNMKATVEDEKLQGKINDEDKQKILDKCNEIINWLDKNQTAEKEEFEHQQKELEKVCNPIITKLYQSAGGMPGGMPGGFPGGGAPPSGGASSGPTIEEVD

SEQ ID NO: 49744 - protein, 802 aa, Homo sapiens
MCVATNSAGHRESRAARVSIQEPQDYTEPVELLAVRIQLENVTLLNPDPAEGPKPRPAVWLSWKVSGPAAPAQSYTALFRTQTAPGGQGAPWAEELLAGWQSAELGGLHWGQDYEFKVRPSSGRARGPDSNVLLLRLPEKVPSAPPQEVTLKPGNGTVFVSWVPPPAENHNGIIRGYQVWSLGNTSLPPANWTVVGEQTQLEIATHMPGSYCVQVAAVTGAGAGEPSRPVCLLLEQAMERATQEPSEHGPWTLEQLRATLKRPEVIATCGVALWLLLLGTAVCIHRRRRARVHLGPGLYRYTSEDAILKHRMDHSDSQWLADTWRSTSGSRDLSSSSSLSSRLGADARDPLDCRRSLLSWDSRSPGVPLLPDTSTFYGSLIAELPSSTPARPSPQVPAVRRLPPQLAQLSSPCSSSDSLCSRRGLSSPRLSLAPAEAWKAKKKQELQHANSSPLLRGSHSLELRACELGNRGSKNLSQSPGAVPQALVAWRALGPKLLSSSNELVTRHLPPAPLFPHETPPTQSQQTQPPVAPQAPSSILLPAAPIPILSPCSPPSPQASSLSGPSPASSRLSSSSLSSLGEDQDSVLTPEEVALCLELSEGEETPRNSVSPMPRAPSPPTTYGYISVPTASEFTDMGRTGGGVGPKGGVLLCPPRPCLTPTPSEGSLANGWGSASEDNAASARASLVSSSDGSFLADAHFARALAVAVDSFGFGLEPREADCVFIDASSPPSPRDEIFLTPNLSLPLWEWRPDWLEDMEVSHTQRLGRGMPPWPPDSQISSQRSQLHCRMPKAGASPVDYS

SEQ ID NO: 49745 - protein, 958 aa, Homo sapiens
MARKKPRNTSRLPLALNPLKSKDVLAVLAERNEAIVPVGAWVEPASPGSSEIPAYTSAYLIEEELKEQLRKKQEALKHFQKQVKYRVNQQIRLRKKQQLQKSYERAQKEGSIAMQSSATHLTSKRTSVFPNNLNVAIGSSRLPPSLMPGDGIEDEENQNELFQQQAQALSETMKQARHRLASFKTVIKKKGSVFPDDGRKSFLTREEVLSRKPASTGINTGIRGELPIKVHQGLLAAVPYQNYMENQELDYEEPDYEESSSLVTDEKGKEDLFGRGQQDQQAIHSEDKNKPFSRVQKVKFKNPLFVLMEEEEQKQLHFEGLQDILPEAQDYFLEAQGDLLETQGDLTGIQSVKPDTQAVEMKVQVTEPEGQAIEPEGQPIKTETQGIMLKAQSIELEEGSIVLKTQDFLPTNQALLTKNQDVLLKDHCVLPKDQSILLKYQDQDFLPRDQHVLHKDQDILPKYQDQNFLPKDQNFLSRDQHVLPKDQDILPKYQDQNFLPKDQNFLSRDQHVLPKDQNILPKYQGQDFLPKDQDFLSRDQHVLPKDWNILPKCQDQDFLPRDQGVLPKDQNILPICQDQDFLPRDQGYLPKDQNILPICQDRDFLPRDLHVLSNDQNILPKCQDQDFLPKYQKVHFKEPYSDMTDEKGREDFSLADYQCLPPKSQDQDDIKNQQPASFMREERVREELPLDYHQYVVPKIQDQDSPREQNKHIKLPSSFEKWEIARGNTPGVPLAYDRYQSGLSTEFQAPLAFQSDVDKEEDKKERQKQYLRHRRLFMDIEREQVKEQQRQKEQKKKIEKIKKKREQECYAAEQRILRMNFHEDPYSGEKLSEILAQLQLQEIKGTREKQQREKEYLSSLCLIILYLYRYVEALRAQIQEKMQLYNITLPPLCCCGPDFWDAHPDTCANNCIFYKNHRAYTRALHSFINSCDVPGGNSTLRVAIHNFASAHRRTLKNL

SEQ ID NO: 49746 - protein, 286 aa, Homo sapiens [sequence omitted]

SEQ ID NO: 49747 - protein, 721 aa, Homo sapiens
MVKFHGADLEHYLLTLLATAARLYRHPSILNPINIVVVKVLLLRDRDSGPKVTGNAALTLRNFCAWQKKLNKVSDKHPEYWDTAILFTRQDLCGATTCDTLGMADVGTMCDPKRSCSVIEDDGLPSAFTTAHELGHVFNMPHDNVKVCEEVFGKLRANHMMSPTLIQIDRANPWSACSAAIITDFLDSGHGDCLLDQPSKPISLPEDLPGASYTLSQQCELAFGVGSKPCPYMQYCTKLWCTGKAKGQMVCQTRHFPWADGTSCGEGKLCLKGACVERHNLNKHRVDGSWAKWDPYGPCSRTCGGGVQLARRQCTNPTPANGGKYCEGVRVKYRSCNLEPCPSSASGKSFREEQCEAFNGYNHSTNRLTLAVAWVPKYSGVSPRDKCKLICRANGTGYFYVLAPKVVDGTLCSPDSTSVCVQGKCIKAGCDGNLGSKKRFDKCGVCGGDNKSCKKVTGLFTKPMHGYNFVVAIPAGASSIDIRQRGYKGLIGDDNYLALKNSQGKYLLNGHFVVSAVERDLVVKGSLLRYSGTGTAVESLQASRPILEPLTVEVLSVGKMTPPRVRYSFYLPKEPREDKSSHPKDPRGPSVLHNSVLSLSNQVEQPDDRPPARWVAGSWGPCSASCGSGLQKRAVDCRGSAGQRTVPACDAAHRPVETQACGEPCPTWELSAWSPCSKSCGRGFQRRSLKCVGHGGRLLARDQCNLHRKPQELDFCVLRPC

SEQ ID NO: 49748 - protein, 453 aa, Homo sapiens
MLKSNGALSTEEREEEMKQMEVYRSHSKFMKNKVEQLKEELSSKEAQWEELKKKAAGLQAEVFAIGQVKQELSRKDTELLALQTKLETLTNQFSDSKQHIEVLKESLTAKEQRAAILQTEVDALRLRLEEKETMLNKKTKQIQDMAEEKGTQAGEIHDLKDMLDVKERKVNVLQKKIENLQEQLRDKEKQMSSLKERVKSLQADTTNTDTALTTLEEALAEKERTIERLKEQRDRDEREKQEEIDNYKKDLKDLKEKVSLLQGDLSEKEASLLDLKEHASSLASSGLKKDSRLKTLEIALEQKKEECLKMESQLKKAHEAALEARASPEMSDRIQHLEREITRYKDESSKAQAEVDRLLEILKEVENEKNDKDKKIAELERQVKDQNKKVANLKHKEQVEKKKSAQMLEEARRREDNLNDSSQQLQTGSCSMTQAGVQWCDLSSLQPPSTGFK

SEQ ID NO: 49749 - protein, 454 aa, Homo sapiens [sequence omitted]

SEQ ID NO: 49750 - protein, 265 aa, Homo sapiens
MALDDKLYQRDLEVALALSVKELPTVTTNVQNSQDKSIEKHGSSKIETMNKSPHISNCSVASDYLDLDKITVEDDVGGVQGKRKAASKAAAQQRKILLEGSDGDSANDTEPDFAPGEDSEDDSDFCESEDNDEDFSMRKSKVKEIKKKEVKVKSPVEKKEKKSKSKCNALVTSVDSAPAAVKSESQSLPKKVSLSSDTTRKPLEIRSPSAESKKPKWVPPAASGGSRSSSSPLVVVSVKSPNQSLRLGLSRLARVKPLHPNATST

SEQ ID NO: 49751 - protein, 1883 aa, Homo sapiens
MDALLNNSLPPPHPENEEDPEEDLSETETPKLKKKKKPKKPRDPKIPKSKRQKKERMLLCRQLGDSSGEGPEFVEEEEEVALRSDSEGSDYTPGKKKKKKLGPKKEKKSKSKRKEEEEEEDDDDDSKEPKSSAQLLEDWGMEDIDHVFSEEDYRTLTNYKAFSQFVRPLIAAKNPKIAVSKMMMVLGAKWREFSTNNPFKGSSGASVAAAAAAAVAVVESMVTATEVAPPPPPVEVPIRKAKTKEGKGPNARRKPKGSPRVPDAKKPKPKKVAPLKIKLGGFGSKRKRSSSEDDDLDVESDFDDASINSYSVSDGSTSRSSRSRKKLRTTKKKKKDHQDYCEVCQQGGEIILCDTCPRAYHMVCLDPDMEKAPEGKWSCPHCEKEGIQWEAKEDNSEGEEILEEVGGDLEEEDDHHMEFCRVCKDGGELLCCDTCPSSYHIHCLNPPLPEIPNGEWLCPRCTCPALKGKVQKILIWKWGQPPSPTPVPRPPDADPNTPSPKPLEGRPERQFFVKWQGMSYWHCSWVSELQLELHCQVMFRNYQRKNDMDEPPSGDFGGDEEKSRKRKNKDPKFAEMEERFYRYGIKPEWMMIHRILNHSVDKKGHVHYLIKWRDLPYDQASWESEDVEIQDYDLFKQSYWNHRELMRGEEGRPGKKLKKVKLRKLERPPETPTVDPTVKYERQPEYLDATGGTLHPYQMEGLNWLRFSWAQGTDTILADEMGLGKTVQTAVFLYSLYKEGHSKGPFLVSAPLSTIINWEREFEMWAPDMYVVTYVGDKDSRAIIRENEFSFEDNAIRGGKKASRMKKEASVKFHVLLTSYELITIDMAILGSIDWACLIVDEAHRLKNNQSKFFRVLNGYSLQHKLLLTGTPLQNNLEELFHLLNFLTPERFHNLEGFLEEFADIAKEDQIKKLHDMLGPHMLRRLKADVFKNMPSKTELIVRVELSPMQKKYYKYILTRNFEALNARGGGNQVSLLNVVMDLKKCCNHPYLFPVAAMEAPKMPNGMYDGSALIRASGKLLLLQKMLKNLKEGGHRVLIFSQMTKMLDLLEDFLEHEGYKYERIDGGITGNMRQEAIDRFNAPGAQQFCFLLSTRAGGLGINLATADTVIIYDSDWNPHNDIQAFSRAHRIGQNKKVMIYRFVTRASVEERITQVAKKKMMLTHLVVRPGLGSKTGSMSKQELDDILKFGTEELFKDEATDGGGDNKEGEDSSVIHYDDKAIERLLDRNQDETEDTELQGMNEYLSSFKVAQYVVREEEMGEEEEVEREIIKQEESVDPDYWEKLLRHHYEQQQEDLARNLGKGKRIRKQVNYNDGSQEDRDWQDDQSDNQSDYSVASEEGDEDFDERSEAPRRPSRKGLRNDKDKPLPPLLARVGGNIEVLGFNARQRKAFLNAIMRYGMPPQDAFTTQWLVRDLRGKSEKEFKAYVSLFMRHLCEPGADGAETFADGVPREGLSRQHVLTRIGVMSLIRKKVQEFEHVNGRWSMPELAEVEENKKMSQPGSPSPKTPTPSTPGDTQPNTPAPVPPAEDGIKIEENSLKEEESIEGEKEVKSTAPETAIECTQAPAPASEDEKVVVEPPEGEEKVEKAEVKERTEEPMETEPKGKGAADVEKVEEKSAIDLTPIVVEDKEEKKEEEEKKEVMLQNGETPKDLNDEKQKKNIKQRFMFNIADGGFTELHSLWQNEERAATVTKKTYEIWHRRHDYWLLAGIINHGYARWQDIQNDPRYAILNEPFKGEMNRGNFLEIKNKFLARRFKLLEQALVIEEQLRRAAYLNMSEDPSHPSMALNTRFAEVECLAESHQHLSKESMAGNKPANAVLHKGILKQLEELLSDMKADVTRLPATIARIPPVAVRLQMSERNILSRLANRAPEPTPQQVAQQQ

SEQ ID NO: 49752 - protein, 1895 aa, Homo sapiens
MDALLNNSLPPPHPENEEDPEEDLSETETPKLKKKKKPKKPRDPKIPKSKRQKKERMLLCRQLGDSSGEGPEFVEEEEEVALRSDSEGSDYTPGKKKKKKLGPKKEKKSKSKRKEEEEEEDDDDDSKEPKSSAQLLEDWGMEDIDHVFSEEDYRTLTNYKAFSQFVRPLIAAKNPKIAVSKMMMVLGAKWREFSTNNPFKGSSGASVAAAAAAAVAVVESMVTATEVAPPPPPVEVPIRKAKTKEGKGPNARRKPKGSPRVPDAKKPKPKKVAPLKIKLGGFGSKRKRSSSEDDDLDVESDFDDASINSYSVSDGSTSRSSRSRKKLRTTKKKKKGEEEVTAVDGYETDHQDYCEVCQQGGEIILCDTCPRAYHMVCLDPDMEKAPEGKWSCPHCEKEGIQWEAKEDNSEGEEILEEVGGDLEEEDDHHMEFCRVCKDGGELLCCDTCPSSYHIHCLNPPLPEIPNGEWLCPRCTCPALKGKVQKILIWKWGQPPSPTPVPRPPDADPNTPSPKPLEGRPERQFFVKWQGMSYWHCSWVSELQLELHCQVMFRNYQRKNDMDEPPSGDFGGDEEKSRKRKNKDPKFAEMEERFYRYGIKPEWMMIHRILNHSVDKKGHVHYLIKWRDLPYDQASWESEDVEIQDYDLFKQSYWNHRELMRGEEGRPGKKLKKVKLRKLERPPETPTVDPTVKYERQPEYLDATGGTLHPYQMEGLNWLRFSWAQGTDTILADEMGLGKTVQTAVFLYSLYKEGHSKGPFLVSAPLSTIINWEREFEMWAPDMYVVTYVGDKDSRAIIRENEFSFEDNAIRGGKKASRMKKEASVKFHVLLTSYELITIDMAILGSIDWACLIVDEAHRLKNNQSKFFRVLNGYSLQHKLLLTGTPLQNNLEELFHLLNFLTPERFHNLEGFLEEFADIAKEDQIKKLHDMLGPHMLRRLKADVFKNMPSKTELIVRVELSPMQKKYYKYILTRNFEALNARGGGNQVSLLNVVMDLKKCCNHPYLFPVAAMEAPKMPNGMYDGSALIRASGKLLLLQKMLKNLKEGGHRVLIFSQMTKMLDLLEDFLEHEGYKYERIDGGITGNMRQEAIDRFNAPGAQQFCFLLSTRAGGLGINLATADTVIIYDSDWNPHNDIQAFSRAHRIGQNKKVMIYRFVTRASVEERITQVAKKKMMLTHLVVRPGLGSKTGSMSKQELDDILKFGTEELFKDEATDGGGDNKEGEDSSVIHYDDKAIERLLDRNQDETEDTELQGMNEYLSSFKVAQYVVREEEMGEEEEVEREIIKQEESVDPDYWEKLLRHHYEQQQEDLARNLGKGKRIRKQVNYNDGSQEDRDWQDDQSDNQSDYSVASEEGDEDFDERSEAPRRPSRKGLRNDKDKPLPPLLARVGGNIEVLGFNARQRKAFLNAIMRYGMPPQDAFTTQWLVRDLRGKSEKEFKAYVSLFMRHLCEPGADGAETFADGVPREGLSRQHVLTRIGVMSLIRKKVQEFEHVNGRWSMPELAEVEENKKMSQPGSPSPKTPTPSTPGDTQPNTPAPVPPAEDGIKIEENSLKEEESIEGEKEVKSTAPETAIECTQAPAPASEDEKVVVEPPEGEEKVEKAEVKERTEEPMETEPKGKGAADVEKVEEKSAIDLTPIVVEDKEEKKEEEEKKEVMLQNGETPKDLNDEKQKKNIKQRFMFNIADGGFTELHSLWQNEERAATVTKKTYEIWHRRHDYWLLAGIINHGYARWQDIQNDPRYAILNEPFKGEMNRGNFLEIKNKFLARRFKLLEQALVIEEQLRRAAYLNMSEDPSHPSMALNTRFAEVECLAESHQHLSKESMAGNKPANAVLHKVLKQLEELLSDMKADVTRLPATIARIPPVAVRLQMSERNILSRLANRAPEPTPQQVAQQQ

SEQ ID NO: 49753 - protein, 227 aa, Homo sapiens
MPNVRELAESDFASTFRLLTVFAYGTYADYLAEARNLPPLTEAQKNKLRHLSVVTLAAKVKCIPYAVLLEALALRNVRQLEDLVIEAVYADVLRGSLDQRNQRLEVDYSIGRDIQRQDLSAIARTLQEWCVGCEVVLSGIEEQVSRANQHKEQQLGLKQQIESEVANLKKTIKVTTAAAAAATSQDPEQHLTELREPAPGTNQRQPSKKASKGKGLRGSAKIWSKSN

SEQ ID NO: 49754 - protein, 46 aa, Homo sapiens
MRTAFSGAENAWITSARTTARQKHPREASRVGVGEQTAGPAESARN

SEQ ID NO: 49755 - protein, 149 aa, Homo sapiens
MDSPLNRAGLLQVYIHTQKNVLIEVNPQTRIPRTFDRFCGLMVQLLHKLSVRAADGPQKLLKVIKNPVSDHFPVGCMKVGTSFSIPVVSDVRELVPSSDPIVFVVGAFAHGKVSVEYTEKMVSISNYPLSAALTCAKLTTAFEEVWGVI

SEQ ID NO: 49756 - protein, 127 aa, Homo sapiens
MDSPLNRAGLLQVYIHTQKNVLIEVNPQTRIPRTFDRFCGLMVQLLHKLSVRAADGPQKLLKVIKNPVSDHFPVGCMKVGTSFSIPVVSDVRELVPSSDPIVFVVGAFAHGKVSGSYLFQSKVMMAL

SEQ ID NO: 49757 - protein, 259 aa, Homo sapiens [sequence omitted]

SEQ ID NO: 49758 - protein, 919 aa, Homo sapiens [sequence omitted]

SEQ ID NO: 49759 - protein, 341 aa, Homo sapiens
MDEVVLTIEQGNLGLRINGELITAYPQVVVVRVPTPWVQSDSDITVLRHLEKMGCRLMNRPQAILNCVNKFWTFQELAGHGVPLPDTFSYGGHENFAKMIDEAEVLEFPMVVKNTRGHRGKAVFLARDKHHLADLSHLIRHEAPYLFQKYVKESHGRDVRVIVVGGRVVGTMLRCSTDGRMQSNCSLGGVGMMCSLSEQGKQLAIQVSNILGMDVCGIDLLMKDDGSFCVCEANANVGFIAFDKACNLDVAGIIADYAASLLPSGRLTRRMSLLSVVSTASETSEPELGPPASTAVDNMSASSSSVDSDPESTERELLTKLPGGLFNMNQLLANEIKLLVD

SEQ ID NO: 49760 - protein, 51 aa, Homo sapiens [sequence omitted]

SEQ ID NO: 49761 - protein, 109 aa, Homo sapiens
MMAGSDFIKTSTGKETVNATFPVAIVMLRAIRDFFWKTGNKIGFKPAGGIRSAKDSLAWLSLVKEELGDEWLKPELFRIGASTLLSDIERQIYHHVTGRYAAYHDLPMS

SEQ ID NO: 49762 - protein, 241 aa, Homo sapiens
MCEVKKIYLQDEFRILKKKSFTFPRDHKSVTADTEMWPVYVELTNEKIYGCDFIVSATGVTPNVEPFLHGNSFDLGEDGGLKVDDHMHTSLPDIYAAGDICTTSWQLSPVWQQMRLWTQARQMGWYAAKCMAAASSGDSIDMDFSFELFAHVTKFFNYKVVLLGKYNAQGLGSDHELMLRCTKGREYIKVVMQNGRMMGAVLIGETDLEETFENLILNQMNLSSYGEDLLDPNIDIEDYFD

SEQ ID NO: 49763 - protein, 361 aa, Homo sapiens
MLLKHLQRMVSVPQVKASALKVVTLTANDKTSVSFSSLPGQGVIYNVIVWDPFLNTSAAYIPAHTYACSFEAGEGSCASLGRVSSKVFFTLFALLGFFICFFGHRFWKTELFFIGFIIMGFFFYILITRLTPIKYDVNLILTAVTGSVGGMFLVAVWWRFGILSICMLCVGLVLGFLISSVTFFTPLGNLKIFHDDGVFWVTFSCIAILIPVVFMGCLRILNILTCGVIGSYSVVLAIDSYWSTSLSYITLNVLKRALNKDFHRAFTNVPFQTNDFIILAVWGMLAVSGITLQIRRERGRPFFPPHPYKLWKQERERRVTNILDPSYHIPPLRERLYGRLTQIKGLFQKEQPAGERTPLLL

SEQ ID NO: 49764 - protein, 437 aa, Homo sapiens [sequence omitted]

SEQ ID NO: 49765 - protein, 45 aa, Homo sapiens
MPPDSSSPENKSLEVSDTRFHSFSFYELKNVTNNFDERPISVGDG

SEQ ID NO: 49766 - protein, 675 aa, Homo sapiens
MMLQLGGTVIGSARCKDFREREGRLRAAYNLVKRGITNLCVIGGDGSLTGADTFRSEWSDLLSDLQKAGKITDEEATKSSYLNIVGLVGSIDNDFCGTDMTIGTDSALHRIMEIVDAITTTAQSHQRTFVLEVMGRHCGYLALVTSLSCGADWVFIPECPPDDDWEEHLCRRLSETRTRGSRLNIIIVAEGAIDKNGKPITSEDIKNGSRMGVEAVMALLEGTPDTPACVVSLSGNQAVRLPLMECVQVTKDVTKAMDEKKFDEALKLRGRSFMNNWEVYKLLAHVRPPVSKSGSHTVAVMNVGAPAAGMNAAVRSTVRIGLIQGNRVLVVHDGFEGLAKGQIEEAGWSYVGGWTGQGGSKLGTKRTLPKKSFEQISANITKFNIQGLVIIGGFEAYTGGLELMEGRKQFDELCIPFVVIPATVSNNVPGSDFSVGADTALNTICTTCDRIKQSAAGTKRRVFIIETMGGYCGYLATMAGLAAGADAAYIFEEPFTIRDLQANVEHLVQKMKTTVKRGLVLRNEKCNENYTTDFIFNLYSEEGKGIFDSRKNVLGHMQQGGSPTPFDRNFATKMGAKAMNWMSGKIKESYRNGRIFANTPDSGCVLGMRKRALVFQPVAELKDQTDFEHRIPKEQWWLKLRPILKILAKYEIDLDTSDHAHLEHITRKRSGEAAV

SEQ ID NO: 49767 - protein, 50 aa, Homo sapiens
MKSHRCYDLIPTSSKLVVFDTSLQSCPCGFAFMIITVLATGEESFFCFGD

SEQ ID NO: 49768 - protein, 226 aa, Homo sapiens
MEGSASEVLKEWTVTGKKKNKKKKNKPKPAAEPSNGIPDSSKSVSIQEEQSAPSSEKGGMNGYHVNGAINDTESVDSLSEGLETLSIDARELEDPESAMLDTLDRTGSMLQNGVSDFETKSLTMHSIHNSQQPRNAAKSLSRPTTETQFSNMGMEDVPLATSKKLSSNIEKSVKDLQRCTVSLARYRVVVKEEMDASIKKMKQAFAELESWYSNAARVLGAKYCQV

SEQ ID NO: 49769 - protein, 852 aa, Homo sapiens
MGLPPMSQRPPAIPPMPPGILPPMLPPMGAPPPLTQIPGMVPPMMPGMLMPAVPVTAATAPGADTASSAVAGTGPPRALWSEHVAPDGRIYYYNADDKQSVWEKPSVLKSKAELLLSQCPWKEYKSDTGKPYYYNNQSKESRWTRPKDLDDLEVLVKQEAAGKQQQQLPQTLQPQPPQPQPDPPPVPPGPTPVPTGLLEPEPGGSEDCDVLEATQPLEQGFLQQLEEGPSSSGQHQPQQEEEESKPEPERSGLSWSNREKAKQAFKELLRDKAVPSNASWEQAMKMVVTDPRYSALPKLSEKKQAFNAYKAQREKEEKEEARLRAKEAKQTLQHFLEQHERMTSTTRYRRAEQTFGELEVWAVVPERDRKEVYDDVLFFLAKKEKEQAKQLRRRNIQALKSILDGMSSVNFQTTWSQAQQYLMDNPSFAQDHQLQNMDKEDALICFEEHIRALEREEEEERERARLRERRQQRKNREAFQTFLDELHETGQLHSMSTWMELYPAVSTDVRFANMLGQPGSTPLDLFKFYVEELKARFHDEKKIIKDILKDRGFCVEVNTAFEDFAHVISFDKRAAALDAGNIKLTFNSLLEKAEAREREREKEEARRMRRREAAFRSMLRQAVPALELGTAWEEVRERFVCDSAFEQITLESERIRLFREFLQVLETECQHLHTKGRKHGRKGKKHHHKRSHSPSGSESEEEELPPPSLRPPKRRRRNPSESGSEPSSSLDSVESGGAALGGRGSPSSHLLGADHGLRKAKKPKKKTKKRRHKSNSPESETDPEEKAGKESDEKEQEQDKDRELQQAELPNRSPGFGIKKEKTGWDTSESELSEGELERRRRTLLQQLDDHQ

SEQ ID NO: 49770 - protein, 37 aa, Homo sapiens
MGVPGPSFLPLPLPPCGAPTLEVLPGSCKASPKAGTP

SEQ ID NO: 49771 - protein, 224 aa, Homo sapiens
MGPAPGQGLYRSPMPGAAYPRPGMLPGSRMTPQGPSMGPPGYGGNPSVRPGLAQSGMDQSRKRPAPQQIQQVQQQAVQNRNHNAKKKKMADKILPQRIRELVPESQAYMDLLAFERKLDQTIMRKRLDIQEALKRPIKQKRKLRIFISNTFNPAKSDAEDGEGTVASWELRVEGRLLEDSALSKYDATKQKRKFSSFFKSLVIELDKDLYGPDNHLVEVSSSAF

SEQ ID NO: 49772 - protein, 248 aa, Homo sapiens
MWRFTFYLCIFCYGIRFLWSSPWFWDIRQCWHNYPFQPLSSGLYHYYIMELAFYWSLMFSQFTDIKRKDFLIMFVHHLVTIGLISFSYINNMVRVGTLIMCLHDVSDFLLEAAKLANYAKYQRLCDTLFVIFSAVFMVTRLGIYPFWILNTTLFESWEIIGPYASWWLLNGLLLTLQLLHVIWSYLIARIALKALIRGKVSKDDRSDVESSSEEEDVTTCTKSPCDSSSSNGANRVNGHMGGSYWAEE

SEQ ID NO: 49773 - protein, 89 aa, Homo sapiens [sequence omitted]

SEQ ID NO: 49774 - protein, 564 aa, Homo sapiens
MDLASPEAAPAAPTALPSFSTFMDGYTGEFDTFLYQLPGTVQPCSSASSSASSTSSSSATSPASASFKFEDFQVYGCYPGPLSGPVDEALSSSGSDYYGSPCSAPSPSTPSFQPPQLSPWDGSFGHFSPSQTYEGLRAWTEQLPKASGPPQPPAFFSFSPPTGPSPSLAQSPLKLFPSQATHQLGEGESYSMPTAFPGLAPTSPHLEGSGILDTPVTSTKARSGAPGGSEGRCAVCGDNASCQHYGVRTCEGCKGFFKRTVQKNAKYICLANKDCPVDKRRRNRCQFCRFQKCLAVGMVKEVVRTDSLKGRRGRLPSKPKQPPDASPANLLTSLVRAHLDSGPSTAKLDYSKFQELVLPHFGKEDAGDVQQFYDLLSGSLEVIRKWAEKIPGFAELSPADQDLLLESAFLELFILRLAYRSKPGEGKLIFCSGLVLHRLQCARGFGDWIDSILAFSRSLHSLLVDVPAFACLSALVLITDRHGLQEPRRVEELQNRIASCLKEHVAAVAGEPQPASCLSRLLGKLPELRTLCTQGLQRIFYLKLEDLVPPPPIIDKIFMDTLPF

SEQ ID NO: 49775 - protein, 1312 aa, Homo sapiens
MKSSGPVERLLRALGRRDSSRAASRPRKAEPHSFREKVFRKKPPVCAVCKVTIDGTGVSCRVCKVATHRKCEAKVTSACQALPPVELRRNTAPVRRIEHLGSTKSLNHSKQRSTLPRSFSLDPLMERRWDLDLTYVTERILAAAFPARPDEQRHRGHLRELAHVLQSKHRDKYLLFNLSEKRHDLTRLNPKVQDFGWPELHAPPLDKLCSICKAMETWLSADPQHVVVLYCKGNKGKLGVIVSAYMHYSKISAGADQALATLTMRKFCEDKVATELQPSQRRYISYFSGLLSGSIRMNSSPLFLHYVLIPMLPAFEPGTGFQPFLKIYQSMQLVYTSGVYHIAGPGPQQLCISLEPALLLKGDVMVTCYHKGGRGTDRTLVFRVQFHTCTIHGPQLTFPKDQLDEAWTGESETSGLGLESRWQAGGRQVAGRQESVVWARGLVLHCPLPIDERFPFQASVEFVFSSSPEKIKGSTPRNDPSVSVDYNTTEPAVRWDSYENFNQHHEDSVDGAQAACRVGGSLTHTRGPLDGSPYAQVQRPPRQTPPAPSPEPPPPPMLSVSSDSGHSSTLTTEPAAESPGRPPPTAAERQELDRLLGGCGVASGGRGAGRETAILDDEEQPTVGGGPHLGVYPGHRPGLSRHCSCRQGYREPCGVPNGGYYRPEGTLERRRLAYGGYEGSPQGYAEASMEKRRLCRSLSEGLYPYPPEMGKPATGDFGYRAPGYREVVILEDPGLPALYPCPACEEKLALPTAALYGLRLEREAGEGWASEAGKPLLHPVRPGHPLPLLLPACGHHHAPMPDYSCLKPPKAGEEGHEGCSYTMCPEGRYGHPGYPALVTYSYGGAVPSYCPAYGRVPHSCGSPGEGRGYPSPGAHSPRAGSISPGSPPYPQSRKLSYEIPTEEGGDRYPLPGHLASAGPLASAESLEPVSWREGPSGHSTLPRSPRDAPCSASSELSGPSTPLHTSSPVQGKESTRRQDTRSPTSAPTQRLSPGEALPPVSQAGTGKAPELPSGSGPEPLAPSPVSPTFPPSSPSDWPQERSPGGHSDGASPRSPVPTTLPGLRHAPWQGPRGPPDSPDGSPLTPVPSQMPWLVASPEPPQSSPTPAFPLAASYDTNGLSQPPLPEKRHLPGPGQQPGPWGPEQASSPARGISHHVTFAPLLSDNVPQTPEPPTQESQSNVKFVQDTSKFWYKPHLSRDQAIALLKDKDPGAFLIRDSHSFQGAYGLALKVATPPPSAQPWKGDPVEQLVRHFLIETGPKGVKIKGCPSEPYFACPPWSPSTPSPPSPCPAACAFPAKILWKRPQRLQCPPT

SEQ ID NO: 49776 - protein, 168 aa, Homo sapiens
MVRDWLGIVGPVLTPPQEHPKRPVLGLECPQSEVSGARFWGFFRNLCGQPEVFFHHCFVHNLCPLLFLAPSGRNLTPAELPAKQREQLLGICDAALCRQVQLLGVRLVVGVGRLAEQRARRALAGLMPEVQVEGLLHPSPRNPQANKGWEAVAKERLNELGLLPLLLK

SEQ ID NO: 49777 - protein, 119 aa, Homo sapiens
MKEGENNKPREKSESNKRKSNFSNSADDIKSKKKREQSNDIARGFERGLEPEKIIGATDSCGDLMFLMKWKDTDEADLVLAKEANVKCPQIVIAFYEERLTWHAYPEDAENKEKETAKS

SEQ ID NO: 49778 - protein, 208 aa, Homo sapiens
MDASALTGIPLPLIKSYLFQLLQGLAFCHSHRVLHRDLKPQNLLINTEGAIKLADFGLARAFGVPVRTYTHEVVTLWYRAPEILLGCKYYSTAVDIWSLGCIFAEMVTRRALFPGDSEIDQLFRIFRTLGTPDEVVWPGVTSMPDYKPSFPKWARQDFSKVVPPLDEDGRSLLSQMLHYDPNKRISAKAALAHPFFQDVTKPVPHLRL

SEQ ID NO: 49779 - protein, 1223 aa, Homo sapiens
MLNYNTNSSHALRQLRLTQLTEILSGGVYIEKNDKLCHMDTIDWRDIVRDRDAEIVVKDNGRSCPPCHEVCKGRCWGPGSEDCQTLTKTICAPQCNGHCFGPNPNQCCHDECAGGCSGPQDTDCFACRHFNDSGACVPRCPQPLVYNKLTFQLEPNPHTKYQYGGVCVASCPHNFVVDQTSCVRACPPDKMEVDKNGLKMCEPCGGLCPKACEGTGSGSRFQTVDSSNIDGFVNCTKILGNLDFLITGLNGDPWHKIPALDPEKLNVFRTVREITGYLNIQSWPPHMHNFSVFSNLTTIGGRSLYNRGFSLLIMKNLNVTSLGFRSLKEISAGRIYISANRQLCYHHSLNWTKVLRGPTEERLDIKHNRPRRDCVAEGKVCDPLCSSGGCWGPGPGQCLSCRNYSRGGVCVTHCNFLNGEPREFAHEAECFSCHPECQPMEGTATCNGSGSDTCAQCAHFRDGPHCVSSCPHGVLGAKGPIYKYPDVQNECRPCHENCTQGCKGPELQDCLGQTLVLIGKTHLTMALTVIAGLVVIFMMLGGTFLYWRGRRIQNKRAMRRYLERGESIEPLDPSEKANKVLARIFKETELRKLKVLGSGVFGTVHKGVWIPEGESIKIPVCIKVIEDKSGRQSFQAVTDHMLAIGSLDHAHIVRLLGLCPGSSLQLVTQYLPLGSLLDHVRQHRGALGPQLLLNWGVQIAKGMYYLEEHGMVHRNLAARNVLLKSPSQVQVADFGVADLLPPDDKQLLYSEAKTPIKWMALESIHFGKYTHQSDVWSYGVTVWELMTFGAEPYAGLRLAEVPDLLEKGERLAQPQICTIDVYMVMVKCWMIDENIRPTFKELANEFTRMARDPPRYLVIKRESGPGIAPGPEPHGLTNKKLEEVELEPELDLDLDLEAEEDNLATTTLGSALSLPVGTLNRPRGSQSLLSPSSGYMPMNQGNLGESCQESAVSGSSERCPRPVSLHPMPRGCLASESSEGHVTGSEAELQEKVSMCRSRSRSRSPRPRGDSAYHSQRHSLLTPVTPLSPPGLEEEDVNGYVMPDTHLKGTPSSREGTLSSVGLSSVLGTEEEDEDEEYEYMNRRRRHSPPHPPRPSSLEELGYEYMDVGSDLSASLGSTQSCPLHPVPIMPTAGTTPDEDYEYMNRQRDGGGPGGDYAAMGACPASEQGYEEMRAFQGPGHQAPHVHYARLKTLRSLEATDSAFDNPDYWHSRLFPKANAQRT

SEQ ID NO: 49780 - protein, 1101 aa, Homo sapiens
MDQPSAPSDPTDQPPAAHAKPDPGSGGQPAGPGAAGEALAVLTSFGRRLLVLIPVYLAGAVGLSVGFVLFGLALYLGWRRVRDEKERSLRAARQLLDDEEQLTAKTLYMSHRELPAWVSFPDVEKAEWLNKIVAQVWPFLGQYMEKLLAETVAPAVRGSNPHLQTFTFTRVELGEKPLRIIGVKVHPGQRKEQILLDLNISYVGDVQIDVEVKKYFCKAGVKGMQLHGVLRVILEPLIGDLPFVGAVSMFFIRRPTLDINWTGMTNLLDIPGLSSLSDTMIMDSIAAFLVLPNRLLVPLVPDLQDVAQLRSPLPRGIIRIHLLAARGLSSKDKYVKGLIEGKSDPYALVRLGTQTFCSRVIDEELNPQWGETYEVMVHEVPGQEIEVEVFDKDPDKDDFLGRMKLDVGKVLQASVLDDWFPLQGGQGQVHLRLEWLSLLSDAEKLEQVLQWNWGVSSRPDPPSAAILVVYLDRAQDLPMVTSELYPPQLKKGNKEPNPMVQLSIQDVTQESKAVYSTNCPVWEEAFRFFLQDPQSQELDVQVKDDSRALTLGALTLPLARLLTAPELILDQWFQLSSSGPNSRLYMKLVMRILYLDSSEICFPTVPGCPGAWDVDSENPQRGSSVDAPPRPCHTTPDSQFGTEHVLRIHVLEAQDLIAKDRFLGGLVKGKSDPYVKLKLAGRSFRSHVVREDLNPRWNEVFEVIVTSVPGQELEVEVFDKDLDKDDFLGRCKVRLTTVLNSGFLDEWLTLEDVPSGRLHLRLERLTPRPTAAELEEVLQVNSLIQTQKSAELAAALLSIYMERAEDLPLRKGTKHLSPYATLTVGDSSHKTKTISQTSAPVWDESASFLIRKPHTESLELQVRGEGTGVLGSLSLPLSELLVADQLCLDRWFTLSSGQGQVLLRAQLGILVSQHSGVEAHSHSYSHSSSSLSEEPELSGGPPHITSSAPELRQRLTHVDSPLEAPAGPLGQVKLTLWYYSEERKLVSIVHGCRSLRQNGRDPPDPYVSLLLLPDKNRGTKRRTSQKKRTLSPEFNERFEWELPLDEAQRRKLDVSVKSNSSFMSRERELLGKVQLDLAETDLSQGVARWYDLMDNKDKGSS

SEQ ID NO: 49781 - protein, 1091 aa, Homo sapiens [sequence omitted]

SEQ ID NO: 49782 - protein, 174 aa, Homo sapiens
MGFAAPFTNKRKAYSERRIMGYSMQEMYEVVSNVQEYREFVPWCKKSLVVSSRKGHLKAQLEVGFPPVMERYTSAVSMVKPHMVKAVCTDGKLFNHLETIWRFSPGIPAYPRTCTVDFSISFEFRSLLHSQLATMFFDEVVKQNVAAFERRAATKFGPETAIPRELMFHEVHQT

SEQ ID NO: 49783 - protein, 264 aa, Homo sapiens
MDLIAKLPCVAAKIYRNLYREGSGIGAIDSNLDWSHNFTNMLGYTDHQFTELTRLYLTIHSDHEGGNVSAHTSHLVGSALSDPYLSFAAAMNGLAGPLHGLANQEVLVWLTQLQKEVGKDVSDEKLRDYIWNTLNSGRVVPGYGHAVLRKTDPRYTCQREFALKHLPNDPMFKLVAQLYKIVPNVLLEQGKAKNPWPNVDAHSGVLLQYYGMTEMNYYTVLFGVSRALGVLAQLIWSRALGFPLERPKSMSTEGLMKFVDSKSG

SEQ ID NO: 49784 - protein, 6 aa, Homo sapiens
MQGSGG

SEQ ID NO: 49785 - protein, 29 aa, Homo sapiens
MLLSVTSRPGISTFGYNRNNKKIWQDCFH

SEQ ID NO: 49786 - protein, 77 aa, Homo sapiens
MRAVEQTELGALWPHLSPSAGSAVCERVLCSTSVQVAQSCLPWSKPGATSSAMGPASAVWSVHLMSPRFSTLTLWPR

SEQ ID NO: 49787 - protein, 89 aa, Homo sapiens [sequence omitted]

SEQ ID NO: 49788 - protein, 278 aa, Homo sapiens
MKKYSSRFHHPILSPLESSFQLEVDVLCHLLKAQAQVSEWKFLPSLVNLHSAHTKLQTWGQIFEKQRETKKHLFGGQSQKAVQPPHLFLWLMKLKNMLLAKFSFYFHEALSRQTTASEMKTLTAKANPDFFGKISSFIRKYDAANVSLIFDNRGSESFQGHGYHHPHSYREAPKGVDQYPAVVSLPSDRPVMHWPNVIMIMTDRTSDLNSLEKVVHFYDDKVQSTYFLTRPEPHFTIVIIFESKKSERDSHFISFLNEVSLALKNPKVFASLKPGAKG

SEQ ID NO: 49789 - protein, 283 aa, Homo sapiens [sequence omitted]

SEQ ID NO: 49790 - protein, 103 aa, Homo sapiens
MVHLALGSDLTTLGLNLNSPENLYPKFASPWASSPCRPQDIDFHVPSEYLTNIHIRDKLAAIKLGRYGEDLLFYLYYMNGGDVLQLLAAVELYVQSILITFVL

SEQ ID NO: 49791 - protein, 65 aa, Homo sapiens
MVPPEWHRWLHSMTDDPPTTKPLTARKFIWTNHKFNVTGTPEQYVPYSTTRKKIQEWIPPSTPYK

SEQ ID NO: 49792 - protein, 1355 aa, Homo sapiens [sequence omitted]

SEQ ID NO: 49793 - protein, 587 aa, Homo sapiens
MGNLALGRKLWADTTCGQNATELYCFYSENTDLTCRQPKCDKCNAAYPHLAHLPSAMADSSFRFPRTWWQSAEDVHREKIQLDLEAEFYFTHLIVMFKSPRPAAMVLDRSQDFGKTWKPYKYFATNCSATFGLEDDVVKKGAICTSKYSSPFPCTGGEVIFKALSPPYDTENPYSAKVQEQLKITNLRVQLLKRQSCPCQRNDLNEEPQHFTHYAIYDFIVKGSCFCNGHADQCIPVHGFRPVKAPGTFHMVHGKCMCKHNTAGSHCQHCAPLYNDRPWEAADGKTGAPNECRTCKCNGHADTCHFDVNVWEASGNRSGGVCDDCQHNTEGQYCQRCKPGFYRDLRRPFSAPDACKPCSCHPVGSAVLPANSVTFCDPSNGDCPCKPGVAGRRCDRCMVGYWGFGDYGCRPCDCAGSCDPITGDCISSHTDIDWYHEVPDFRPVHNKSEPAWEWEDAQGFSALLHSGKCECKEQTLGNAKAFCGMKYSYVLKIKILSAHDKGTHVEVNVKIKKVLKSTKLKIFRGKRTLYPESWTDRGCTCPILNPVQQPRPKKADKKTETLHANLLPWLLWKRNNPIGYPCIFIHS

SEQ ID NO: 49794 - protein, 149 aa, Homo sapiens
MTLVDKFNPHTSPHGISSICWSSNNNFLVTASSSGDKIVVSSCKCKPVPLLELAEGQKQTCVNLNSTSMYLVSGGLNNTVNIWDLKSKRVHRSLKDHKDQVTCVTYNWNDCYIASGSLSGEIILHSVTTNLSSTPFGHGSNQALQSSVE

SEQ ID NO: 49795 - protein, 392 aa, Homo sapiens
MLVSTAASPSLIKETTTGYYKDIVENICGREKSGIQPLCPERSHISDQSPLSSKRKALEESESSQLISPPLAQAIRDYVNSLLVQGGVGSLPGTSNSMPPLDVENIQKRIDQSKFQETEFLSPPRKVPRLSEKSVEERDSGSFVAFQNIPGSELMSSFAKTVVSHSLTTLGLEVAKQSQHDKIDASELSFPFHESILKVIEEEWQQVDRQLPSLACKYPVSSREATQILSVPKVDDEILGFISEATPLGGIQAASTESCNQQLDLALCRAYEAAASALQIATHTAFVAKAMQADISQAAQILSSDPSRTHQALGILSKTYDAASYICEAAFDEVKMAAHTMGNATVGRRYLWLKDCKINLASKNKLASTPFKGGTLFGGEVCKVIKKRGNKH

SEQ ID NO: 49796 - protein, 568 aa, Homo sapiens
MIKEFRKNWRALCNSERTTLCGADSMLLALQLSMAENNKQHSGEFTVSLSDVLLTWKYLLHEKLNLPVENMDVTDHYEDVRKIYDDFLKNSNMLDLIDVYQKCRALTSNCENYNTVSPSQLLDFLSGKQYAVGDETDLSIPTSPTSKYNRDNEKVQLLARKIIFSYLNLLVNSKNDLAVAYILNIPDRGLGREAFTDLKHAAREKQMSIFLVATSFIRTIELGGKGYAPPPSDPLRTHVKGLSNFINFIDKLDEILGEIPNPSIAGGQILSVIKMQLIKGQNSRDPFCKAIEEVAQDLDLRIKNIINSQEGVVALSTTDISPARPKSHAINHGTAYCGRDTVKALLVLLDEEAANAPTKNKAELLYDEENTIHHHGTSILTLFRSPTQVNNSIKPLRERICVSMQEKKIKMKQTLIRSQFACTYKDDYMISKDNWNNVNLASKPLCVLYMENDLSEGVNPSVGRSTIGTSFGNVHLDRSKNEKVSRKSTSQTGNKSSKRKQVDLDGENILCDNRNEPPQHKNAKIPKKSNDSQNRLYGKLAKVAKSNKCTAKDKLISGQAKLTQFFRL

SEQ ID NO: 49797 - protein, 130 aa, Homo sapiens
MHTMSSSHLFYLALCLLTFTSSATAGPETLCGAELVDALQFVCGDRGFYFNKPTGYGSSSRRAPQTGIVDECCFRSCDLRRLEMYCAPLKPAKSARSVRAQRHTDMPKTQKEVHLKNASRGSAGNKNYRM

SEQ ID NO: 49798 - protein, 172 aa, Homo sapiens
MHTMSSSHLFYLALCLLTFTSSATAGPETLCGAELVDALQFVCGDRGFYFNKPTGYGSSSRRAPQTGIVDECCFRSCDLRRLEMYCAPLKPAKSARSVRAQRHTDMPKTQKYQPPSTNKNTKSQRRKGWPKTHPGGEQKEGTEASLQIRGKKKEQRREIGSRNAECRGKKGK

SEQ ID NO: 49799 - protein, 284 aa, Homo sapiens
MAAINSIYSNTDANILFYVVGLRNTLTRIRKWIEHSKLREINFKIVEFNPMVLKGKIRPDSSRPELLQPLNFVRFYLPLLIHQHEKVIYLDDDVIVQGDIQELYDTTLALGHAAAFSDDCDLPSAQDINRLVGLQNTYMGYLDYRKKAIKDLGISPSTCSFNPGVIVANMTEWKHQRITKQLEKWMQKNVEENLYSSSLGGGVATSPMLIVFHGKYSTINPLWHIRHLGWNPDARYSEHFLQEAKLLHWNGRHKPWDFPSVHNDLWESWFVPDPAGIFKLNHHS

SEQ ID NO: 49800 - protein, 490 aa, Homo sapiens
MEYHSFSEQSFHANNGHASSSCSQKYDDYANYNYCDGRETSETTAMLQDEDISSDGDEDAIVEVTPKLPKESSGIMALQILVPFLLAGFGTVSAGMVLDIVQHWEVFRKVTEVFILVPALLGLKGNLEMTLASRLSTAVNIGKMDSPIEKWNLIIGNLALKQVQATVVGFLAAVAAIILGWIPEGKYYLDHSILLCSSSVATAFIASLLQGIIMVGVIVGSKKTGINPDNVATPIAASFGDLITLAILAWISQGLYSCLETYYYISPLVGVFFLALTPIWIIIAAKHPATRTVLHSGWEPVITAMVISSIGGLILDTTVSDPNLVGIVVYTPVINGIGGNLVAIQASRISTYLHLHSIPGELPDEPKGCYYPFRTFFGPGVNNKSAQVLLLLVIPGHLIFLYTIHLMKSGHTSLTIIFIVVYLFGAVLQVFTLLWIADWMVHHFWRKGKDPDSFSIPYLTALGDLLGTALLALSFHFLWLIGDRDGDVGD

SEQ ID NO: 49801 - protein, 931 aa, Homo sapiens
MGPAWDQQEEGVSESDGDEYAMASSAESSPGEYEWEYDEEEEKNQLEIERLEEQLSINVYDYNCHVDLIRLLRLEGELTKVRMARQKMSEIFPLTEELWLEWLHDEISMAQDGLDREHVYDLFEKAVKDYICPNIWLEYGQYSVGGIGQKGGLEKVRSVFERALSSVGLHMTKGLALWEAYREFESAIVEAARPVAGFLSPFDREQTFDSQLEKVHSLFRRQLAIPLYDMEATFAEYEEWSEDPIPESVIQNYNKALQQLEKYKPYEEALLQAEAPRLAEYQAYIDFEMKIGDPARIQLIFERALVENCLVPDLWIRYSQYLDRQLKVKDLVLSVHNRAIRNCPWTVALWSRYLLAMERHGVDHQVISVTFEKALNAGFIQATDYVEIWQAYLDYLRRRVDFKQDSSKELEELRAAFTRALEYLKQEVEERFNESGDPSCVIMQNWARIEARLCNNMQKARELWDSIMTRGNAKYANMWLEYYNLERAHGDTQHCRKALHRAVQCTSDYPEHVCEVLLTMERTEGSLEDWDIAVQKTETRLARVNEQRMKAAEKEAALVQQEEEKAEQRKRARAEKKALKKKKKIRGPEKRGADEDDEKEWGDDEEEQPSKRRRVENSIPAAGETQNVEVAAGPAGKCAAVDVEPPSKQKEKAASLKRDMPKVLHDSSKDSITVFVSNLPYSMQEPDTKLRPLFEACGEVVQIRPIFSNRGDFRGYCYVEFKEEKSALQALEMDRKSVEGRPMFVSPCVDKSKNPDFKVFRYSTSLEKHKLFISGLPFSCTKEELEEICKAHGTVKDLRLVTNRAGKPKGLAYVEYENESQASQAVMKMDGMTIKENIIKVAISNPPQRKVPEKPETRKAPGGPMLLPQTYGARGKGRTQLSLLPRALQRPSAAAPQAENGPAAAPAVAAPAATEAPKMSNADFAKLFLRK

SEQ ID NO: 49802 - protein, 877 aa, Homo sapiens
MGPAWDQQEEGVSESDGDEYAMASSAESSPGEYEWEYDEEEEKNQLEIERLEEQLSINVYDYNCHVDLIRLLRLEGELTKVRMARQKMSEIFPLTEELWLEWLHDEISMAQDGLDREHVYDLFEKAVKDYICPNIWLEYGQYSVGGIGQKGGLEKVRSVFERALSSVGLHMTKGLALWEAYREFESAIVEAARLEKVHSLFRRQLAIPLYDMEATFAEYEEWSEDPIPESVIQNYNKALQQLEKYKPYEEALLQAEAPRLAEYQAYIDFEMKIGDPARIQLIFERALVENCLVPDLWIRYSQYLDRQLKVKDLVLSVHNRAIRNCPWTVALWSRYLLAMERHGVDHQVISDSSKELEELRAAFTRALEYLKQEVEERFNESGDPSCVIMQNWARIEARLCNNMQKARELWDSIMTRGNAKYANMWLEYYNLERAHGDTQHCRKALHRAVQCTSDYPEHVCEVLLTMERTEGSLEDWDIAVQKTETRLARVNEQRMKAAEKEAALVQQEEEKAEQRKRARAEKKALKKKKKIRGPEKRGADEDDEKEWGDDEEEQPSKRRRVENSIPAAGETQNVEVAAGPAGKCAAVDVEPPSKQKEKAASLKRDMPKVLHDSSKDSITVFVSNLPYSMQEPDTKLRPLFEACGEVVQIRPIFSNRGDFRGYCYVEFKEEKSALQALEMDRKSVEGRPMFVSPCVDKSKNPDFKVFRYSTSLEKHKLFISGLPFSCTKEELEEICKAHGTVKDLRLVTNRAGKPKGLAYVEYENESQASQAVMKMDGMTIKENIIKVAISNPPQRKVPEKPETRKAPGGPMLLPQTYGARGKGRTQLSLLPRALQRPSAAAPQAENGPAAAPAVAAPAATEAPKMSNADFAKLFLRK

SEQ ID NO: 49803 - protein, 199 aa, Homo sapiens [sequence omitted]

SEQ ID NO: 49804 - protein, 673 aa, Homo sapiens [sequence omitted]

SEQ ID NO: 49805 - protein, 595 aa, Homo sapiens
MSGRRKANPQDKVHPNKAEFIRAKYQMLAFVHRLPCRDDDSVTAKDLSKQLHSSVRTGNLETCLRLLSLGAQANFFHPEKGNTPLHVASKAGQILQAELLAVYGADPGTQDSSGKTPVDYARQGGHHELAERLVEIQYELTDRLAFYLCGRKPDHKNGQHFIIPQMADRRLSLDLSELAKAAKKKLQSLSNHLFEELAMDVYDEVDRRETDAVWLATQNHSALVTETTVVPFLPVNPEYSSTRNQGRQKLARFNAHEFATLVIDILSDAKRRQQGSSLSGSKDNVELILKTINNQHSVESQDNDQPDYDSVASDEDTDLETTASKTNRQKLQTLQSENSNLRKQATTNVYQVQTGSEYTDTSNHSSLKRRPSARGSRPMSMYETGSGQKPYLPMGEASRPEESRMRLQPFPAHASRLEKQNSTPESDYDNTPNDMEPDGMGSSRKGRQRSMVWPGDGLVPDTAEPHVAPSPTLPSTEDVIRKTEQITKNIQELLRAAQENKHDSYIPCSERIHVAVTEMAALFPKKPKSDMVRTSLRLLTSSAYRLQSECKKTLPGDPGSPTDVQLVTQQVIQCAYDIAKAAKQLVTITTKENNN

SEQ ID NO: 49806 - protein, 622 aa, Homo sapiens
MSGRRKANPQDKVHPNKAEFIRAKYQMLAFVHRLPCRDDDSVTAKDLSKQLHSSVRTGNLETCLRLLSLGAQANFFHPEKGNTPLHVASKAGQILQAELLAVYGADPGTQDSSGKTPVDYARQGGHHELAERLVEIQYELTDRLAFYLCGRKPDHKNGQHFIIPQMADSLDLSELAKAAKKKLQSLSNHLFEELAMDVYDEVDRRETDAVWLATQNHSALVTETTVVPFLPVNPEYSSTRNQGRQKLARFNAHEFATLVIDILSDAKRRQQGSSLSGSKDNVELILKTINNQHSVESQDNDQPDYDSVASDEDTDLETTASKTNRQKLQTLQSENSNLRKQATTNVYQVQTGSEYTDTSNHSSLKRRPSARGSRPMSMYETGSGQKPYLPMGEASRPEESRMRLQPFPAHIGRSALVTSSSSLPSFPSTLSWSRDESARRASRLEKQNSTPESDYDNTPNDMEPDGMGSSRKGRQRSMVWPGDGLVPDTAEPHVAPSPTLPSTEDVIRKTEQITKNIQELLRAAQENKHDSYIPCSERIHVAVTEMAALFPKKPKSDMVRTSLRLLTSSAYRLQSECKKTLPGDPGSPTDVQLVTQQVIQCAYDIAKAAKQLVTITTKENNN

SEQ ID NO: 49807 - protein, 335 aa, Homo sapiens
MSGRRKANPQDKVHPNKAEFIRAKYQMLAFVHRLPCRDDDSVTAKDLSKQLHSSVRTGNLETCLRLLSLGAQANFFHPEKGNTPLHVASKAGQILQAELLAVYGADPGTQDSSGKTPVDYARQGGHHELAERLVEIQYELTDRLAFYLCGRKPDHKNGQHFIIPQMADSSLDLSELAKAAKKKLQSLSNHLFEELAMDVYDEVDRRETDAVWLATQNHSALVTETTVVPFLPVNPEYSSTRNQGRQKLARFNAHEFATLVIDILSDAKRRQQGSSLSGSKDNVELILKTINNQHSVESQDNDQPDYDSVASDEDTDLETTASKTNRQKLLGKDAN

SEQ ID NO: 49808 - protein, 385 aa, Homo sapiens
MSGRRKANPQDKVHPNKAEFIRAKYQMLAFVHRLPCRDDDSVTAKDLSKQLHSSVRTGNLETCLRLLSLGAQANFFHPEKGNTPLHVASKAGQILQAELLAVYGADPGTQDSSGKTPVDYARQGGHHELAERLVEIQYELTDRLAFYLCGRKPDHKNGQHFIIPQMADSSLDLSELAKAAKKKLQSLSNHLFEELAMDVYDEVDRRETDAVWLATQNHSALVTETTVVPFLPVNPEYSSTRNQGRQKLARFNAHEFATLVIDILSDAKRRQQGSSLSGSKDNVELILKTINNQHSVESQDNDQPDYDSVASDEDTDLETTASKTNRQKSLDSDLSDGPVTVQEFMEVKNALVASEAKIQQLMKVNNNLSDELRIMQKKLLGKDAN

SEQ ID NO: 49809 - protein, 645 aa, Homo sapiens
MQLLQVLSDVLAEIDPKQLVDIREEMPEQTAKRMLSLLGILKYKPSGNATDMSTFRQGLVIGSKPVIYPVLHWLLQRTNELKKRAYLARFLIKLEVPSEFLQDETVADTNKQYEELMEAFKTLHKEYEQLKISGFSTAEIRKDISAMEEEKDQLIKRVEHLKKRVETAQNHQWMLKIARQLRVEKEREEYLAQQKQEQKNQLFHAVQRLQRVQNQLKSMRQAAADAKPESLMKRLEEEIKFNLYMVTEKFPKELENKKKELHFLQKVVSEPAMGHSDLLELESKINEINTEINQLIEKKMMRNEPIEGKLSLYRQQASIISRKKEAKAEELQEAKEKLASLEREASVKRNQTREFDGTEVLKGDEFKRYVNKLRSKSTVFKKKHQIIAELKAEFGLLQRTEELLKQRHENIQQQLQTMEEKKGISGYSYTQEELERVSALKSEVDEMKGRTLDDMSEMVKKLYSLVSEKKSALASVIKELRQLRQKYQELTQECDEKKSQYDSCAAGLESNRSKLEQEVRRLREECLQEESRYHYTNCMIKNLEVQLRRATDEMKAYISSDQQEKRKAIREQYTKNTAEQENLGKKLREKQKVIRESHGPNMKQAKMWRDLEQLMECKKQCFLKQQSQTSIGQVIQEGGEDRLIL

SEQ ID NO: 49810 - protein, 400 aa, Homo sapiens
MQLLQVLSDVLAEIDPKQLVDIREEMPEQTAKRMLSLLGILKYKPSGNATDMSTFRQGLVIGSKPVIYPVLHWLLQRTNELKKRAYLARFLIKLEVPSEFLQDETVADTNKQYEELMEAFKTLHKEYEQLKISGFSTAEIRKDISAMEEEKDQLIKRVEHLKKRVETAQNHQWMLKIARQLRVEKEREEYLAQQKQEQKNQLFHAVQRLQRVQNQLKSMRQAAADAKPESLMKRLEEEIKFNLYMVTEKFPKELENKKKELHFLQKVVSEPAMGHSDLLELESKINEINTEINQLIEKKMMRNEPIEGKLSLYRQQASIISRKKEAKAEELQEAKEKLASLEREASVKRNQTREFDGTEVLKGDERQDLTLSPRLECGGVIMAYCSLKLLGSSDPPTSAS

SEQ ID NO: 49811 - protein, 262 aa, Homo sapiens
MVQHCEALNRSVQVVNLDPAAEHFNYSVMADIRELIEVDDVMEDDSLRFGPNGGLVFCMEYFANNFDWLENCLGHVEDDYILFDCPGQIELYTHLPVMKQLVQQLEQWEFRVCGVFLVDSQFMVESFKFISGILAALSAMISLEIPQVNIMTKMDLLSKKAKKEIEKFLDPDMYSLLEDSTSDLRSKKFKKLTKAICGLIDDYSMVRFLPYDQSDEESMNIVLQHIDFAIQYGEDLEFKEPKEREDESSSMFDEYFQECQDE

SEQ ID NO: 49812 - protein, 317 aa, Homo sapiens
MYPVPVSPGVQPLYPIPMTPMPVNQAKTYRAGKVPNMPQQRQDQHHQSAMMHPASAAGPPIAATPPAYSTQYVAYSPQQFPNQPLVQHVPHYQSQHPHVYSPVIQGNARMMAPPTHAQPGLVSSSATQYGAHEQTHAMYACPKLPYNKETSPSFYFAISTGSLAQQYAHPNATLHPHTPHPQPSATPTGQQQSQHGGSHPAPSPVQHHQHQAAQALHLASPQQQSAIYHAGLAPTPPSMTPASNTQSPQNSFPAAQQTVFTIHPSHVQPAYTNPPHMAHVPQYKPTTNSSCKAALEEPKGQIPSSLLLLLPTGSTEN

SEQ ID NO: 49813 - protein, 899 aa, Homo sapiens
MDSSYAKRDAFTDSAISAKVNGEHKEKDLEPWDAGELTANEELEALENDVSNGWDPNDMFRYNEENYGVVSTYDSSLSSYTVPLERDNSEEFLKREARANQLAEEIESSAQYKARVALENDDRSEEEKYTAVQRNSSEREGHSINTRENKYIPPGQRNREVISWGSGRQNSPRMGQPGSGSMPSRSTSHTSDFNPNSGSDQRVVNGVFILSFISFVLSGVPWPSPCPSPSSRPPSRYQSGPNSLPPRAATPTRPPSRPPSRPSRPPSHPSAHGSPAPVSTMPKRMSSEGPPRMSPKAQRHPRNHRVSAGRGSISSGLEFVSHNPPSEAATPPVARTSPSGGTWSSVVSGAKDSRLQDQRQNSPAGNKENIKPNETSPSFSKAENKGISPVVSEHRKQIDDLKKFKNDFRLQPSSTSESMDQLLNKNREGEKSRDLIKDKIEPSAKDSFIENSSSNCTSGSSKPNSPSISPSILSNTEHKRGPEVTSQGVQTSSPACKQEKDDKEEKKDAAEQVRKSTLNPNAKEFNPRSFSQPKPSTTPTSPRPQAQPSPSMVGHQQPTPVYTQPVCFAPNMMYPVPVSPGVQPLYPIPMTPMPVNQAKTYRAVPNMPQQRQDQHHQSAMMHPASAAGPPIAATPPAYSTQYVAYSPQQFPNQPLVQHVPHYQSQHPHVYSPVIQGNARMMAPPTHAQPGLVSSSATQYGAHEQTHAMYVSTGSLAQQYAHPNATLHPHTPHPQPSATPTGQQQSQHGGSHPAPSPVQHHQHQAAQALHLASPQQQSAIYHAGLAPTPPSMTPASNTQSPQNSFPAAQQTVFTIHPSHVQPAYTNPPHMAHVPQAHVQSGMVPSHPTAHAPMMLMTTQPPGGPQAALAQSALQPIPVSTTAHFPYMTHPSVQAHHQQQL

SEQ ID NO: 49814 - protein, 877 aa, Homo sapiens
MEGICKPDPRIYKLCLEQLGLQPSESIFLDDLGTNLKEAARLGIHTIKVNDPETAVKELEALLGFTLRVGVPNTRPVKKTMEIPKDSLQKYLKDLLGIQTTGPLELLQFDHGQSNPTYYIRLANRDLVLRKKPPGTLLPSAHAIEREFRIMKALANAGVPVPNVLDLCEDSSVIGTPFYVMEYCPGLIYKDPSLPGLEPSHRRAIYTAMNTVLCKIHSVDLQAVGLEDYGKQGDYIPRQVRTWVKQYRASETSTIPAMERLIEWLPLHLPRQQRTTVVHGDFRLDNLVFHPEEPEVLAVLDWELSTLGDPLADVAYSCLAHYLPSSFPVLRGINDCDLTQLGIPAAEEYFRMYCLQMGLPPTENWNFYMAFSFFRVAAILQGVYKRSLTGQASSTYAEQTGKLTEFVSNLAWDFAVKEGFRVFKEMPFTNPLTRSYHTWARPQSQWCPTGSRSYSSVPEASPAHTSRGGLVISPESLSPPVRELYHRLKHFMEQRVYPAEPELQSHQASAARWSPSPLIEDLKEKAKAEGLWNLFLPLEADPEKKYGAGLTNVEYAHLCELMGTSLYAPEVCNCSAPDTGNMELLVRYGTEAQKARWLIPLLEGKARSCFAMTEPQVASSDATNIEASIREEDSFYVINGHKWWITGILDPRCQLCVFMGKTDPHAPRHRQQSVLLVPMDTPGIKIIRPLTVYGLEDAPGGHGEVRFEHVRVPKENMVLGPGRGFEIAQGRLGPGRIHHCMRLIGFSERALALMKARVKSRLAFGKPLVEQGTVLADIAQSRVEIEQARLLVLRAAHLMDLAGNKAAALDIAMIKMVAPSMASRVIDRAIQAFGAAGLSSDYPLAQFFTWARALRFADGPDEVHRATVAKLELKHRI

SEQ ID NO: 49815 - protein, 177 aa, Homo sapiens
MAELPPSANTSVCSTLYFYGIAIFLGSFVLSLLTIMVLLIRAQTLYKKFVKSTGFLGSEQWAVIHIVDQRVRFYPVAFFCCWGPAVILMIIKLTKPQDTKLHMALYVLQALTATSQGLLNCGVYGWTQHKFHQLKQEARRDADTQTPLLCSQKRFYSRGLNSLESTLTFPASTSTIF

SEQ ID NO: 49816 - protein, 881 aa, Homo sapiens
MHRPELVTKLYEAAVKKVPNSEEYHSHLFMAYARVGEYKKMQQAGMALYKIVPKNPYYFWSVMSLIMQSISAQDENLSKTMFLPLAERMVEKMVKEDKIEAEAEVELYYMILERLGKYQEALDVIRGKLGEKLTSEIQSRENKCMAMYKKLSRWPECNALSRRLLLKNSDDWQFYLTYFDSVFRLIEEAWSPPAEGEHSLEGEVHYSAEKAVKFIEDRITEESKSSRHLRGPHLAKLELIRRLRSQGCNDEYKLGDPEELMFQYFKKFGDKPCCFTDLKVFVDLLPATQCTKFINQLLGVVPLSTPTEDKLALPADIRALQQHLCVVQLTRLLGLYHTMDKNQKLSVVRELMLRYQHGLEFGKTCLKTELQFSDYYCLLAVHALIDVWRETGDETTVWQALTLLEEGLTHSPSNAQFKLLLVRIYCMLGAFEPVVDLYSSLDAKHIQHDTIGYLLTRYAESLGQYAAASQSCNFALRFFHSNQKDTSEYIIQAYKYGAFEKIPEFIAFRNRLNNSLHFAQVRTERMLLDLLLEANISTSLAESIKSMNLRPEEDDIPWEDLRDNRDLNVFFSWDPKDRDVSEEHKKLSLEEETLWLRIRSLTLRLISGLPSLNHPVEPKNSEKTAENGVSSRIDILRLLLQQLEATLETGKRFIEKDIQYPFLGPVPTRMGGFFNSGCSQCQISSFYLVNDIYELDTSGLEDTMEIQERIENSFKSLLDQLKDVFSKCKGDLLEVKDGNLKTHPTLLENLVFFVETISVILWVSSYCESVLRPYKLNLQKKKKKKKETSIIMPPVFTSFQDYVTGLQTLISNVVDHIKGLETHLIALKLEELILEDTSLSPEERKFSKTVQGKVQSSYLHSLLEMGELLKKRLETTKKLKI

SEQ ID NO: 49817 - protein, 271 aa, Homo sapiens
MAKKGCRHLVCSSGGNAGIAAAYAARKLGIPATIVLPESTSLQVVQRLQGEGAEVQLTGKVWDEANLRAQELAKRDGWENVPPFDHPLIWKGHASLVQELKAVLRTPPGALVLAVGGGGLLAGVVAGLLEVGWQHVPIIAMETHGAHCFNAAITAGKLVTLPDITSVAKSLGAKTVAARALECMQVCKIHSEVVEDTEAVSAVQQLLDDERMLVEPACGAALAAIYSGLLRRLQAEGCLPPSLTSVVVIVCGGNNINSRELQALKTHLGQV

SEQ ID NO: 49818 - protein, 239 aa, Homo sapiens
MRDPVIPGTSMAYHPFLPHRAPDFAMSAVLGHQPPFFPALTLPPNGAAALSLPGALAKPIMDQLVGAAETGIPFSSLGPQAHLRPLKTMEPEEEVEDDPKVHLEAKELWDQFHKRGTEMVITKSGRRMFPPFKVRCSGLDKKAKYILLMDIIAADDCRYKFHNSRWMVAGKADPEMPKRMYIHPDSPATGEQWMSKVVTFHKLKLTNNISDKHGFVSFIALFSKIFSSFTQSKAVLPIS

SEQ ID NO: 49819 - protein, 216 aa, Homo sapiens [sequence omitted]

SEQ ID NO: 49820 - protein, 278 aa, Homo sapiens
MQQIRMSLRGKAVVLMGKNTMMRKAIRGHLENNPALEKLLPHIRGNVGFVFTKEDLTEIRDMLLANKVPAAARAGAIAPCEVTVPAQNTGLGPEKTSFFQALGITTKISRGTIEILSDVQLIKTGDKVGASEATLLNMLNISPFSFGLVIQQVFDNGSIYNPEVLDITEETLHSRFLEGVRNVASVCLQIGYPTVASVPHSIINGYKRVLALSVETDYTFPLAEKVKAFLADPSAFVAAAPVAAATTAAPAAAAAPAKVEAKEESEESDEDMGFGLFD

SEQ ID NO: 49821 - protein, 242 aa, Homo sapiens
MQQIRMSLRGKAVVLMGKNTMMRKAIRGHLENNPALEKLLPHIRGNVGFVFTKEDLTEIRDMLLANKVPAAARAGAIAPCEVTVPAQNTGLGPEKTSFFQALGITTKISRGTIEILVFDNGSIYNPEVLDITEETLHSRFLEGVRNVASVCLQIGYPTVASVPHSIINGYKRVLALSVETDYTFPLAEKVKAFLADPSAFVAAAPVAAATTAAPAAAAAPAKVEAKEESEESDEDMGFGLFD

SEQ ID NO: 49822 - protein, 100 aa, Homo sapiens
MAVVGVSSVSRLLGRSRPQLGRPMSSGAHGEEGSARMWKTLTFFVALPGVAVSMLNVYLKSHHGEHERPEFIAYPHLRIRTKVRPCTSLQASVLFSLCVP

SEQ ID NO: 49823 - protein, 91 aa, Homo sapiens [sequence omitted]

SEQ ID NO: 49824 - protein, 520 aa, Homo sapiens
MKREKGVLVALPKSKWMNVDHPIHLGDEQHSQYSKLLLASKEQVLHRVVLEEKVALEQQLAEEKHTPESCFIEAAIQELKTREEALSGLAGSRREVTGVVAALEQLVLMAPLAKESVFQPRKSLLQQGVLEYLSAFDEETTEVCSLDTPSRPLALPLVEEEEAVSEPEPEGLPEACDDLELADDNLKEGTICTESSQQEPITKSGFTRLSSSPCYYFYQAEDGQHMFLHPVNVRCLVREYGSLERSPEKISATVVEIAGYSMSEDVRQRHRYLSHLPLTCEFSICELALQPPVVSKETLEMFSDDIEKRKRQRQKKAREERRRERRIEIEENKKQGKYPEVHIPLENLQQFPAFNSYTCSSDSALGPTSTEGHGALSISPLSRSPGSHADFLLTPLSPTASQGSPSFCVGSLEEDSPFPSFAQMLRVGKAKADVWPKTAPKKDENSLVPPAPVDSDGESDNSDRVPVPSFQNSFSQAIEAAFMKLDTPATSDPLSEEKGGKKRKKQKQKLLFSTSVVHTK

SEQ ID NO: 49825 - protein, 365 aa, Homo sapiens
MWASCCGLLNEVMGTGAVRGQQSAFAGATGPFRFTPNPEFSTYPPAATEGPNIVCKACGLSFSVFRKKHVCCDCKKDFCSVCSVLQENLRRCSTCHLLQETAFQRPQLMRLKVKDLRQYLILRNIPIDTCREKEDLVDLVLCHHGLGSEDDMDTSSLNSSRSQTSSFFTRSFFSNYTAPSATMSSFQGELMDGDQTSRSGVPAQVQSEITSANTEDDDDDDDEDDDDEEENAEDRNPGLSKERVRASLSDLSSLDDVEGMSVRQLKEILARNFVNYSGCCEKWELVEKVNRLYKENEENQKSYGERLQLQDEEDDSLCRICMDAVIDCVLLECGHMVTCTKCGKRMSECPICRQYVVRAVHVFKS

SEQ ID NO: 49826 - protein, 1869 aa, Homo sapiens
MEILYSLEVSSVSSLVQTGISTDTIYLLEGVCKNDPKLSEDSVSVLVLRCLTEALPENRLSRLLHKHRFAEAESFAIQFGLDVELVYKVKSNHILEKLALSSVDASEQTEWQQLVDDAKENLHKIQDDEFVVNYCLKAQWITYETTQEMLNYAKTRLLKKEDKTALIYSDGLKEVLRAHAKLTTFYGAFGPEKFSGSSWIEFLNNEDDLKDIFLQLKEGNLVCAQYLWLRHRANFESRFDVKMLESLLNSMSASVSLQKLCPWFKNDVIPFVRRTVPEGQIILAKWLEQAARNLELTDKANWPENGLQLAEIFFTAEKTDELGLASSWHWISLKDYQNTEEVCQLRTLVNNLRELITLHRKYNCKLALSDFEKENTTTIVFRMFDKVLAPELIPSILEKFIRVYMREHDLQEEELLLLYIEDLLNRCSSKSTSLFETAWEAKAMAVIACLSDTDLIFDAVLKIMYAAVVPWSAAVEQLVKQHLEMDHPKVKLLQESYKLMEMKKLLRGYGIREVNLLNKEIMRVVRYILKQDVPSSLEDALKVAQAFMLSDDEIYSLRIIDLIDREQGEDCLLLLKSLPPAEAEKTAERVIIWARLALQEEPDHSKEGKAWRMSVAKTSVDILKILCDIQKDNLQKKDECEEMLKLFKEVASLQENFEVFLSFEDYSNSSLVADLREQHIKAHEVAQAKHKPGSTPEPIAAEVRSPSMESKLHRQALALQMSKQELEAELTLRALKDGNIKTALKKCSDLFKYHCNADTGKLLFLTCQKLCQMLADNVPVTVPVGLNLPSMIHDLASQAATICSPDFLLDALELCKHTLMAVELSRQCQMDDCGILMKASFGTHKDPYEEWSYSDFFSEDGIVLESQMVLPVIYELISSLVPLAESKRYPLESTSLPYCSLNEGDGLVLPVINSISALLQNLQESSQWELALRFVVGSFGTCLQHSVSNFMNATLSEKLFGETTLVKSRHVVMELKEKAVIFIRENATTLLHKVFNCRLVDLDLALGYCTLLPQKDVFENLWKLIDKAWQNYDKILAISLVGSELASLYQEIEMGLKFRELSTDAQWGIRLGKLGISFQPVFRQHFLTKKDLIKALVENIDMDTSLILEYCSTFQLDCDAVLQLFIETLLHNTNAGQGQGDASMDSAKRRHPKLLAKALEMVPLLTSTKDLVISLSGILHKLDPYDYEMIEVVLKVIERADEKITNININQALSILKHLKSYRRISPPVDLEYQYMLEHVITLPSAAQTRLPFHLIFFGTAQNFWKILSTELSEESFPTLLLISKLMKFSLDTLYVSTAKHVFEKKLKPKLLKLTQAKSSTLINKEITKITQTIESCLLSIVNPEWAVAIAISLAQDIPEGSFKISALKFCLYLAERWLQNIPSQDEKREKAEALLKKLHIQYRRSGTEAVLIAHKLNTEEYLRVIGKPAHLIVSLYEHPSINQRIQNSSGTDYPDIHAAAKEIAEVNEINLEKVWDMLLEKWLCPSTKPGEKPSELFELQEDEALRRVQYLLLSRPIDYSSRMLFVFATSTTTTLGMHQLTFAHRTRALQCLFYLADKETIESLFKKPIEEVKSYLRCITFLASFETLNIPITYELFCSSPKEGMIKGLWKNHSHESMAVRLVTELCLEYKIYDLQLWNGLLQKLLGFNMIPYLRKVLKAISSIHSLWQVPYFSKAWQRVIQIPLLSASCPLSPDQLSDCSESLIAVLECPVSGDLDLIGVARQYIQLELPAFALACLMLMPHSEKRHQQIKNFLGSCDPQVILKQLEEHMNTGQLAGFSHQIRSLILNNIINKKEFGILAKTKYFQMLKMHAMNTNNITELVNYLANDLSLDEASVLITEYSKHCGKPVPPDTAPCEILKMFLSGLS

SEQ ID NO: 49827 - protein, 662 aa, Homo sapiens [sequence omitted]

SEQ ID NO: 49828 - protein, 638 aa, Homo sapiens
MLENYSNLVFLGFQILKPDAMFKLEQQDPWIIGQEILNQNFSEVWLDNPKMWLRDNQDNLKSMERGHKYDVFGKIFNSSINIVHVGLRSHKCGTGEKSLKCPFDLLIPKNNCERKKIDELNKKLLFCIKPGRTHGGIKYCDCSTCRKSSNEEPWLTANHITHTGVYLCMECGRFFNKKSQLVIHQRTHTGEKPYQCSECGKAFSQKSLLTVHQRTHSGEKPHGCSECQKAFSRKSLLILHQRIHTGEKPYGCSECGKAFSRKSQLKRHQITHTIEKPYSCSECGKAFSQKLKLITHQRAHTGEKPYPCSHCGKAFFWKSQLITHQRTHTGKKPYGCGECQKAFSRNSLLIRHQRIHTGEKPYECNECGEAFIRKPQLIKHQITHTGEKNYRCSDCEEAFFKKSELIRHQKIHLGEKPYGCIQCGKTFFGKSQLLTHHRTHTGEKPYECSECGKAFTQKSSLISHQRTHTGEKPYECSECRKTFSEKSSLIHHQRTHTGEKPFECSECRKAFAWKPQLLRHQRIHTGEKPYECSECGKAFVQKVQLIKHQRNHTGEKTYGCSDCAKAFFEKAQLIIHQRIHTGERPYKCGECGKSFTRKSHLMRHQRIHTGDKYYGCNECGTTFNRKSQLMIHQRNHII

SEQ ID NO: 49829 - protein, 794 aa, Homo sapiens
MKTEGGKVLYKVRWKGYTSDDDTWEPEIHLEDCKEVLLEFRKKIAENKAKAVRKDIQRLSLNNDIFEANSDSDQQSETKEDTSPKKKKKKLRQREEKSPDDLKKKKAKAGKLKDKSKPDLESSLESLVFDLRTKKRISEAKEELKESKKPKKDEVKETKELKKVKKGEIRDLKTKTREDPKENRKTKKEKFVESQVESESSVLNDSPFPEDDSEGLHSDSREEKQNTKSARERAGQDMGLEHGFEKPLDSAMSAEEDTDVRGRRKKKTPRKAEDTRENRKLENKNAFLEKKTVPKKQRNQDRSKSAAELEKLMPVSAQTPKGRRLSGEERGLWSTDSAEEDKETKRNESKEKYQKRHDSDKEEKGRKEPKGLKTLKEIRNAFDLFKLTPEEKNDVSENNRKREEIPLDFKTIDDHKTKENKQSLKERRNTRDETDTWAYIAAEGDQEVLDSVCQADENSDGRQQILSLGMDLQLEWMKLEDFQKHLDGKDENFAATDAIPSNVLRDAVKNGDYITVKVALNSNEEYNLDQEDSSGMTLVMLAAAGGQDDLLRLLITKGAKVNGRQKNGTTALIHAAEKNFLTTVAILLEAGAFVNVQQSNGETALMKACKRGNSDIVRLVIECGADCNILSKHQNSALHFAKQSNNVLVYDLLKNHLETLSRVAEETIKDYFEARLALLEPVFPIACHRLCEGPDFSTDFNYKPPQNIPEGSGILLFIFHANFLGKEVIARLCGPCSVQAVVLNDKFQLPVFLDSHFVYSFSPVAGPNKLFIRLTEAPSAKVKLLIGAYRVQLQ

SEQ ID NO: 49830 - protein, 283 aa, Homo sapiens
MPSKSTGNNILVIGGQQKRFCCQSCINEYKQMMETKSKKLTASENRKRNAFREENEKQLYGSSNTLLKKIEGIPEKKEKTSQLQLSVECGTDTLLIQENVNLPPSSTSTIADTFQEQLEEKNFEDSIVPVVLSADPGTWPRILNIKQRDTLVENVPPQVRNFNFPKDNTGRKFSETYYTRILPNGEKTTRSWLLYSTSKDSVFCLYCKLFGEGKNQLKNENGCKDWQHLSHILSKHEESEMHVNNSVKYSKLKSDLKKNKAIDAAEHRLYENEKNDGVLLLYT

SEQ ID NO: 49831 - protein, 331 aa, Homo sapiens [sequence omitted]

SEQ ID NO: 49832 - protein, 753 aa, Homo sapiens [sequence omitted]

SEQ ID NO: 49833 - protein, 570 aa, Homo sapiens
MPGNRPDVIESIDSQVLQEARPPLVSADDEIYSTSKAFIGPIYKPPEKKKRNEGRNEAHVLNGINDRGGQKEKQKFNSEKSEIDNELFQFYKEIEELEKEKDGFENSCKESEPSQEQFVPFYEGHNNGLLKPDEEKKDLSNKAMPSHCDYQQNLGNEPDKYPCNGQVIPTFCDTSFTSFRPEWQSVYPFIVPYGPPLPSLNYHLNIQRFSGPPNPPSNIFQAQDDSQIQNGYYVNNCHVNWNCMTFDQNNEYTDCSENRSSVHPSGNGCSMQDRYVSNGFCEVRERCWKDHCMDKHNGTDRFVNQQFQEEKLNKLQKLLILLRGLPGSGKTTLSRILLGQNRDGIVFSTDDYFHHQDGYRYNVNQLGDAHDWNQNRAKQAIDQGRSPVIIDNTNIQAWEMKPYVEVAIGKGYRVEFHEPETWWKFDPEELEKRNKHGVSRKKIAQMLDRYEYQMSISIVMNSVEPSHKSTQRPPPPQGRQRFDRKLKRWEEPKELPAEDSQDLTSTDYRSLELPLSQGFAFQLVKLFGSPGVPMESLLPDDYVVPLDWKTLKMIYLQWKMSVEKRQKKIG

SEQ ID NO: 49834 - protein, 125 aa, Homo sapiens [sequence omitted]

SEQ ID NO: 49835 - protein, 1088 aa, Homo sapiens [sequence omitted]

SEQ ID NO: 49836 - protein, 2805 aa, Homo sapiens
MFTAILRKSVRNLQTSTEVGLIEQVLLKMSAVDDMIADLLVDMLGVLASYSITVKELKLLFSMLRGESGIWPRHAVKLLSVLNQMPQRHGPDTFFNFPGCSAAAIALPPIAKWPYQNGFTLNTWFRMDPLNNINVDKDKPYLYCFRTSKGVGYSAHFVGNCLIVTSLKSKGKGFQHCVKYDFQPRKWYMISIVHIYNRWRNSEIRCYVNGQLVSYGDMAWHVNTNDSYDKCFLGSSETADANRVFCGQLGAVYVFSEALNPAQIFAIHQLGPGYKSTFKFKSESDIHLAEHHKQVLYDGKLASSIAFTYNAKATDAQLCLESSPKENASIFVHSPHALMLQDVKAIVTHSIHSAIHSIGGIQVLFPLFAQLDNRQLNDSQVETTVCATLLAFLVELLKSSVAMQEQMLGGKGFLVIGYLLEKSSRVHITRAVLEQFLSFAKYLDGLSHGAPLLKQLCDHILFNPAIWIHTPAKVQLSLYTYLSAEFIGTATIYTTIRRVGTVLQLMHTLKYYYWVINPADSSGITPKGLDGPRPSQKEIISLRAFMLLFLKQLILKDRGVKEDELQSILNYLLTMHEDENIHDVLQLLVALMSEHPASMIPAFDQRNGIRVIYKLLASKSESIWVQALKVLGYFLKHLGHKRKVEIMHTHSLFTLLGERLMLHTNTVTVTTYNTLYEILTEQVCTQVVHKPHPEPDSTVKIQNPMILKVVATLLKNSTPSAELMEVRRLFLSDMIKLFSNSRENRRCLLQCSVWQDWMFSLGYINPKNSEEQKITEMVYNIFRILLYHAIKYEWGGWRVWVDTLSIAHSKVTYEAHKEYLAKMYEEYQRQEEENIKKGKKGNVSTISGLSSQTTGAKGGMEIREIEDLSQSQSPESETDYPVSTDTRDLLMSTKVSDDILGNSDRPGSGVHVEVHDLLVDIKAEKVEATEVKLDDMDLSPETLVGGENGALVEVESLLDNVYSAAVEKLQNNVHGSVGIIKKNEEKDNGPLITLADEKEDLPNSSTSFLFDKIPKQEEKLLPELSSNHIIPNIQDTQVHLGVSDDLGLLAHMTGSVDLTCTSSIIEEKEFKIHTTSDGMSSISERDLASSTKGLEYAEMTATTLETESSSSKIVPNIDAGSIISDTERSDDGKESGKEIRKIQTTTTTQAVQGRSITQQDRDLRVDLGFRGMPMTEEQRRQFSPGPRTTMFRIPEFKWSPMHQRLLTDLLFALETDVHVWRSHSTKSVMDFVNSNENIIFVHNTIHLISQMVDNIIIACGGILPLLSAATSPTTELENIEVTQGMSAETAVTFLSRLMAMVDVLVFASSLNFSEIEAEKNMSSGGLMRQCLRLVCCVAVRNCLECRQRQRDRGNKSSHGSSKPQEVPQSVTATAASKTPLENVPGNLSPIKDPDRLLQDVDINRLRAVVFRDVDDSKQAQFLALAVVYFISVLMVSKYRDILEPQRETTRTGSQPGRNIRQEINSPTSTVVVIPSIPHPSLNHGFLAKLIPEQSFGHSFYKETPAAFPDTIKEKETPTPGEDIQVESSIPHTDSGIGEEQVASILNGAELETSTGPDAMSELLSTLSSEVKKSQESLTENPSETLKPATSISSISQTKGINVKEILKSLVAAPVEIAECGPEPIPYPDPALKRETQAILPMQFHSFDRSVVVPVKKPPPGSLAVTTVGATTAGSGLPTGSTSNIFAATGATPKSMINTTGAVDSGSSSSSSSSSFVNGATSKNLPAVQTVAPMPEDSAENMSITAKLERALEKVAPLLREIFVDFAPFLSRTLLGSHGQELLIEGLVCMKSSTSVVELVMLLCSQEWQNSIQKNAGLAFIELINEGRLLCHAMKDHIVRVANEAEFILNRQRAEDVHKHAEFESQCAQYAADRREEEKMCDHLISAAKHRDHVTANQLKQKILNILTNKHGAWGAVSHSQLHDFWRLDYWEDDLRRRRRFVRNAFGSTHAEALLKAAIEYGTEEDVVKSKKTFRSQAIVNQNAETELMLEGDDDAVSLLQEKEIDNLAGPVVLSTPAQLIAPVVVAKGTLSITTTEIYFEVDEDDSAFKKIDTKVLAYTEGLHGKWMFSEIRAVFSRRYLLQNTALEVFMANRTSVMFNFPDQATVKKVVYSLPRVGVGTSYGLPQARRISLATPRQLYKSSNMTQRWQRREISNFEYLMFLNTIAGRTYNDLNQYPVFPWVLTNYESEELDLTLPGNFRDLSKPIGALNPKRAVFYAERYETWEDDQSPPYHYNTHYSTATSTLSWLVRIEPFTTFFLNANDGKFDHPDRTFSSVARSWRTSQRDTSDVKELIPEFYYLPEMFVNSNGYNLGVREDEVVVNDVDLPPWAKKPEDFVRINRMALESEFVSCQLHQWIDLIFGYKQRGPEAVRALNVFHYLTYEGSVNLDSITDPVLREAMEAQIQNFGQTPSQLLIEPHPPRSSAMHLCFLPQSPLMFKDQMQQDVIMVLKFPSNSPVTHVAANTLPHLTIPAVVTVTCSRLFAVNRWHNTVGLRGAPGYSLDQAHHLPIEMDPLIANNSGVNKRQITDLVDQSIQINAHCFVVTADNRYILICGFWDKSFRVYSTETGKLTQIVFGHWDVVTCLARSESYIGGDCYIVSGSRDATLLLWYWSGRHHIIGDNPNSSDYPAPRAVLTGHDHEVVCVSVCAELGLVISGAKEGPCLVHTITGDLLRALEGPENCLFPRLISVSSEGHCIIYYERGRFSNFSINGKLLAQMEINDSTRAILLSSDGQNLVTGGDNGVVEVWQACDFKQLYIYPGCDAGIRAMDLSHDQRTLITGMASGSIVAFNIDFNRWHYEHQNRY

SEQ ID NO: 49837 - protein, 9 aa, Homo sapiens
MRFSHTRIL

SEQ ID NO: 49838 - protein, 586 aa, Homo sapiens
MKETLQNVRTRLEILEKGLATSLQNDLQEVPKLYPEFPPKDMCEKLPEPQSFSSAPQHAEVNGNTSTPSAGAVAAPASLSLPSQSCPAEAPPAYTPQAAEGHYTVSYGTDSGEFSSVGEEFYRNHSQPPPLETLGLDADELILIPNGVQIFFVNPAGEVSAPSYPGYLRIVRFLDNSLDTVLNRPPGFLQVCDWLYPLVPDRSPVLKCTAGAYMFPDTMLQAAGCFVGVVLSSELPEDDRELFEDLLRQMSDLRLQANWNRAEEENEFQIPGRTRPSSDQLKEASGTDVKQLDQGNKDVRHKGKRGKRAKDTSSEEVNLSHIVPCEPVPEEKPKELPEWSEKVAHNILSGASWVSWGLVKGAEITGKAIQKGASKLRERIQPEEKPVEVSPAVTKGLYIAKQATGGAAKVSQFLVDGVCTVANCVGKELAPHVKKHGSKLVPESLKKDKDGKSPLDGAMVVAASSVQGFSTVWQGLECAAKCIVNNVSAETVQTVRYKYGYNAGEATHHAVDSAVNVGVTAYNINNIGIKAMVKKTATQTGHTLLEDYQIVDNSQRENQEGAANVNVRGEKDEQTKEVKEAKKKDK

SEQ ID NO: 49839 - protein, 360 aa, Homo sapiens
MKETLQNVRTRLEILEKGLATSLQNDLQEVPKLYPEFPPKDMCEKLPEPQSFSSAPQHAEVNGNTSTPSAGAVAAPASLSLPSQSCPAEAPPAYTPQAAEGHYTVSYGTDSGEFSSVGEEFYRNHSQPPPLETLGLDADELILIPNGVQIFFVNPAGEVSAPSYPGYLRIVRFLDNSLDTVLNRPPGFLQVCDWLYPLVPDRSPVLKCTAGAYMFPDTMLQAAGCFVGVVLSSELPEDDRELFEDLLRQMSDLRLQANWNRAEEENEFQIPGRTRPSSDQLKEASGTDVKQLDQGNKDVRHKGKRGKRAKDTSSEEVNLSHIVPCEPVPEEKPKELPEWSEKVAHNILSGITVMLIFFPV

SEQ ID NO: 49840 - protein, 690 aa, Homo sapiens
MLRGKNGSDSETIRLPYEEGELLEYLDAEELPPILVDLLEKSQVNIFHCGCVIAEIRDYRQSSNMKSPGYQSRHILLRPTMQTLICDVHSITSDNHKWTQEDKLLLESQLILATAEPLCLDPSIAVTCTANRLLYNKQKMNTRPMKRCFKRYSRSSLNRQQDLSHCPPPPQLRLLDFLQKRKERKAGQHYDLKISKAGNCVDMWKRSPCNLAIPSEVDVEKYAKVEKSIKSDDSQPTVWPAHDVKDDYVFECEAGTQYQKTKLTILQSLGDPLYYGKIQPCKADEESDSQMSPSHSSTDDHSNWFIIGSKTDAERVVNQYQELVQNEAKCPVKMSHSSSGSASLSQVSPGKETDQTETVSVQSSVLGKGVKHRPPPIKLPSSSGNSSSGNYFTPQQTSSFLKSPTPPPSSKPSSIPRKSSVDLNQVSMLSPAALSPASSSQRTTATQVMANSAGLNFINVVGSVCGAQALMSGSNPMLGCNTGAITPAGINLSGLLPSGGLLPNALPSAMQAASQAGVPFGLKNTSSLRPLNLLQLPGGSLIFNTLQQQQQQLSQFTPQQPQQPTTCSPQQPGEQGSEQGSTSQEQALSAQQAAVINLTGVGSFMQSQAAVLSQLGSAENRPEQSLPQQRFQLSSAFQQQQQQIQQLRFLQHQMAMAAAAAQTAQLHHHRHTGSQSKSKMKRGTPTTPKF

SEQ ID NO: 49841 - protein, 266 aa, Homo sapiens [sequence omitted]

SEQ ID NO: 49842 - protein, 643 aa, Homo sapiens
MLRGKNGSDSETIRLPYEEGELLEYLDAEELPPILVDLLEKSQVNIFHCGCVIAEIRDYRQSSNMKSPGYQSRHILLRPTMQTLICDVHSITSDNHKWTQEDKLLLESQLILATAEPLCLDPSIAVTCTANRLLYNKQKMNTRPMKRCFKRYSRSSLNRQQDLSHCPPPPQLRLLDFLQKRKERKAGQHYDLKISKAGNCVDMWKRSPCNLAIPSEVDVEKYAKVEKSIKSDDSQPTVWPAHDVKDDYVFECEAGTQYQKTKLTILQSLGDPLYYGKIQPCKADEESDSQMSPSHSSTDDHSNWFIIGSKTDAERVVNQYQELVQNEAKCPVKMSHSSSGSASLSQVSPGKETDQTETVSVQSSVLGKGVKHRPPPIKLPSSSGNSSSGNYFTPQQTSSFLKSPTPPPSSKPSSIPRKSSVDLNQVSMLSPAALSPASSSQRTTATQVMANSAGLNFINVVGSVCGAQALMSGSNPMLGCNTGAITPAGINLSGLLPSGGLLPNALPSAMQAASQAGVPFGLKNTSSLRPLNLLQLPGGSLIFNTLQQQQQQLSQFTPQQPQQPTTCSPQQPGEQGSEQGSTSQEQALSAQQAAVINLTGVGSFMQSQAAAVAILAASNGYGSSSSTNSSATSSSAYRQPVKK

SEQ ID NO: 49843 - protein, 722 aa, Homo sapiens
MLRGKNGSDSETIRLPYEEGELLEYLDAEELPPILVDLLEKSQVNIFHCGCVIAEIRDYRQSSNMKSPGYQSRHILLRPTMQTLICDVHSITSDNHKWTQEDKLLLESQLILATAEPLCLDPSIAVTCTANRLLYNKQKMNTRPMKRCFKRYSRSSLNRQQDLSHCPPPPQLRLLDFLQKRKERKAGQHYDLKISKAGNCVDMWKRSPCNLAIPSEVDVEKYAKVEKSIKSDDSQPTVWPAHDVKDDYVFECEAGTQYQKTKLTILQSLGDPLYYGKIQPCKADEESDSQMSPSHSSTDDHSNWFIIGSKTDAERVVNQYQELVQNEAKCPVKMSHSSSGSASLSQVSPGKETDQTETVSVQSSVLGKGVKHRPPPIKLPSSSGNSSSGNYFTPQQTSSFLKSPTPPPSSKPSSIPRKSSVDLNQVSMLSPAALSPASSSQRSGTPKPSTPTPTPSSTPHPPDAQSSTPSTPSATPTPQDSGFTPQPTLLTQFAQQQRSLSQAMPVTTIPLSTMVTSITPGTTATQVMANSAGLNFINVVGSVCGAQALMSGSNPMLGCNTGAITPAGINLSGLLPSGGLLPNALPSAMQAASQAGVPFGLKNTSSLRPLNLLQLPGGSLIFNTLQQQQQQLSQFTPQQPQQPTTCSPQQPGEQGSEQGSTSQEQALSAQQAAVINLTGVGSFMQSQAAAVAILAASNGYGSSSSTNSSATSSSAYRQPVKK

SEQ ID NO: 49844 - protein, 445 aa, Homo sapiens
MLRGKNGSDSETIRLPYEEGELLEYLDAEELPPILVDLLEKSQVNIFHCGCVIAEIRDYRQSSNMKSPGYQSRHILLRPTMQTLICDVHSITSDNHKWTQEDKLLLESQLILATAEPLCLDPSIAVTCTANRLLYNKQKMNTRPMKRCFKRYSRSSLNRQQDLSHCPPPPQLRLLDFLQKRKERKAGQHYDLKISKAGNCVDMWKRSPCNLAIPSEVDVEKYAKVEKSIKSDDSQPTVWPAHDVKDDYVFECEAGTQYQKTKLTILQSLGDPLYYGKIQPCKADEESDSQMSPSHSSTDDHSNWFIIGSKTDAERVVNQYQELVQNEAKCPVKMSHSSSGSASLSQVSPGKETDQTETVSVQSSVLGKGVKHRPPPIKLPSSSGNSSSGNYFTPQQTSSFLKSPTPPPSSKPSSIPRKSSVDLNQVSMLSPAALSPASSSQRHES

SEQ ID NO: 49845 - protein, 283 aa, Homo sapiens
MQSKYKQKLKREESVRIKKEAEEAELQKMKAIQREKSNKLEEKKRLQENLRREAFREHQQYKTAEFLSKLNTESPDRSACQSAVCGPQSSTWKLPILPRDHSWARSWAYRDSLKAEENRKLQKMKDEQHQKSELLELKRQQQEQERAKIHQTEHRRVNNAFLDRLQGKSQPGGLEQSGGCWNMNSGNSWGSLLVFSRHLRVYEKILTPIWPSSTDLEKPHEMLFLNVILFSLTVFTLISTAHTLDRAVRSDWLLLVLIYACLEELIPELIFNLYCQGNATLFF

SEQ ID NO: 49846 - protein, 24 aa, Homo sapiens
MGQKLGLQRFSKGRRKQKIAKDEG

SEQ ID NO: 49847 - protein, 76 aa, Homo sapiens
MANEKHSKNITQRGNVAKTLRPQEEKYPVGPWLLALFVFVVCGSGQPHKLASPGDCQNFLKVVTSRGSHPTPKTGN

SEQ ID NO: 49848 - protein, 64 aa, Homo sapiens
MLFSAFEKHQYYNLKDLVDITKQPVVYLKEILKEIGVQNVKGIHKNTWELKPEYRHYQGEEKSD

SEQ ID NO: 49849 - protein, 216 aa, Homo sapiens
MLRQASYGTIKIGTYQSLKRLFIERPEDETLPINVICGILSGVISSTIANPTDVLKIRMQAQSNTIQGGMIGNFMNIYQQEGTRGLWKGVSLTAQRAAIVVGVELPVYDITKKHLILSGLMGDTVYTHFLSSFTCGLAGALASNPVDVVRTRMMNQRVLRDGRCSGYTGTLDCLLQTWKNEGFFALYKGFWPNWLRLGPWNIIFFVTYEQLKKLDL

SEQ ID NO: 49850 - protein, 1501 aa, Homo sapiens
MKRQKIQRELMKLEQENMEKREEIIIKKEVSPEVVRSKLSPSPSLRKSSKSPKRKSSPKSSSASKKDRKTSAVSSPLLDQQRNSKTNQSKKKGPRTPSPPPPIPEDIALGKKYKEKYKVKDRIEEKTRDGKDRGRDFERQREKRDKPRSTSPAGQHHSPISSRHHSSSSQSGSSIQRHSPSPRRKRTPSPSYQRTLTPPLRRSASPYPSHSLSSPQRKQSPPRHRSPMREKGRHDHERTSQSHDRRHERREDTRGKRDREKDSREEREYEQDQSSSRDHRDDREPRDGRDRRDARDTRDRRELRDSRDMRDSREMRDYSRDTKESRDPRDSRSTRDAHDYRDREGRDTHRKEDTYPEESRSYGRNHLREESSRTEIRNESRNESRSEIRNDRMGRSRGRVPELPEKGSRGSRGSQIDSHSSNSNYHDSWETRSSYPERDRYPERDNRDQARDSSFERRHGERDRRDNRERDQRPSSPIRHQGRNDELERDERREERRVDRVDDRRDERARERDRERERDRERERERERERDREREKERELERERAREREREREKERDRERDRDRDHDRERERERERDREKEREREREERERERERERERERERERERERARERDKERERQRDWEDKDKGRDDRREKREEIREDRNPRDGHDERKSKKRYRNEGSPSPRQSPKRRREHSPDSDAYNSGDDKNEKHRLLSQVVRPQESRSLSPSHLTEDRQGRWKEEDRKPERKESSRRYEEQELKEKVSSVDKQREQTEILESSRMRAQDIIGHHQSEDRETSDRAHDENKKKAKIQKKPIKKKKEDDVGIERGNIETTSEDGQVFSPKKGQKKKSIEKKRKKSKGDSDISDEEAAQQSKKKRGPRTPPITTKEELVEMCNGKNGILEDSQKKEDTAFSDWSDEDVPDRTEVTEAEHTATATTPGSTPSPLSSLLPPPPPVATATATTVPATLAATTAAAATSFSTSAITISTSATPTNTTNNTFANEDSHRKCHRTRVEKVETPHVTIEDAQHRKPMDQKRSSSLGSNRSNRSHTSGRLRSPSNDSAHRSGDDQSGRKRVLHSGSRDREKTKSLEITGERKSRIDQLKRGEPSRSTSSDRQDSRSHSSRRSSPESDRQVHSRSGSFDSRDRLQERDRYEHDRERERERRDTRQREWDRDADKDWPRNRDRDRLRERERERERDKRRDLDRERERLISDSVERDRDRDRDRTFESSQIESVKRCEAKLEGEHERDLESTSRDSLALDKERMDKDLGSVQGFEETNKSERTESLEGDDESKLDDAHSLGSGAGEGYEPISDDELDEILAGDAEKREDQQDEEKMPDPLDVIDVDWSGLMPKHPKEPREPGAALLKFTPGAVMLRVGISKKLAGSELFAKVKETCQRLLEKPKDADNLFEHELGALNMAALLRKEERASLLSNLGPCCKALCFRRDSAIRKQLVKNEKGTIKQAYTSAPMVDNELLRLSLRLFKRKTTCHAPGHEKTEDNKLSQSSIQQELCVS

SEQ ID NO: 49851 - protein, 1397 aa, Homo sapiens
MKRQKIQRELMKLEQENMEKREEIIIKKEVSPEVVRSKLSPSPSLRKSSKSPKRKSSPKSSSASKKDRKTSAVSSPLLDQQRNSKTNQSKKKGPRTPSPPPPIPEDIALGKKYKEKYKVKDRIEEKTRDGKDRGRDFERQREKRDKPRSTSPAGQHHSPISSRHHSSSSQSGSSIQRHSPSPRRKRTPSPSYQRTLTPPLRRSASPYPSHSLSSPQRKQSPPRHRSPMREKGRHDHERTSQSHDRRHERREDTRGKRDREKDSREEREYEQDQSSSRDHRDDREPRDGRDRRDARDTRDRRELRDSRDMRDSREMRDYSRDTKESRDPRDSRSTRDAHDYRDREGRDTHRKEDTYPEESRSYGRNHLREESSRTEIRNESRNESRSEIRNDRMGRSRGRVPELPEKGSRGSRGSQIDSHSSNSNYHDSWETRSSYPERDRYPERDNRDQARDSSFERRHGERDRRDNRERDQRPSSPIRHQGRNDELERDERREERRVDRVDDRRDERARERDRERERDRERERERERERDREREKERELERERAREREREREKERDRERDRDRDHDRERERERERDREKEREREREERERERERERERERERERERERARERDKERERQRDWEDKDKGRDDRREKREEIREDRNPRDGHDERKSKKRYRNEGSPSPRQSPKRRREHSPDSDAYNSGDDKNEKHRLLSQVVRPQESRSLSPSHLTEDRQGRWKEEDRKPERKESSRRYEEQELKEKVSSVDKQREQTEILESSRMRAQDIIGHHQSEDRETSDRAHDENKKKAKIQKKPIKKKKEDDVGIERGNIETTSEDGQVFSPKKGQKKKSIEKKRKKSKGDSDISDEEAAQQSKKKRGPRTPPITTKEELVEMCNGKNGILEDSQKKEDTAFSDWSDEDVPDRTEVTEAEHTATATTPGSTPSPLSSLLPPPPPVATATATTVPATLAATTAAAATSFSTSAITISTSATPTNTTNNTFANEDSHRKCHRTRVEKVETPHVTIEDAQHRKPMDQKRSSSLGSNRSNRSHTSGRLRSPSNDSAHRSGDDQSGRKRVLHSGSRDREKTKSLEITGERKSRIDQLKRGEPSRSTSSDRQDSRSHSSRRSSPESDRQVHSRSGSFDSRDRLQERDRYEHDRERERERRDTRQREWDRDADKDWPRNRDRDRLRERERERERDKRRDLDRERERLISDSVERDRDRDRDRTFESSQIESVKRCEAKLEGEHERDLESTSRDSLALDKERMDKDLGSVQGFEETNKSERTESLEAGDDESKLDDAHSLGSGAGEGYEPISDDELDEILAGDAEKREDQQDEEKMPDPLDVIDVDWSGLMPKHPKEPREPGAALLKFTPGAVMLRVGISKKLAGSELFAKVKETCQRLLEKPKGSFILL

SEQ ID NO: 49852 - protein, 149 aa, Homo sapiens
MKRQKIQRELMKLEQENMEKREEIIIKKEVSPEVVRSKLSPSPSLRKSSKSPKRKSSPKSSSASKKDRKTSAVSSPLLDQQRNSKTNQSKKKGPRTPSPPPPIPEDIALGKKYKEKYKVKDRIEEKTRDGKDRGRDFERQREKRDKPRT

SEQ ID NO: 49853 - protein, 453 aa, Homo sapiens [sequence omitted]

SEQ ID NO: 49854 - protein, 172 aa, Homo sapiens
MPAVQLDTQHMGTDVVIVKNGRRICGTGGCLASAPLHQNKSYFEFKIQSTGIWGIGVATQKVNLNQIPLGRDMHSLVMRNDGALYHNNEEKNRLPANSLPQEGDVVGITYDHVELNVYLNGKNMHCPASGIRGTVYPVVYVDDSAILDCQFSEFYHTPPPGFEKILFEQQIF

SEQ ID NO: 49855 - protein, 207 aa, Homo sapiens
MCLQQLFEVKVFKEKHHSWFINQSVQSGGLLHFATPVDPLFLLLHYLIKADKEGKFQPLDQVVVDNVFPNCILLLKLPGLEKLLHHVTEEKGNPEIDNKKYYKYSKEKTLKWLEKKVNQTVAALKTNNVNVSSRVQSTAFFSGDQASTDKEEDYIRYAHGLISDYIPKELSDDLSKYLKLPEPSASLPNPPSKAATHSSSAAGMFIS

SEQ ID NO: 49856 - protein, 334 aa, Homo sapiens
MPSPCSCMSFNPETRRLSIGLDNGTISEFILSEDYNKMTPVKNYQAHQSRVTMILFVLELEWVLSTGQDKQFAWHCSESGQRLGGYRTSAVASGLQFDVETRHVFIGDHSGQVTILKLEQENCTLVTTFRGHTGGVTALCWDPVQRVLFSGSSDHSVIMWDIGGRKGTAIELQGHNDRVQALSYAQHTRQLISCGGDGGIVVWNMDVERQETPEWLDSDSCQKCDQPFFWNFKQMWDSKKIGLRQHHCRKCGKAVCGKCSSKRSSIPLMGFEFEVRVCDSCHEAITDEERAPTATFHDSKHNIVHVHFDATRGWLLTSGTDKVIKLWDMTPVVS

SEQ ID NO: 49857 - protein, 104 aa, Homo sapiens
MAAGERSWCLCKLLRFFYSLFFPGLIVCGTLCVCLVIVLWGIRLLLQRKKKLVSTSKNGKNQMVIAFFHPYCNAGGGGERVLWCALRALQKKRSFTLVAQAGVQ

SEQ ID NO: 49858 - protein, 502 aa, Homo sapiens
MVLRMIGEGSFGRALLVQHESSNQMFAMKEIRLPKSFSNTQNSRKEAVLLAKMKHPNIVAFKESFEAEGHLYIVMEYCDGGDLMQKIKQQKGKLFPEDMILNWFTQMCLGVNHIHKKRVLHRDIKSKNIFLTQNGKVKLGDFGSARLLSNPMAFACTYVGTPYYVPPEIWENLPYNNKSDIWSLGCILYELCTLKHPFQANSWKNLILKVCQGCISPLPSHYSYELQFLVKQMFKRNPSHRPSATTLLSRGIVARLVQKCLPPEIIMEYGEEVLEEIKNSKHNTPRKKTNPSRIRIALGNEASTVQEEEQDRKGSHTDLESINENLVESALRRVNREEKGNKSVHLRKASSPNLHRRQWEKNVPNTALTALENASILTSSLTAEDDRGGSVIKYSKNTTRKQWLKETPDTLLNILKNADLSLAFQTYTIYRPGSEGFLKGPLSEETEASDSVDGGHDSVILDPERLEPGLDEEDTDFEEEDDNPDWVSELKKRAGWQGLCDR

SEQ ID NO: 49859 - protein, 178 aa, Homo sapiens
MIKNVQKNDVNVEFSEKELSALVKLPSGEDYNLKLELLHPIIPEQSTFKVLSTKIEIKLKKPEAVRWEKLEGQGDVPTPKQFVADVKNLYPSSSPYTRNWDKLVGEIKEEEKNEKLEGDAALNRLFQQIYSDGSDEVKRAMNKSFMESGGTVLSTNWSDVGKRKVEINPPDDMEWKKY

SEQ ID NO: 49860 - protein, 276 aa, Homo sapiens
MDLPKSHFISALTVVFVNSKSLSSLKIDDTPVDDPSLKVLVANNSDTLKLLKMSSCPHVSPAGILCVADQCHGLRELALNYHLLSDELLLALSSEKHVRLEHLRIDVVSENPGQTHFHTIQKSSWDAFIRHSPKVNLVMYFFLYEEEFDPFFRYEIPATHLYFGRSVSKDVLGRVGMTCPRLVELVVCANGLRPLDEELIRIAERCKNLSAIGLGECEVSCSAFVEFVKMCGGRLSQLSIMEEVLIPDQKYSLEQIHWEVSKHLGRVWFPDMMPTW

SEQ ID NO: 49861 - protein, 1012 aa, Homo sapiens
MMSLPSGSSLQQMALRCWSLKFKQSDHQFLHQSNVFHHINNILSKSDDGDSEESFSISIQSGFEAMSQELCIVMCLKDLTSIVDIKTSSRPAMIGSLTDGSTETFWESGDEDKNKTKNITINCVKGINARYVSVHVDNSRDLGNKVTSMTFLTGKAVEDLCRIKQVDLDSRHIGWVTSELPGGDNHIIKIELKGPENTLRVRQVKVLGWKDGESTKIAGQISASVAQQRNCEAETLRVFRLITSQVFGKLISGDAEPTPEQEEKALLSSPEGEEKATSDADLKEHMVGIIFSRSKLTNLQKQVCAHIVQAIRMEATRVREEWEHAISSKENANSQPNDEDASSDAYCFELLSMVLALSGSNVGRQYLAQQLTLLQDLFSLLHTASPRVQRQVTSLLRRVLPEVTPSRLASIIGVKSLPPADISDIIHSTEKGDWNKLGILDMFLGCIAKALTVQLKAKGTTITGTAGTTVGKGVTTVTLPMIFNSSYLRRGESHWWMKGSTPTQISEIIIKLIKDMAAGHLSEAWSRVTKNAIAETIIALTKMEEEFRSPVRCIATTRLWLALASLCVLDQDHVDRLSSGRWMGKDGQQKQMPMCDNHDDGETAAIILCNVCGNLCTDCDRFLHLHRRTKTHQRQVFKEEEEAIKVDLHEGCGRTKLFWLMALADSKTMKAMVEFREHTGKPTTSSSEACRFCGSRSGTELSAVGSVCSDADCQEYAKIACSKTHPCGHPCGGVKNEEHCLPCLHGCDKSATSLKQDADDMCMICFTEALSAAPAIQLDCSHIFHLQCCRRVLENRWLGPRITFGFISCPICKNKINHIVLKDLLDPIKELYEDVRRKALMRLEYEGLHKSEAITTPGVRFYNDPAGYAMNRYAYYVCYKCRKAYFGGEARCDAEAGRGDDYDPRELICGACSDVSRAQMCPKHGTDFLEYKCRYCCSVAVFFCFGTTHFCNACHDDFQRMTSIPKEELPHCPAGPKGKQLEGTECPLHVVHPPTGEEFALGCGVCRNAHTF

SEQ ID NO: 49862 - protein, 649 aa, Homo sapiens
MLSHTVRKHLRKTRLELLHKEYEDEIDCLQKEVEELKSKNLSLESQIKTILDPLTLVQGNQNEDKHLVTDNPSKINPETVAEWKKKLRTANEIYEKVKDDVDKLKEANKKLKLENGGLVRENLRLKAEVDNRSPQKFGRFAVAALQSKVEQYERETNRLKKALERSDKYIEELESQVAQLKNSSEEKEAMNSICQTALSADGKGSKGSEEDVVSKNQGDSARKQPGSSTSSSSHLAKPSSSRLCDTSSARQESTSKADLNCSKNKDLYQEQVEVMLDVTDTSMDTYLEREWGNKPSDCVPYKDEELYDLPAPCTPLSLSCLQLSTPENRESSVVQAGGSKKHSNHLRKLVFDDFCDSSNVSNKDSSEDDISRSENEKKSECFSSPKTGFWDCCSTSYAQNLDFESSEGNTIANSVGEISSKLSEKSGLCLSKRLNSIRSFEMNRTRTSSEASMDAAYLDKISELDSMMSESDNSKSPCNNGFKSLDLDGLSKSSQGSEFLEEPDKLEEKTELNLSKGSLTNDQLENGSEWKPTSFFLLSPSDQEMNEDFSLHSSSCPVTNEIKPPSCLFQTEFSQGILLSSSHRLFEDQRFGSSLFKMSSEMHSLHNHLQSPWSTSFVPEKRNKNVNQSTKRKIQSSLSSASPSKATKS

SEQ ID NO: 49863 - protein, 706 aa, Homo sapiens
MRGDMCPFDHGSDPVVVEDVNLPGMLPFPAQPPVVEGPPPPGLPPPPPILTPPPVNLRPPVPPPGPLPPSLPPVTGPPPPLPPLQPSGMDAPPNSATSSVPTVVTTGIHHQPPPAPPSLFTAVFVLPDTYDTDGYNPEAPSITNTSRPMYRHRVHAQRPNLIGLTSGDMDLPPREKPPNKSSMRIVVDSESRKRTIGSGEPGVPTKKTWFDKPNFNRTNSPGFQKKVQFGNENTKLELRKVPPELNNISKLNEHFSRFGTLVNLQVAYNGDPEGALIQFATYEEAKKAISSTEAVLNNRFIKVYWHREGSTQQLQTTSPKPLVQQPILPVVKQSVKERLGPVPSSTIEPAEAQSASSDLPQNVTKLSVKDRLGFVSKPSVSATEKVLSTSTGLTKTVYNPAALKAAQKTLLVSTSAVDNNEAQKKKQEALKLQQDVRKRKQEILEKHIETQKMLISKLEKNKTMKSEDKAEIMKTLEVLTKNITKLKDEVKAASPGRCLPKSIKTKTQMQKELLDTELDLYKKMQAGEEVTELRRKYTELQLEAAKRGILSSGRGRGIHSRGRGAVHGRGRGRGRGRGVPGHAVVDHRPRALEISAFTESDREDLLPHFAQYGEIEDCQIDDSSLHAVITFKTRAEAEAAAVHGARFKGQDLKLAWNKPVTNISAVETEEVEPDEEEFQEESLVDDSLLQDDDEEEEDNESRSWRR

SEQ ID NO: 49864 - protein, 134 aa, Homo sapiens
MFPHRKNVNKPVGGTNVPEMFIKKEELQELKCADVEDEDWDISSLEEEISLGKKSGKEQKEPPPAKNEPHFAHVLNAWGAFNPKGPKGEGLLLSPLIQARSIFLLVVFHLYKYLINLCWYIIRQKSCQCFLYVI

SEQ ID NO: 49865 - protein, 419 aa, Homo sapiens [sequence omitted]

SEQ ID NO: 49866 - protein, 317 aa, Homo sapiens
MVLCRTAISKSIVLEPIYWNSSNSKFLPGQGLVLYPQIGDKLDIICPKVDSKTVGQYEYYKVYMVDKDQADRCTIKKENTPLLNCAKPDQDIKFTIKFQEFSPNLWGLEFQKNKDYYIISTSNGSLEGLDNQEGGVCQTRAMKILMKVGQDASSAGSTRNKDPTRRPELEAGTNGRSSTTSPFVKPNPGSSTDGNSAGHSGNNILGSEVALFAGIASGCIIFIVIIITLVVLLLKYRRRHRKHSPQHTTTLSLSTLATPKRSGNNNGSEPSDIIIPLRTADSVFCPHYEKVSGDYGHPVYIVQEMPPQSPANIYYKV

SEQ ID NO: 49867 - protein, 1096 aa, Homo sapiens
MNIRRCGHSDSFFFIEVGRSAVTGPGELWMQADDSVVAQNIHETILEAMKALKELFEFRPRSKSQSSGSSATHPISVPGARRHHHLVNLPPSQTGLVRRSRTDSLAATPPAAKCSSCRVRTASEGDGGAAAGAAAAGARPVSVAGSPLSPGPVRAPLSRSHTLSGGCGGRGSKVALLPAGGALQHSRSMSMPVAHSPPAATSPGSLSSSSGHGSGSYPPPPGPHPPLPHPLHHGPGQRPSSGSASASGSPSDPGFMSLDEYGSSPGDLRAFCSHRSNTPESIAETPPARDGGGGGEFYGYMTMDRPLSHCGRSYRRVSGDAAQDLDRGLRKRTYSLTTPARQRPVPQPSSASLDEYTLMRATFSGSAGRLCPSCPASSPKVAYHPYPEDYGDIEIGSHRSSSSNLGADDGYMPMTPGAALAGSGSGSCRSDDYMPMSPASVSAPKQILQPRAAAAAAAAVPSAGPAGPAPTSAAGRTFPASGGGYKASSPAESSPEDSGYMRMWCGSKLSMEHADGKLLPNGDYLNVSPSDAVTTGTPPDFFSAALHPGGEPLRGVPGCCYSSLPRSYKAPYTCGGDSDQYVLMSSPVGRILEEERLEPQATPGPSQAASAFGAGPTQPPHPVVPSPVRPSGGRPEGFLGQRGRAVRPTRLSLEGLPSLPSMHEYPLPPEPKSPGEYINIDFGEPGARLSPPAPPLLASAASSSSLLSASSPASSLGSGTPGTSSDSRQRSPLSDYMNLDFSSPKSPKPGAPSGHPVGSLDGLLSPEASSPYPPLPPRPSASPSSSLQPPPPPPAPGELYRLPPASAVATAQGPGAASSLSSDTGDNGDYTEMAFGVAATPPQPIAAPPKPEAARVASPTSGVKRLSLMEQVSGVEAFLQASQPPDPHRGAKVIRADPQGGRRRHSSETFSSTTTVTPVSPSFAHNPKRHNSASVENVSLRKSSEGGVGVGPGGGDEPPTSPRQLQPAPPLAPQGRPWTPGQPGGLVGCPGSGGSPMRRETSAGFQNGLNYIAIDVREEPGLPPQPQPPPPPLPQPGDKSSWGRTRSLGGLISAVGVGSTGGGCGGPGPGALPPANTYASIDFLSHHLKEATIVKE

SEQ ID NO: 49868 - protein, 451 aa, Homo sapiens
MVMGITDVDDKIIKRANEMNISPASLASLYEEDFKQDMAALKVLPPTVYLRVTENIPQIISFIEGIIARGNAYSTAKGNVYFDLKSRGDKYGKLVGVVPGPVGEPADSDKRHASDFALWKAAKPQEVFWASPWGPGRPGWHIECSAIASMVFGSQLDIHSGGIDLAFPHHENEIAQCEVFHQCEQWGNYFLHSGHLHAKGKEEKMSKSLKNYITIKDFLKTFSPDVFRFFCLRSSYRSAIDYSDSAMLQAQQLLLGLGSFLEDARAYMKGQLACGSVREAMLWERLSSTKRAVKAALADDFDTPRVVDAILGLAHHGNGQLRASLKEPEGPRSPAVFGAIISYFEQFFETVGISLANQQYVSGDGSEATLHGVVDELVRFRQKVRQFALAMPEATGDARRQQLLERQPLLEACDTLRRGLTAHGINIKDRSSTTSTWELLDQRTKDQKSAG

SEQ ID NO: 49869 - protein, 169 aa, Homo sapiens
MHVDREFAVVTDMKNSSSVSNTLTNGCVINGHLDFPSTTPLSGMESRNGQCLTGTNGISSGLAPGQPFPSSQGSLCISGTEEPEKTLRANPELCGSLHLNGSPSSCIASRPSWVEDIGDNLYYGHYHGFGDTAESIPELNSVVEHSKSVKVQERYDSAVLGTMHLHHGS

SEQ ID NO: 49870 - protein, 359 aa, Homo sapiens [sequence omitted]

SEQ ID NO: 49871 - protein, 391 aa, Homo sapiens [sequence omitted]

SEQ ID NO: 49872 - protein, 105 aa, Homo sapiens
MVIMLIGNKSDLESRRDVKREEGEAFAREHGLIFMETSAKTACNVEEAFINTAKEIYRKIQQGLFDVHNEANGIKIGPQQSISTSVGPSASQRNSRDIGSNSGCC

SEQ ID NO: 49873 - protein, 372 aa, Homo sapiens
MGYDQRHGSPLPAGPCLFGPPLAGAPAGYSPGGVPSAYPELHAALDRLYAQRPAGFGCQESRHSYPPALGSPGALAGAGVGAAGPLERRGAQPGRHSVTGYGDCAVGARYQDELTALLRLTVGTGGREAGARGEPSGIEPSGLEEPPGPFVPEAARARMREPEAREDYFGTCIKCNKGIYGQSNACQALDSLYHTQCFVCCSCGRTLRCKAFYSVNGSVYCEEDYLFSGFQEAAEKCCVCGHLILEKILQAMGKSYHPGCFRCIVCNKCLDGIPFTVDFSNQVYCVTDYHKNYAPKCAACGQPILPSEGCEDIVRVISMDRDYHFECYHCEDCRMQLSDEEGCCCFPLDGHLLCHGCHMQRLNARQPPANYI

SEQ ID NO: 49874 - protein, 208 aa, Homo sapiens [sequence omitted]

SEQ ID NO: 49875 - protein, 148 aa, Homo sapiens
MLHGTTTLAFKFRHGVIVAADSRATAGAYIASQTVKKVIEINPYLLGTMAGGAADCSFWERLLARQCRIYELRNKERISVAAASKLLANMVYQYKGMGLSMGTMICGWDKRGPVSEVLCLKPKSFGMYLFCGCAERIGNMARPLLRGQ

SEQ ID NO: 49876 - protein, 764 aa, Homo sapiens
MGRLAAPARAWAGSREHPGPALLRTRRSWVWNQFFVIEEYAGPEPVLIGKLHSDVDRGEGRTKYLLTGEGAGTVFVIDEATGNIHVTKSLDREEKAQYVLLAQAVDRASNRPLEPPSEFIIKVQDINDNPPIFPLGPYHATVPEMSNVGTSVIQVTAHDADDPSYGNSAKLVYTVLDGLPFFSVDPQTGVVRTAIPNMDRETQEEFLVVIQAKDMGGHMGGLSGSTTVTVTLSDVNDNPPKFPQSLYQFSVVETAGPGTLVGRLRAQDPDLGDNALMAYSILDGEGSEAFSISTDLQGRDGLLTVRKPLDFESQRSYSFRVEATNTLIDPAYLRRGPFKDVASVRVAVQDAPEPPAFTQAAYHLTVPENKAPGTLVGQISAADLDSPASPIRYSILPHSDPERCFSIQPEEGTIHTAAPLDREARAWHNLTVLATELDSSAQASRVQVAIQTLDENDNAPQLAEPYDTFVCDSAAPGQLIQVIRALDRDEVGNSSHVSFQGPLGPDANFTVQDNRDGSASLLLPSRPAPPRHAPYLVPIELWDWGQPALSSTATVTVSVCRCQPDGSVASCWPEAHLSAAGLSTGALLAIITCVGALLALVVLFVALRRQKQEALMVLEEEDVRENIITYDDEGGGEEDTEAFDITALQNPDGAAPPAPGPPARRDVLPRARVSRQPRPPGPADVAQLLALRLREADEDPGVPPYDSVQVYGYEGRGSSCGSLSSLGSGSEAGGAPGPAEPLDDWGPLFRTLAELYGAKEPPAP

SEQ ID NO: 49877 - protein, 359 aa, Homo sapiens
MSACQDQTIRLYDCRYGRFRKFKSIKARDVGWSVLDVAFTPDGNHFLYSSWSDYIHICNIYGEGDTHTALDLRPDERRFAVFSIAVSSDGREVLGGANDGCLYVFDREQNRRTLQIESHEDDVNAVAFADISSQILFSGGDDAICKVWDRRTMREDDPKPVGALAGHQDGITFIDSKGDARYLISNSKDQTIKLWDIRRFSSREGMEASRQAATQQNWDYRWQQVPKKAWRKLKLPGDSSLMTYRGHGVLHTLIRCRFSPIHSTGQQFIYSGCSTGKVVVYDLLSGHIVKKLTNHKACVRDVSWHPFEEKIVSSSWDGNLRLWQYRQAEYFQDDMPESEECASAPAPVPQSSTPFSSPQ

SEQ ID NO: 49878 - protein, 703 aa, Homo sapiens
MKKAYQDMDIDKVDELMTDITEQQEVAQQISDAISRPMGFGDDVDEDELLEELEELEQEELAQELLNVGDKEEEPSVKLPSVPSTHLPAGPGSTALRMTVVGNPRSWSCQWLPILILLLGTGHGPGVEGVTHYKAGDPVILYVNKVGPYHNPQETYHYYQLPVCCPEKIRHKSLSLGEVLDGDRMAESLYEIRFRENVEKRILCHMQLSSAQVEQLRQAIEELYYFEFVVDDLPIRGFVGYMEESGFLPHSHKIGLWTHLDFHLEFHGDRIIFANVSVRDVKPHSLDGLRPDEFLGLTHTYSVRWSETSVERRSDRRRGDDGGFFPRTLEIHWLSIINSMVLVFLLVGFVAVILMRVLRNDLARYNLDEETTSAGSGDDFDQGDNGWKIIHTDVFRFPPYRGLLCAVLGVGAQFLALGTGIIVMALLGMFNVHRHGAINSAAILLYALTCCISGYVSSHFYRQIGGERWVWNIILTTSLFSVPFFLTWSVVNSVHWANGSTQALPATTILLLLTVWLLVGFPLTVIGGIFGKNNASPFDAPCRTKNIAREIPPQPWYKSTVIHMTVGGFLPFSAISVELYYIFATVWGREQYTLYGILFFVFAILLSVGACISIALTYFQLSGEDYRWWWRSVLSVGSTGLFIFLYSVFYYARRSNMSGAVQTVEFFGYSLLTGYVFFLMLGTISFFSSLKFIRYIYVNLKMD

SEQ ID NO: 49879 - protein, 32 aa, Homo sapiens
MLIKVKEPKRGVCSVSTCLSEPGILDQPHFLG

SEQ ID NO: 49880 - protein, 199 aa, Homo sapiens
MWDDINNVGLRGHYFCSVYGARLMVPAGQGLIVVISSPGSLQYMFNVPYGVGKAACDKLAADCAHELRRHGVSCVSLWPGIVQTELLKEHMAKEEVLQDPVLKQFKSAFSSAETTELSGKCVVALATDPNILSLSGKVLPSCDLARRYGLRDVDGRPVQDYLSLSSVLSHVSGLGWLASYLPSFLRVPKWIIALYTSKF

SEQ ID NO: 49881 - protein, 833 aa, Homo sapiens
MACSIVDQKFPECGFYGMYDKILLFRHDPTSENILQLVKAASDIQEGDLIEVVLSASATFEDFQIRPHALFVHSYRAPAFCDHCGEMLWGLVRQGLKCEGCGLNYHKRCAFKIPNNCSGVRRRRLSNVSLTGVSTIRTSSAELSTSAPDEPLLQKSPSESFIGREKRSNSQSYIGRPIHLDKILMSKVKVPHTFVIHSYTRPTVCQYCKKLLKGLFRQGLQCKDCRFNCHKRCAPKVPNNCLGEVTINGDLLSPGAESDVVMEEGSDDNDSERNSGLMDDMEEAMVQDAEMAMAECQNDSGEMQDPDPDHEDANRTISPSTSNNIPLMRVVQSVKHTKRKSSTVMKEGWMVHYTSKDTLRKRHYWRLDSKCITLFQNDTGSRYYKEIPLSEILSLEPVKTSALIPNGANPHCFEITTANVVYYVGENVVNPSSPSPNNSVLTSGVGADVARMWEIAIQHALMPVIPKGSSVGTGTNLHRDISVSISVSNCQIQENVDISTVYQIFPDEVLGSGQFGIVYGGKHRKTGRDVAIKIIDKLRFPTKQESQLRNEVAILQNLHHPGVVNLECMFETPERVFVVMEKLHGDMLEMILSSEKGRLPEHITKFLITQILVALRHLHFKNIVHCDLKPENVLLASADPFPQVKLCDFGFARIIGEKSFRRSVVGTPAYLAPEVLRNKGYNRSLDMWSVGVIIYVSLSGTFPFNEDEDIHDQIQNAAFMYPPNPWKEISHEAIDLINNLLQVKMRKRYSVDKTLSHPWLQDYQTWLDLRELECKIGERYITHESDDLRWEKYAGEQGLQYPTHLINPSASHSDTPETEETEMKALGERVSIL

SEQ ID NO: 49882 - protein, 841 aa, Homo sapiens
MACSIVDQKFPECGFYGMYDKILLFRHDPTSENILQLVKAASDIQEGDLIEVVLSASATFEDFQIRPHALFVHSYRAPAFCDHCGEMLWGLVRQGLKCEGCGLNYHKRCAFKIPNNCSGVRRRRLSNVSLTGVSTIRTSSAELSTSAPDEPLLSPVSPGFEQKSPSESFIGREKRSNSQSYIGRPIHLDKILMSKVKVPHTFVIHSYTRPTVCQYCKKLLKGLFRQGLQCKDCRFNCHKRCAPKVPNNCLGEVTINGDLLSPGAESDVVMEEGSDDNDSERNSGLMDDMEEAMVQDAEMAMAECQNDSGEMQDPDPDHEDANRTISPSTSNNIPLMRVVQSVKHTKRKSSTVMKEGWMVHYTSKDTLRKRHYWRLDSKCITLFQNDTGSRYYKEIPLSEILSLEPVKTSALIPNGANPHCFEITTANVVYYVGENVVNPSSPSPNNSVLTSGVGADVARMWEIAIQHALMPVIPKGSSVGTGTNLHRDISVSISVSNCQIQENVDISTVYQIFPDEVLGSGQFGIVYGGKHRKTGRDVAIKIIDKLRFPTKQESQLRNEVAILQNLHHPGVVNLECMFETPERVFVVMEKLHGDMLEMILSSEKGRLPEHITKFLITQILVALRHLHFKNIVHCDLKPENVLLASADPFPQVKLCDFGFARIIGEKSFRRSVVGTPAYLAPEVLRNKGYNRSLDMWSVGVIIYVSLSGTFPFNEDEDIHDQIQNAAFMYPPNPWKEISHEAIDLINNLLQVKMRKRYSVDKTLSHPWLQDYQTWLDLRELECKIGERYITHESDDLRWEKYAGEQGLQYPTHLINPSASHSDTPETEETEMKALGERVSIL

SEQ ID NO: 49883 - protein, 617 aa, Homo sapiens
MLNFNVPHIKNSTGEPVWKVLIYDRFGQDIISPLLSVKELRDMGITLHLLLHSDRDPIPDVPAVYFVMPTEENIDRMCQDLRNQLYESYYLNFISAISRSKLEDIANAALAASAVTQVAKVFDQYLNFITLEDDMFVLCNQNKELVSYRAINRPDITDTEMETVMDTIVDSLFCFFVTLGAVPIIRCSRGTAAEMVAVKLDKKLRENLRDARNSLFTGDTLGAGQFSFQRPLLVLVDRNIDLATPLHHTWTYQALVHDVLDFHLNRVNLEESSGVENSPAGARPKRKNKKSYDLTPVDKFWQKHKGSPFPEVAESVQQELESYRAQEDEVKRLKSIMGLEGEDEGAISMLSDNTAKLTSAVSSLPELLEKKRLIDLHTNVATAVLEHIKARKLDVYFEYEEKIMSKTTLDKSLLDIISDPDAGTPEDKMRLFLIYYISTQQAPSEADLEQYKKALTDAGCNLNPLQYIKQWKAFTKMASAPASYGSTTTKPMGLLSRVMNTGSQFVMEGVKNLVLKQQNLPVTRILDNLMEMKSNPETDDYRYFDPKMLRGNDSSVPRNKNPFQEAIVFVVGGGNYIEYQNLVDYIKGKQGKHILYGCSELFNATQFIKQLSQLGQK

SEQ ID NO: 49884 - protein, 1368 aa, Homo sapiens
MYICTDQLGLEQDFEQKQMPEGKLNVDGFLLCIDVSQGCNRKFDDQLKFVNNLFVQLSKSKKPVIIAATKCDECVDHYLREVQAFASNKKNLLVVETSARFNVNIETCFTALVQMLDKTRSKPKIIPYLDAYKTQRQLVVTATDKFEKLVQTVRDYHATWKTVSNKLKNHPDYEEYINLEGTRKARNTFSKHIEQLKQEHIRKRREEYINTLPRAFNTLLPNLEEIEHLNWSEALKLMEKRADFQLCFVVLEKTPWDETDHIDKINDRRIPFDLLSTLEAEKVYQNHVQHLISEKRRVEMKEKFKKTLEKIQFISPGQPWEEVMCFVMEDEAYKYITEADSKEVYGRHQREIVEKAKEEFQEMLFEHSELFYDLDLNATPSSDKMSEIHTVLSEEPRYKALQKLAPDRESLLLKHIGFVYHPTKETCLSGQNCTDIKVEQLLASSLLQLDHGRLRLYHDSTNIDKVNLFILGKDGLAQELANEIRTQSTDDEYALDGKIYELDLRPVDAKSPYFLSQLWTAAFKPHGCFCVFNSIESLSFIGEFIGKIRTEASQIRKDKYMANLPFTLILANQRDSISKNLPILRHQGQQLANKLQCPFVDVPAGTYPRKFNETQIKQALRGVLESVKHNLDVVSPIPANKDLSEADLRIVMCAMCGDPFSVDLILSPFLDSHSCSAAQAGQNNSLMLDKIIGEKRRRIQITILSYHSSIGVRKDELVHGYILVYSAKRKASMGMLRAFLSEVQDTIPVQLVAVTDSQADFFENEAIKELMTEGEHIATEITAKFTALYSLSQYHRQTEVFTLFFSDVLEKKNMIENSYLSDNTRESTHQSEDVFLPSPRDCFPYNNYPDSDDDTEAPPPYSPIGDDVQLLPTPSDRSRYRLDLEGNEYPIHSTPNCHDHERNHKVPPPIKPKPVVPKTNVKKLDPNLLKTIEAGIGKNPRKQTSRVPLAHPEDMDPSDNYAEPIDTIFKQKGYSDEIYVVPDDSQNRIKIRNSFVNNTQGDEENGFSDRPQKVMGNGGLQNTNINLKPCLVKPSHTIEEHIQMPVMMRLSPLLKQRKGRHRGSEEDPLLSPVETWKGGIDNPAITSDQELDDKKMKKKTHKVKEDKKKKTKNFNPPTRRNWESNYFGMPLQDLVTAEKPIPLFVEKCVEFIEDTGLCTEGLYRVSGNKTDQDNIQKQFDQDHNINLVSMEVTVNAVAGALKAFFADLPDPLIPYSLHPELLEAAKIPDKTERLHALKEIVKKFHPVNYDVFRYVITHLNRVSQQHKINLMTADNLSICFWPTLMRPDLKIEFLSTTKIHQSVVETFIQQCQFFFYNGEIVETTNIVAPPPPSNPGQLVEPMVPLQLPPPLQPQLIQPQLQTDPLGII

SEQ ID NO: 49885 - protein, 1372 aa, Homo sapiens [sequence omitted]

SEQ ID NO: 49886 - protein, 1371 aa, Homo sapiens
MYICTDQLGLEQDFEQKQMPEGKLNVDGFLLCIDVSQGCNRKFDDQLKFVNNLFVQLSKSKKPVIIAATKCDECVDHYLREVQAFASNKKNLLVVETSARFNVNIETCFTALVQMLDKTRSKPKIIPYLDAYKTQRQLVVTATDKFEKLVQTVRDYHATWKTVSNKLKNHPDYEEYINLEGTRKARNTFSKHIEQLKQEHIRKRREEYINTLPRAFNTLLPNLEEIEHLNWSEALKLMEKRADFQLCFVVLEKTPWDETDHIDKINDRRIPFDLLSTLEAEKVYQNHVQHLISEKRRVEMKEKFKKTLEKIQFISPGQPWEEVMCFVMEDEAYKYITEADSKEVYGRHQREIVEKAKEEFQEMLFEHSELFYDLDLNATPSSDKMSEIHTVLSEEPRYKALQKLAPDRESLLLKHIGFVYHPTKETCLSGQNCTDIKVEQLLASSLLQLDHGRLRLYHDSTNIDKVNLFILGKDGLAQELANEIRTQSTDDEYALDGKIYELDLRPVDAKSPYFLSQLWTAAFKPHGCFCVFNSIESLSFIGEFIGKIRTEASQIRKDKYMANLPFTLILANQRDSISKNLPILRHQGQQLANKLQCPFVDVPAGTYPRKFNETQIKQALRGVLESVKHNLDVVSPIPANKDLSEADLRIVMCAMCGDPFSVDLILSPFLDSHSCSAAQAGQNNSLMLDKIIGEKRRRIQITILSYHSSIGVRKDELVHGYILVYSAKRKASMGMLRAFLSEVQDTIPVQLVAVTDSQADFFENEAIKELMTEGEHIATEITAKFTALYSLSQYHRQTEVFTLFFSDVLEKKNMIENSYLSDNTRESTHQSEDVFLPSPRDCFPYNNYPDSDDDTEAPPPYSPIGDDVQLLPTPSDRSRYRLDLEGNEYPIHSTPNCHDHERNHKVPPPIKPKPVVPKTNVKKLDPNLLKTIEAGIGKNPRKQTSRVPLAHPEDMDPSDNYAEPIDTIFKQKGYSDEIYVVPDDSQNRIKIRNSFVNNTQGDEENGFSDRTSKSHGERRPSKYKYKSKTLFSKAKSYYRRTHSDASDDEAFTTSKTKRKGRHRGSEEDPLLSPVETWKGGIDNPAITSDQELDDKKMKKKTHKVKEDKKKKKTKNFNPPTRRNWESNYFGMPLQDLVTAEKPIPLFVEKCVEFIEDTGLCTEGLYRVSGNKTDQDNIQKQFDQDHNINLVSMEVTVNAVAGALKAFFADLPDPLIPYSLHPELLEAAKIPDKTERLHALKEIVKKFHPVNYDVFRYVITHLNRVSQQHKINLMTADNLSICFWPTLMRPDFENREFLSTTKIHQSVVETFIQQCQFFFYNGEIVETTNIVAPPPPSNPGQLVEPMVPLQLPPPLQPQLIQPQLQTDPLGII

SEQ ID NO: 49887 - protein, 2169 aa, Homo sapiens
MEGEVLPKNIQRAAASLVSREESKNDNADKTDRTTEPEQSHSNTSTLTEREPSSSSLCSIDEEHLTDIEIVRRVFSSKRSNVNFVTEIFRQAFLLPICEAAAMRKVVKVYQEWIQQEEKPLFMQEPEEIVITSSDLPCIENVTDHDISMEEGEKREEENGTNTADHVRNSSWAKNGSYQGALHNASEEATEQNIRAGTQAVLQVFIINSSNIFLLEPANEIKNLLDEHTDMCKRILNIYRYMVVQVSMDKKTWEQMLLVLLRVTESVLKMPSQAFLQFQGKKNMTLAGRLAGPLFQTLIVAWIKANLNVYISRELWDDLLSVLSSLTYWEELATEWSLTMETLTKVLARNLYSLDLSDLPLDKLSEQKQKKHKGKGVGHEFQKVSVDKSFSRGWSRDQPGQAPMRQRSATTTGSPGTEKARSIVRQKTVDIDDAQILPRSTRVRHFSQSEETGNEVFGALNEEQPLPRSSSTSDILEPFTVERAKGAVPVIDSSSRHAPSLQSSTEASSITRSTESHITDTHSRESSLEVGDSIYDHLCHLIGPVELADSAFEQIQYIDLEGDDDLLSTLKEYFKENQENHSKNETGKDPASQEVTIAVNRGERLSLDKLECTDQETESENITSFVGTPENLQFQKEPNSAVFMSNIAPNQSDSFFRTQTSEKSKQLNTDKQPSEPSLDSPCDKEKRKHLYRQAATELDACVDVTLVEKLKSVQINEKITVPHVMRAKKATLKAPVNRRMPHVTSTSKLSPTKRSLSETVTHRAKIMKIATKKRNSVHVTFRPSTESVQFYNPLENKEAPWKMRLRKLGGFSSGSSNSSTSNTHTSTNSATELVKPGVYRPLDTLGTASVSSKTVKESTEIPTTILQKEGIASSQLGSRSTLRSSSHEAGLQQGSLGGVYKTVVHALSKPKANVSPQRQNRMPPEAPLRDLYSHVMGYFGRKAAVNKEDMSQKLPPLNSDIGGSSANVPDLMDEFIAERLRSGNASTMTRRGSSPGSLEIPKDLPDILNKQNQMRPIDDPGVPSEWTSPASAGSSDLISSDSHSDSFSAFQYDGRKFDNFGFGTDTGVTSSADVDSGSGHHQSAEEQEVASLTTLHIDSETSSLNQQAFSAEVATITGSESASPVHSPLGSRSQTPSPSTLNIDHMEQKDLQLDEKLHHSVLQTPDDLEISEFPSECCSVMAGGTLTGWHADVATVMWRRMLGILGDVNSIMDPEIHAQVFDYLCELWQNLAKIRDNLGISTDNLTSPSPPVLIPPLRILTPWLFKATMLTDKYKQGKLHAYKLICNTMKRRQDVSPNRDFLTHFYNIMHCGLLHIDQDIVNTIIKHCSPQFFSLGLPGATMLIMDFIVAAGRVASSAFLNAPRVEAQVLLGSLVCFPNLYCELPSLHPNIPDVAVSQFTDVKELIIKTVLSSARDEPSGPARCVALCSLGIWICEELVHESHHPQIKEALNVICVSLKFTNKTVAHVACNMLHMLVHYVPRLQIYQPDSPLKIIQILIATITHLLPSTEASSYEMDKRLVVSLLLCLLDWIMALPLKTLLQPFHATGAESDKTEKSVLNCIYKVLHGCVYGAQCFSNPRYFPMSLSDLASVDYDPFMHLESLKEPEPLHSPDSERSSKLQPVTEVKTQMQHGLISIAARTVITHLVNHLGHYPMSGGPAMLTSQVCENHDNHYSESTELSPELFESPNIQFFVLNNTTLVSCIQIRSEENMPGGGLSAGLASANSNVRIIVRDLSGKYSWDSAILYGPPPVSGLSEPTSFMLSLSHQEKPEEPPTSNECLEDITVKDGLSLQFKRFRETVPTWDTIRDEEDVLDELLQYLGVTSPECLQRTGISLNIPAPQPVCISEKQENDVINAILKQHTEEKEFVEKHFNDLNMKAVEQDEPIPQKPQSAFYYCRLLLSILGMNSWDKRRSFHLLKKNEKLLRELRNLDSRQCRETHKIAVFYVAEGQEDKHSILTNTGGSQAYEDFVAGLGWEVNLTNHCGFMGGLQKNKSTGLTTPYFATSTVEVIFHVSTRMPSDSDDSLTKKLRHLGNDEVHIVWSEHTRDYRRGIIPTEFGDVLIVIYPMKNHMFSIQIMKKPEVPFFGPLFDGAIVNGKVLPIMVRATAINASRALKSLIPLYQNFYEERARYLQTIVQHHLEPTTFEDFAAQVFSPAPYHHLPSDADH

SEQ ID NO: 49888 - protein, 354 aa, Homo sapiens
MEEPGRNASQNGTLSEGQGSAILISFIYSVVCLVGLCGNSMVIYVILRYAKMKTATNIYILNLAIADELLMLSVPFLVTSTLLRHWPFGALLCRLVLSVDAVNMFTSIYCLTVLSVDRYVAVVHPIKAARYRRPTVAKVVNLGVWVLSLLVILPIVVFSRTAANSDGTVACNMLMPEPAQRWLVGFVLYTFLMGFLLPVGAICLCYVLIIAKMRMVALKAGWQQRKRSERKITLMVMMVVMVFVICWMPFYVVQLVNVFAEQDDATVSQLSVILGYANSCANPILYGFLSDNFKRSFQRILCLSWMDNAAEEPVDYYATALKSRAYSVEDFQPENLESGGVFRNGTCTSRITTL

SEQ ID NO: 49889 - protein, 446 aa, Homo sapiens
MKRQAAEEACILRGGALSTVRAGAELRAVLALLRAGPGPGGGSKDLLFWVALERRRSHCTLENEPLRGFSWLSSDPGGLESDTLQWVEEPQRSCTARRCAVLQATGGVEPAGWKEMRCHLRANGYLCKYQFEVLCPAPRPGAASNLSYRAPFQLHSAALDFSPPGTEVSALCRGQLPISVTCIADEIGARWDKLSGDVLCPCPGRYLRAGKCAELPNCLDDLGGFACECATGFELGKDGRSCVTSGEGQPTLGGTGVPTRRPPATATSPVPQRTWPIRVDEKLGETPLVPEQDNSVTSIPEIPRWGSQSTMSTLQMSLQAESKATITPSGSVISKFNSTTSSATPQAFDSSSAVVFIFVSTAVVVLVILTMTVLGLVKLCFHESPSSQPRKESMGPPGLESDPEPAALGSSSAHCTNNGVKVGDCDLRDRAEGALLAESPLGSSDA

SEQ ID NO: 49890 - protein, 239 aa, Homo sapiens
MAWVPAESAVEELMPRLLPVEPCDLTEGFDPSVPPRTPQEYLRRVQIEAAQCPDVVVAQIDPKKLKRKQSVNISLSGCQPAPEGYSPTLQWQQQQVAQFSTVRQNVNKHRSHWKSQQLDSNVTMPKSEDEEGWKKFCLGEKLCADGAVGPATNESPGIDYVQIGFPPLLSIVSRMNQATVTSVLEYLSNWFGERDFTPELGRWLYALLACLEKPLLPEAHSLIRQLARRCSEVRLLVVF

SEQ ID NO: 49891 - protein, 120 aa, Homo sapiens
MGFRVGQGLIERFTKDTARFKDELDIMKFICKDFWTTVFKKQIDNLRTNHQGIYVLQDNKFRLLTQMSAGKQYLEHASKYLAFTCGLIRGGLSNLGIKSIVTAEVSSMPACKFQVMIQKL

SEQ ID NO: 49892 - protein, 92 aa, Homo sapiens
MGFRVGQGLIERFTKDTARFKDELDIMKFICKDFWTTVFKKQIDNLRTNHQYLAFTCGLIRGGLSNLGIKSIVTAEVSSMPACKFQVMIQKL

SEQ ID NO: 49893 - protein, 742 aa, Homo sapiens
MRPDSNLYGFPWELVICAAVVGFFAVLFFLWRSFRSVRSRLYVGREKKLALMLSGLIEEKSKLLEKFSLVQKEYEGYEVESSLKDASFEKEATEAQSLEATCEKLNRSNSELEDEILCLEKELKEEKSKHSEQDELMADISKRIQSLEDESKSLKSQVAEAKMTFKIFQMNEERLKIAIKDALNENSQLQESQKQLLQEAEVWKEQVSELNKQKVTFEDSKVHAEQVLNDKESHIKTLTERLLKMKDWAAMLGEDITDDDNLELEMNSESENGAYLDNPPKGALKKLIHAAKLNASLKTLEGERNQIYIQLSEVDKTKEELTEHIKNLQTEQASLQSENTHFENENQKLQQKLKVMTELYQENEMKLHRKLTVEENYRLEKEEKLSKVDEKISHATEELETYRKRAKDLEEELERTIHSYQGQIISHEKKAHDNWLAARNAERNLNDLRKENAHNRQKLTETELKFELLEKDPYALDVPNTAFGREHSPYGPSPLGWPSSETRAFLSPPTLLEGPLRLSPLLPGGGGRGSRGPGNPLDHQITNERGESSCDRLTDPHRAPSDTGSLSPPWDQDRRMMFPPPGQSYPDSALPPQRQDRFCSNSGRLSGPAELRSFNMPSLDKMDGSMPSEMESSRNDTKDDLGNLNVPDSSLPAENEATGPGFVPPPLAPIRGPLFPVDARGPFLRRGPPFPPPPPGAMFGASRDYFPPGDFPGPPPAPFASARSPPGAGAPASGRGLGGPQK

SEQ ID NO: 49894 - protein, 780 aa, Homo sapiens
MRPDSNLYGFPWELVICAAVVGFFAVLFFLWRSFRSVRSRLYVGREKKLALMLSGLIEEKSKLLEKFSLVQKEYEGYEVESSLKDASFEKEATEAQSLEVENQMATCEKLNRSNSELEDEILCLEKELKEEKSKHSEQDELMADISKRIQSLEDESKSLKSQVAEAKMTFKIFQMNEERLKIAIKDALNENSQLQESQKQLLQEAEVWKEQVSELNKQKVTFEDSKVHAEQVLNDKESHIKTLTERLLKMKDWAAMLGEDITDDDNLELEMNSESENGAYLDNPPKGALKKLIHAAKLNASLKTLEGERNQIYIQLSEVDKTKEELTEHIKNLQTEQASLQSENTHFENENQKLQQKLKVMTELYQENEMKLHRKLTVEENYRLEKEEKLSKVDEKISHATEELETYRKRAKDLEEELERTIHSYQGQIISHEKKAHDNWLAARNAERNLNDLRKENAHNRQKLTETELKFELLEKDPYALDVPNTAFGREHSPYGPSPLGWPSSETRAFLSPPTLLEGPLRLSPLLPGGGGRGSRGPGNPLDHQITNERGESSCDRLTDPHRAPSDTGSLSPPWDQDRRMMFPPPGQSYPDSALPPQRQDRFCSNSGRLSGPAELRSFNMPSLDKMDGSMPSEMESSRNDTKDDLGNLNVPDSSLPAENEATGPGFVPPPLAPIRGPLFPVDARGPFLRRGPPFPPPPPGAMFGASRDYFPPGDFPGPPPAPFAMRNVYPPRGFPPYLPPRPGFFPPPPHSEGRSEFPSGLIPPSNEPATEHPEPQQET

SEQ ID NO: 49895 - protein, 172 aa, Homo sapiens
MFNYARDHQPCIIFMDEIDAIGGRRFSEGTSADREIQRTLMELLNQMDGFDTLHRVKMIMATNRPDTLDPALLRPGRLDRKIHIDLPNEQARLDILKIHAGPITKHGEIDYEAIVKLSDGFNGADLRNVCTEAGMFAIRADHDFVVQEDFMKAVRKVADSKKLESKLDYKPV

SEQ ID NO: 49896 - protein, 199 aa, Homo sapiens
MRREMQEILPGLFLGPYSSAMKSKLPVLQKHGITHIICIRQNIEANFIKPNFQQLFRYLVLDIADNPVENIIRFFPMTKEFIDGSLQMGGKVLVHGNAGISRSAAFVIAYIMETFGMKYRDAFAYVQERRFCINPNAGFVHQLQEYEAIYLAKLTIQMMSPLQIERSLSVHSGTTGSLKRTHEEEDDFGTMQVATAQNG

SEQ ID NO: 49897 - protein, 41 aa, Homo sapiens
MMYAGSKNKLVQTAELTKVFEIRNTEDLTEEWLREKLGFFH

SEQ ID NO: 49898 - protein, 829 aa, Homo sapiens [sequence omitted]

SEQ ID NO: 49899 - protein, 129 aa, Homo sapiens
MRTELSFNIQALAVCANICLATKDRQNPSLVWLFTGMFCIYSLFFAWRANLDISKPLFMGVVERFWMQSNAVVAVLAGIGLAAVVSETNRVLNSNGLQCLEWLSATLFVVYQIYSNYRDKVSLCCLGWS

SEQ ID NO: 49900 - protein, 31 aa, Homo sapiens
MFPTIASGGVCKTLWLKKAITLLMFIRLNFC

SEQ ID NO: 49901 - protein, 212 aa, Homo sapiens [sequence omitted]

SEQ ID NO: 49902 - protein, 288 aa, Homo sapiens [sequence omitted]

SEQ ID NO: 49903 - protein, 398 aa, Homo sapiens [sequence omitted]

SEQ ID NO: 49904 - protein, 676 aa, Homo sapiens
MRLTISYLRVRKLLDAGDLDIEDDMKAQMNCFYLKALDGFVMVLTDDGDMIYISDNVNKYMGLTQFELTGHSVFDFTHPCDHEEMREMLTHRNGLVKKGKEQNTQRSFFLRMKCTLTSRGRTMNIKSATWKVLHCTGHIHVYDTNSNQPQCGYKKPPMTCLVLICEPIPHPSNIEIPLDSKTFLSRHSLDMKFSYCDERITELMGYEPEELLGRSIYEYYHALDSDHLTKTHHDMFTKGQVTTGQYRMLAKRGGYVWVETQATVIYNTKNSQPQCIVCVNYVVSGIIQHDLIFSLQQTECVLKPVESSDMKMTQLFTKVESEDTSSLFDKLKKEPDALTLLAPAAGDTIISLDFGSNDTETDDQQLEEVPLYNDVMLPSPNEKLQNINLAMSPLPTAETPKPLRSSADPALNQEVALKLEPNPESLELSFTMPQIQDQTPSPSDGSTRQSSPEPNSPSEYCFYVDSDMVNEFKLELVEKLFAEDTEAKNPFSTQDTDLDLEMLAPYIPMDDDFQLRSFDQLSPLESSSASPESASPQSTVTVFQQTQIQEPTANATTTTATTDELKTVTKDRMEDIKILIASPSPTHIHKETTSATSSPYRDTQSRTASPNRAGKGVIEQTEKSHPRSPNVLSVALSQRTTVPEEELNPKILALQNAQRKRKMEHDGSLFQAVGII

SEQ ID NO: 49905 - protein, 767 aa, Homo sapiens [sequence omitted]

SEQ ID NO: 49906 - protein, 6705 aa, Homo sapiens
MSARKALLLWAQEQCATYESVNVTDFKSSWRNGMAFLAIIHALRPDLIDMKSVKHRSNKDNLREAFRIAEQELKIPRLLEPEDVDVVDPDEKSIMTYVAQFLQYSKDAPGTGEEAQGKVKDAMGWLTLQKEKLQKLLKDSENDTYFKKYNSLLSFMESFNEEKKSFLDVLSIKRDLDELDKDHLQLREAWDGLDHQINAWKIKLNYALPPPLHQTEAWLQEVEELMDEDLSASQDHSQAVTLIQEKMTLFKSLMDRFEHHSNILLTFENKDENHLPLVPPNKLEEMKRRINNILEKKFILLLEFHYYKCLVLGLVDEVKSKLDIWNIKYGSRESVELLLEDWHKFIEEKEFLARLDTSFQKCGEIYKNLAGECQNINKQYMMVKSDVCMYRKNIYNVKSTLQKVLACWATYVENLRLLRACFEETKKEEIKEVPFETLAQWNLEHATLNEAGNFLVEVSNDVVGSSISKELRRLNKRWRKLVSKTQLEMNLPLMIKKQDQPTFDNSGNILSKEEKATVEFSTDMSVELPENYNQNIKAGEKHEKENEEFTGQLKVAKDVEKLIGQVEIWEAEAKSVLDQDDVDTSMEESLKHLIAKGSMFDELMARSEDMLQMDIQNISSQESFQHVLTTGLQAKIQEAKEKVQINVVKLIAALKNLTDVSPDLDIRLKMEESQKELESYMMRAQQLLGQRESPGELISKHKEALIISNTKSLAKYLKAVEELKNNVTEDIKMSLEEKSRDVCAKWESLHHELSLYVQQLKIDIEKGKLSDNILKLEKQINKEKKLIRRGRTKGLIKEHEACFSEEGCLYQLNHHMEVLRELCEELPSQKSQQEVKRLLKDYEQKIERLLKCASEIHMTLQPTAGGTSKNEGTITTSENRGGDPHSEAPFAKSDNQPSTEKAMEPTMKFSLASVLRPLQEESIMEKDYSASINSLLERYDTYRDILEHHLQNNKFRITSDFSSEEDRSSSCLQAKLTDLQVIKNETDARWKEFEIISLKLENHVNDIKKPFVIKERDTLKERERELQMTLNTRMESLETALRLVLPVEKASLLLCGSDLPLHKMAIQGFHLIDADRIYQHLRNIQDSIAKQIEICNRLEEPGNFVLKELHPFDLHAMQNIILKYKTQFEGMNHRVQRSEDTLKALEDFLASLRTAKLSAEPVTDLSASDTQVAQENTLTVKNKEGEIHLMKDKAKHLDKCLKMLDMSFKDAERGDDTSCENLLDAFSIKLSETHGYGVQEEFTEENKLLEACIFKNNELLKNIQDVQSQISKIGLKDPTVPAVKHRKKSLIRLDKVLDEYEEEKRHLQEMANSLPHFKDGREKTVNQQCQNTVVLWENTKALVTECLEQCGRVLELLKQYQNFKSILTTLIQKEESVISLQASYMGKENLKKRIAEIEIVKEEFNEHLEVVDKINQVCKNLQFYLNKMKTFEEPPFEKEANIIVDRWLDINEKTEDYYENLGRALALWDKLFNLKNVIDEWTEKALQKMELHQLTEEDRERLKEELQVHEQKTSEFSRRVAEIQFLLQSSEIPLELQVMESSILNKMEHVQKCLTGESNCHALSGSTAELREDLDQAKTQIGMTESLLKALSPSDSLEIFTKLEEIQQQILQQKHSMILLENQIGCLTPELSELKKQYESVSDLFNTKKSVLQDHFSKLLNDQCKNFNDWFSNIKVNLKECFESSETKKSVEQKLQKLSDFLTLEGRNSKIKQVDSVLKHVKKHLPKAHVKELISWLVGQEFELEKMESICQARAKELEDSLQQLLRLQDDHRNLRKWLTNQEEKWKGMEEPGEKTELFCQALARKREQFESVAQLNNSLKEYGFTEEEEIIMEATCLMDRYQTLLRQLSEIEEEDKLLPTEDQSFNDLAHDVIHWIKEIKESLMVLNSSEGKMPLEERIQKIKEIILLKPEGDARIETIMKQAESSEAPLVQKTLTDISNQWDNTLHLASTYLSHQEKLLLEGEKYLQSKEDLRLMLIELKKKQEAGFALQHGLQEKKAQLKIYKKFLKKAQDLTSLLKELKSQGNYLLECTKNPSFSEEPWLEIKHLHESLLQQLQDSVQNLDGHVREHDSYQVCVTDLNTTLDNFSKEFVSFSDKPVDQIAVEEKLQKLQELENRLSLQDGTLKKILALAKSVKQNTSSVGQKIIKDDIKSLQCKQKDLENRLASAKQEMECCLNSILKSKRSTEKKGKFTLPGREKQATSDVQESTQESAAVEKLEEDWEINKDSAVEMAMSKQLSLNAQESMKNTEDERKVNELQNQPLELDTMLRNEQLEEIEKLYTQLEAKKAAIKPLEQTECLNKTETGALVLHNIGYSAQHLDNLLQALITLKKNKESQYCVLRDFQEYLAAVESSMKALLTDKESLKVGPLDSVTYLDKIKKFIASIEKEKDSLGNLKIKWENLSNHVTDMDKKLLESQIKQLEHGWEQVEQQIQKKYSQQVVEYDEFTTLMNKVQDTEISLQQQQQHLQLRLKSPEERAGNQSMIALTTDLQATKHGFSVLKGQAELQMKRIWGEKEKKNLEDGINNLKKQWETLEPLHLEAENQIKKCDIRNKMKETILWAKNLLGELNPSIPLLPDDILSQIRKCKVTHDGILARQQSVESLAEEVKDKVPSLTTYEGSDLNNTLEDLRNQYQMLVLKSTQRSQQLEFKLEERSNFFAIIRKFQLMVQESETLIIPRVETAATEAELKHHHVTLEASQKELQEIDSGISTHLQELTNIYEELNVFERLFLEDQLKNLKIRTNRIQRFIQNTCNEVEHKIKFCRQFHEKTSALQEEADSIQRNELLLNQEVNKGVKEEIYNLKDRLTAIKCCILQVLKLKKVFDYIGLNWDFSQLDQLQTQVFEKEKELEEKIKQLDTFEEEHGKYQALLSKMRAIDLQIKKMTEVVLKAPDSSPESRRLNAQILSQRIEKAKCLCDEIIKKLNENKTFDDSFKEKEILQIKLNAEENDKLYKVLQNMVLELSPKELDEKNCQDKLETSLHVLNQIKSQLQQPLLINLEIKHIQNEKDNCEAFQEQVWAEMCSIKAVTAIEKQREENSSEASDVETKLREFEDLQMQLNTSIDLRTNVLNDAYENLTRYKEAVTRAVESITSLEAIIIPYRVDVGNPEESLEMPLRKQEELESTVAHIQDLTEKLGMISSPEAKLQLQYTLQELVSKNSAMKEAFKAQETEAERYLENYKCYRKMEEDIYTNLSKMETVLGQSMSSLPLSYREALERLEQSKALVSNLISTKEELMKLRQILRLLRLRCTENDGICLLKIVSALWEKWLSLLEAAKEWEMWCEELKQEWKFVSEEIEREAIILDNLQEELPEISKTKEAATTEELSELLDCLCQYGENVEKQQLLLTLLLQRIRSIQNVPESSGAVETVPAFQEITSMKERCNKLLQKVQKNKELVQTEIQERHSFTKEIIALKNFFQQTTTSFQNMAFQDHPEKSEQFEELQSILKKGKLTFENIMEKLRIKYSEMYTIVPAEIESQVEECRKALEDIDEKISNEVLKSSPSYAMRRKIEEINNGLHNVEKMLQQKSKNIEKAQEIQKKMWDELDLWHSKLNELDSEVQDIVEQDPGQAQEWMDNLMIPFQQYQQVSQRAECRTSQLNKATVKMEEYSDLLKSTEAWIENTSHLLANPADYDSLRTLSHHASTVQMALEDSEQKHNLLHSIFMDLEDLSIIFETDELTQSIQELSNQVTALQQKIMESLPQIQRMADDVVAIESEVKSMEKRVSKIKTILLSKEIFDFSPEEHLKHGEVILENIRPMKKTIAEIVSYQVELRLPQTGMKPLPVFQRTNQLLQDIKLLENVTQEQNELLKVVIKQTNEWDEEIENLKQILNNYSAQFSLEHMSPDQADKLPQLQGEIERMEKQILSLNQRKEDLLVDLKATVLNLHQHLKQEQEGVERDRLPAVTSEEGGVAERDASERKLNRRGSMSYLAAVEEEVEESSVKSDNGDEKAEPSPQSWSSLWKHDKDMEEDRASSSSGTIVQEAYGKISTSDNSMAQILTPDSLNTEQGPECSLRPNQTEEGTTPPIEADTLDSSDAQGGLEPRVEKTRPEPTEVLHACKTQVAELELWLQQANVAVEPETLNADMQQVLEQQLVGCQAMLTEIEHKVAFLLETCKDQGLGDNGATQHEAEALSLKLKTVKCNLEKVQMMLQEKHSEDQHPTILKKSSEPEHQEALQPVNLSELESIVTERPQFSRQKDFQQQQVLELKPMEQKDFIKFIEFNAKKMWPQYCQHDNDTTQESSASNQASSPENDVPDSILSPQGQNGDKWQYLHHELSSKIKLPLPQLVEPQVSTNMGILPSVTMYNFRYPTTEELKTYTTQLEDLRQEASNLQTQENMTEEAYINLDKKLFELFLTLSQCLSSVEEMLEMPRLYREDGSGQQVHYETLALELKKLYLALSDKKGDLLKAMTWPGENTNLLLECFDNLQVCLEHTQAAAVCRSKSLKAGLDYNRSYQNEIKRLYHQLIKSKTSLQQSLNEISGQSVAEQLQKADAYTVELENAESRVAKLRDEGERLHLPYALLQEVYKLEDVLDSMWGMLRARYTELSSPFVTESQQDALLQGMVELVKIGKEKLAHGHLKQTKSKVALQAQIENHKVFFQKLVADMLLIQAYSAKILPSLLQNRETFWAEQVTEVKILEEKSRQCGMKLQSLLQKWEEFDENYASLEKDLEILISTLPSVSLVEETEERLVERISFYQQIKRNIGGKHARLYQTLNEGKQLVASVSCPELEGQIAKLEEQWLSLNKKIDHELHRLQALLKHLLSYNRDSDQLTKWLESSQHTLNYWKEQSLNVSQDLDTIRSNINNFFEFSKEVDEKSSLKTAVISIGNQLLHLKETDTATLRASLAQFEQKWTMLITQLPDIQEKLHQLQMEKLPSRKAITEMISWMNNVEHQTSDEDSVHSPSSASQVKHLLQKHKEFRMEMDYKQWIVDFVNQSLLQLSTCDVESKRYERTEFAEHLGEMNRQWHRVHGMLNRKIQHLEQLLESITESENKIQILNNWLEAQEERLKTLQKPESVISVQKLLLDCQDIENQLAIKSKALDELKQSYLTLESGAVPLLEDTASRIDELFQKRSSVLTQVNQLKTSMQSVLQEWKIYDQLYDEVNMMTIRFWYCMEHSKPVVLSLETLRCQVENLQSLQDEAESSEGSWEKLQEVIGKLKGLCPSVAEIIEEKCQNTHKRWTQVNQAIADQLQKAQSLLQLWKAYSNAHGEAAARLKQQEAKFQQLANISMSGNNLAEILPPALQDIKELQHDVQKTKEAFLQNSSVLDRLPQPAESSTHMLLPGPLHSLQRAAYLEKMLLVKANEFEFVLSQFKDFGVRLESLKGLIMHEEENLDRLHQQEKENPDSFLNHVLALTAQSPDIEHLNEVSLKLPLSDVAVKTLQNMNRQWIRATATALERCSELQGIGLNEKFLYCCEKWIQLLEKIEEALKVDVANSLPELLEQQKTYKMLEAEVSINQTIADSYVTQSLQLLDTTEIENRPEFITEFSKLTDRWQNAVQGVRQRKGDVDGLVRQWQDFTTSVENLFRFLTDTSHLLSAVKGQERFSLYQTRSLIHELKNKEIHFQRRRTTCALTLEAGEKLLLTTDLKTKESVGRRISQLQDSWKDMEPQLAEMIKQFQSTVETWDQCEKKIKELKSRLQVLKAQSEDPLPELHEDLHNEKELIKELEQSLASWTQNLKELQTMKADLTRHVLVEDVMVLKEQIEHLHRQWEDLCLRVAIRKQEIEDRLNTWVVFNEKNKELCAWLVQMENKVLQTADISIEEMIEKLQKDCMEEINLFSENKLQLKQMGDQLIKASNKSRAAEIDDKLNKINDRWQHLFDVIGSRVKKLKETFAFIQQLDKNMSNLRTWLARIESELSKPVVYDVCDDQEIQKRLAEQQDLQRDIEQHSAGVESVFNICDVLLHDSDACANETECDSIQQTTRSLDRRWRNICAMSMERRMKIEETWRLWQKFLDDYSRFEDWLKSAERTAACPNSSEVLYTSAKEELKRFEAFQRQIHERLTQLELINKQYRRLARENRTDTASRLKQMVHEGNQRWDNLQRRVTAVLRRLRHFTNQREEFEGTRESILVWLTEMDLQLTNVEHFSESDADDKMRQLNGFQQEITLNTNKIDQLIVFGEQLIQKSEPLDAVLIEDELEELHRYCQEVFGRVSRFHRRLTSCTPGLEDEKEASENETDMEDPREIQTDSWRKRGESEEPSSPQSLCHLVAPGHERSGCETPVSVDSIPLEWDHTGDVGGSSSHEEDEEGPYYSALSGKSISDGHSWHVPDSPSCPEHHYKQMEGDRNVPPVPPASSTPYKPPYGKLLLPPGTDGGKEGPRVLNGNPQQEDGGLAGITEQQSGAFDRWEMIQAQELHNKLKIKQNLQQLNSDISAITTWLKKTEAELEMLKMAKPPSDIQEIELRVKRLQEILKAFDTYKALVVSVNVSSKEFLQTESPESTELQSRLRQLSLLWEAAQGAVDSWRGGLRQSLMQCQDFHQLSQNLLLWLASAKNRRQKAHVTDPKADPRALLECRRELMQLEKELVERQPQVDMLQEISNSLLIKGHGEDCIEAEEKVHVIEKKLKQLREQVSQDLMALQGTQNPASPLPSFDEVDSGDQPPATSVPAPRAKQFRAVRTTEGEEETESRVPGSTRPQRSFLSRVVRAALPLQLLLLLLLLLACLLPSSEEDYSCTQANNFARSFYPMLRYTNGPPPT

SEQ ID NO: 49907 - protein, 6727 aa, Homo sapiens
MSARKALLLWAQEQCATYESVNVTDFKSSWRNGMAFLAIIHALRPDLIDMKSVKHRSNKDNLREAFRIAEQELKIPRLLEPEDVDVVDPDEKSIMTYVAQFLQYSKDAPGTGEEAQGKVKDAMGWLTLQKEKLQKLLKDSENDTYFKKYNSLLSFMESFNEEKKSFLDVLSIKRDLDELDKDHLQLREAWDGLDHQINAWKIKLNYALPPPLHQTEAWLQEVEELMDEDLSASQDHSQAVTLIQEKMTLFKSLMDRFEHHSNILLTFENKDENHLPLVPPNKLEEMKRRINNILEKKFILLLEFHYYKCLVLGLVDEVKSKLDIWNIKYGSRESVELLLEDWHKFIEEKEFLARLDTSFQKCGEIYKNLAGECQNINKQYMMVKSDVCMYRKNIYNVKSTLQKVLACWATYVENLRLLRACFEETKKEEIKEVPFETLAQWNLEHATLNEAGNFLVEVSNDVVGSSISKELRRLNKRWRKLVSKTQLEMNLPLMIKKQDQPTFDNSGNILSKEEKATVEFSTDMSVELPENYNQNIKAGEKHEKENEEFTGQLKVAKDVEKLIGQVEIWEAEAKSVLDQDDVDTSMEESLKHLIAKGSMFDELMARSEDMLQMDIQNISSQESFQHVLTTGLQAKIQEAKEKVQINVVKLIAALKNLTDVSPDLDIRLKMEESQKELESYMMRAQQLLGQRESPGELISKHKEALIISNTKSLAKYLKAVEELKNNVTEDIKMSLEEKSRDVCAKWESLHHELSLYVQQLKIDIEKGKLSDNILKLEKQINKEKKLIRRGRTKGLIKEHEACFSEEGCLYQLNHHMEVLRELCEELPSQKSQQEVKRLLKDYEQKIERLLKCASEIHMTLQPTAGGTSKNEGTITTSENRGGDPHSEAPFAKSDNQPSTEKAMEPTMKFSLASVLRPLQEESIMEKDYSASINSLLERYDTYRDILEHHLQNNKFRITSDFSSEEDRSSSCLQAKLTDLQVIKNETDARWKEFEIISLKLENHVNDIKKPFVIKERDTLKERERELQMTLNTRMESLETALRLVLPVEKASLLLCGSDLPLHKMAIQGFHLIDADRIYQHLRNIQDSIAKQIEICNRLEEPGNFVLKELHPFDLHAMQNIILKYKTQFEGMNHRVQRSEDTLKALEDFLASLRTAKLSAEPVTDLSASDTQVAQENTLTVKNKEGEIHLMKDKAKHLDKCLKMLDMSFKDAERGDDTSCENLLDAFSIKLSETHGYGVQEEFTEENKLLEACIFKNNELLKNIQDVQSQISKIGLKDPTVPAVKHRKKSLIRLDKVLDEYEEEKRHLQEMANSLPHFKDGREKTVNQQCQNTVVLWENTKALVTECLEQCGRVLELLKQYQNFKSILTTLIQKEESVISLQASYMGKENLKKRIAEIEIVKEEFNEHLEVVDKINQVCKNLQFYLNKMKTFEEPPFEKEANIIVDRWLDINEKTEDYYENLGRALALWDKLFNLKNVIDEWTEKALQKMELHQLTEEDRERLKEELQVHEQKTSEFSRRVAEIQFLLQSSEIPLELQVMESSILNKMEHVQKCLTGESNCHALSGSTAELREDLDQAKTQIGMTESLLKALSPSDSLEIFTKLEEIQQQILQQKHSMILLENQIGCLTPELSELKKQYESVSDLFNTKKSVLQDHFSKLLNDQCKNFNDWFSNIKVNLKECFESSETKKSVEQKLQKLSDFLTLEGRNSKIKQVDSVLKHVKKHLPKAHVKELISWLVGQEFELEKMESICQARAKELEDSLQQLLRLQDDHRNLRKWLTNQEEKWKGMEEPGEKTELFCQALARKREQFESVAQLNNSLKEYGFTEEEEIIMEATCLMDRYQTLLRQLSEIEEEDKLLPTEDQSFNDLAHDVIHWIKEIKESLMVLNSSEGKMPLEERIQKIKEIILLKPEGDARIETIMKQAESSEAPLVQKTLTDISNQWDNTLHLASTYLSHQEKLLLEGEKYLQSKEDLRLMLIELKKKQEAGFALQHGLQEKKAQLKIYKKFLKKAQDLTSLLKELKSQGNYLLECTKNPSFSEEPWLEIKHLHESLLQQLQDSVQNLDGHVREHDSYQVCVTDLNTTLDNFSKEFVSFSDKPVDQIAVEEKLQKLQELENRLSLQDGTLKKILALAKSVKQNTSSVGQKIIKDDIKSLQCKQKDLENRLASAKQEMECCLNSILKSKRSTEKKGKFTLPGREKQATSDVQESTQESAAVEKLEEDWEINKDSAVEMAMSKQLSLNAQESMKNTEDERKVNELQNQPLELDTMLRNEQLEEIEKLYTQLEAKKAAIKPLEQTECLNKTETGALVLHNIGYSAQHLDNLLQALITLKKNKESQYCVLRDFQEYLAAVESSMKALLTDKESLKVGPLDSVTYLDKIKKFIASIEKEKDSLGNLKIKWENLSNHVTDMDKKLLESQIKQLEHGWEQVEQQIQKKYSQQVVEYDEFTTLMNKVQDTEISLQQQQQHLQLRLKSPEERAGNQSMIALTTDLQATKHGFSVLKGQAELQMKRIWGEKEKKNLEDGINNLKKQWETLEPLHLEAENQIKKCDIRNKMKETILWAKNLLGELNPSIPLLPDDILSQIRKCKVTHDGILARQQSVESLAEEVKDKVPSLTTYEGSDLNNTLEDLRNQYQMLVLKSTQRSQQLEFKLEERSNFFAIIRKFQLMVQESETLIIPRVETAATEAELKHHHVTLEASQKELQEIDSGISTHLQELTNIYEELNVFERLFLEDQLKNLKIRTNRIQRFIQNTCNEVEHKIKFCRQFHEKTSALQEEADSIQRNELLLNQEVNKGVKEEIYNLKDRLTAIKCCILQVLKLKKVFDYIGLNWDFSQLDQLQTQVFEKEKELEEKIKQLDTFEEEHGKYQALLSKMRAIDLQIKKMTEVVLKAPDSSPESRRLNAQILSQRIEKAKCLCDEIIKKLNENKTFDDSFKEKEILQIKLNAEENDKLYKVLQNMVLELSPKELDEKNCQDKLETSLHVLNQIKSQLQQPLLINLEIKHIQNEKDNCEAFQEQVWAEMCSIKAVTAIEKQREENSSEASDVETKLREFEDLQMQLNTSIDLRTNVLNDAYENLTRYKEAVTRAVESITSLEAIIIPYRVDVGNPEESLEMPLRKQEELESTVAHIQDLTEKLGMISSPEAKLQLQYTLQELVSKNSAMKEAFKAQETEAERYLENYKCYRKMEEDIYTNLSKMETVLGQSMSSLPLSYREALERLEQSKALVSNLISTKEELMKLRQILRLLRLRCTENDGICLLKIVSALWEKWLSLLEAAKEWEMWCEELKQEWKFVSEEIEREAIILDNLQEELPEISKTKEAATTEELSELLDCLCQYGENVEKQQLLLTLLLQRIRSIQNVPESSGAVETVPAFQEITSMKERCNKLLQKVQKNKELVQTEIQERHSFTKEIIALKNFFQQTTTSFQNMAFQDHPEKSEQFEELQSILKKGKLTFENIMEKLRIKYSEMYTIVPAEIESQVEECRKALEDIDEKISNEVLKSSPSYAMRRKIEEINNGLHNVEKMLQQKSKNIEKAQEIQKKMWDELDLWHSKLNELDSEVQDIVEQDPGQAQEWMDNLMIPFQQYQQVSQRAECRTSQLNKATVKMEEYSDLLKSTEAWIENTSHLLANPADYDSLRTLSHHASTVQMALEDSEQKHNLLHSIFMDLEDLSIIFETDELTQSIQELSNQVTALQQKIMESLPQIQRMADDVVAIESEVKSMEKRVSKIKTILLSKEIFDFSPEEHLKHGEVILENIRPMKKTIAEIVSYQVELRLPQTGMKPLPVFQRTNQLLQDIKLLENVTQEQNELLKVVIKQTNEWDEEIENLKQILNNYSAQFSLEHMSPDQADKLPQLQGEIERMEKQILSLNQRKEDLLVDLKATVLNLHQHLKQEQEGVERDRLPAVTSEEGGVAERDASERKLNRRGSMSYLAAVEEEVEESSVKSDNGDEKAEPSPQSWSSLWKHDKDMEEDRASSSSGTIVQEAYGKISTSDNSMAQILTPDSLNTEQGPECSLRPNQTEEGTTPPIEADTLDSSDAQGGLEPRVEKTRPEPTEVLHACKTQVAELELWLQQANVAVEPETLNADMQQVLEQQLVGCQAMLTEIEHKVAFLLETCKDQGLGDNGATQHEAEALSLKLKTVKCNLEKVQMMLQEKHSEDQHPTILKKSSEPEHQEALQPVNLSELESIVTERPQFSRQKDFQQQQVLELKPMEQKDFIKFIEFNAKKMWPQYCQHDNDTTQESSASNQASSPENDVPDSILSPQGQNGDKWQYLHHELSSKIKLPLPQLVEPQVSTNMGILPSVTMYNFRYPTTEELKTYTTQLEDLRQEASNLQTQENMTEEAYINLDKKLFELFLTLSQCLSSVEEMLEMPRLYREDGSGQQVHYETLALELKKLYLALSDKKGDLLKAMTWPGENTNLLLECFDNLQVCLEHTQAAAVCRSKSLKAGLDYNRSYQNEIKRLYHQLIKSKTSLQQSLNEISGQSVAEQLQKADAYTVELENAESRVAKLRDEGERLHLPYALLQEVYKLEDVLDSMWGMLRARYTELSSPFVTESQQDALLQGMVELVKIGKEKLAHGHLKQTKSKVALQAQIENHKVFFQKLVADMLLIQAYSAKILPSLLQNRETFWAEQVTEVKILEEKSRQCGMKLQSLLQKWEEFDENYASLEKDLEILISTLPSVSLVEETEERLVERISFYQQIKRNIGGKHARLYQTLNEGKQLVASVSCPELEGQIAKLEEQWLSLNKKIDHELHRLQALLKHLLSYNRDSDQLTKWLESSQHTLNYWKEQSLNVSQDLDTIRSNINNFFEFSKEVDEKSSLKTAVISIGNQLLHLKETDTATLRASLAQFEQKWTMLITQLPDIQEKLHQLQMEKLPSRKAITEMISWMNNVEHQTSDEDSVHSPSSASQVKHLLQKHKEFRMEMDYKQWIVDFVNQSLLQLSTCDVESKRYERTEFAEHLGEMNRQWHRVHGMLNRKIQHLEQLLESITESENKIQILNNWLEAQEERLKTLQKPESVISVQKLLLDCQDIENQLAIKSKALDELKQSYLTLESGAVPLLEDTASRIDELFQKRSSVLTQVNQLKTSMQSVLQEWKIYDQLYDEVNMMTIRFWYCMEHSKPVVLSLETLRCQVENLQSLQDEAESSEGSWEKLQEVIGKLKGLCPSVAEIIEEKCQNTHKRWTQVNQAIADQLQKAQSLLQLWKAYSNAHGEAAARLKQQEAKFQQLANISMSGNNLAEILPPALQDIKELQHDVQKTKEAFLQNSSVLDRLPQPAESSTHMLLPGPLHSLQRAAYLEKMLLVKANEFEFVLSQFKDFGVRLESLKGLIMHEEENLDRLHQQEKENPDSFLNHVLALTAQSPDIEHLNEVSLKLPLSDVAVKTLQNMNRQWIRATATALERCSELQGIGLNEKFLYCCEKWIQLLEKIEEALKVDVANSLPELLEQQKTYKMLEAEVSINQTIADSYVTQSLQLLDTTEIENRPEFITEFSKLTDRWQNAVQGVRQRKGDVDGLVRQWQDFTTSVENLFRFLTDTSHLLSAVKGQERFSLYQTRSLIHELKNKEIHFQRRRTTCALTLEAGEKLLLTTDLKTKESVGRRISQLQDSWKDMEPQLAEMIKQFQSTVETWDQCEKKIKELKSRLQVLKAQSEDPLPELHEDLHNEKELIKELEQSLASWTQNLKELQTMKADLTRHVLVEDVMVLKEQIEHLHRQWEDLCLRVAIRKQEIEDRLNTWVVFNEKNKELCAWLVQMENKVLQTADISIEEMIEKLQKDCMEEINLFSENKLQLKQMGDQLIKASNKSRAAEIDDKLNKINDRWQHLFDVIGSRVKKLKETFAFIQQLDKNMSNLRTWLARIESELSKPVVYDVCDDQEIQKRLAEQQDLQRDIEQHSAGVESVFNICDVLLHDSDACANETECDSIQQTTRSLDRRWRNICAMSMERRMKIEETWRLWQKFLDDYSRFEDWLKSAERTAACPNSSEVLYTSAKEELKRFEAFQRQIHERLTQLELINKQYRRLARENRTDTASRLKQMVHEGNQRWDNLQRRVTAVLRRLRHFTNQREEFEGTRESILVWLTEMDLQLTNVEHFSESDADDKMRQLNGFQQEITLNTNKIDQLIVFGEQLIQKSEPLDAVLIEDELEELHRYCQEVFGRVSRFHRRLTSCTPGLEDEKEASENETDMEDPREIQTDSWRKRGESEEPSSPQSLCHLVAPGHERSGCETPVSVDSIPLEWDHTGDVGGSSSHEEDEEGPYYSALSDVEIPENPEAYLKMTTKTLKASSGKSISDGHSWHVPDSPSCPEHHYKQMEGDRNVPPVPPASSTPYKPPYGKLLLPPGTDGGKEGPRVLNGNPQQEDGGLAGITEQQSGAFDRWEMIQAQELHNKLKIKQNLQQLNSDISAITTWLKKTEAELEMLKMAKPPSDIQEIELRVKRLQEILKAFDTYKALVVSVNVSSKEFLQTESPESTELQSRLRQLSLLWEAAQGAVDSWRGGLRQSLMQCQDFHQLSQNLLLWLASAKNRRQKAHVTDPKADPRALLECRRELMQLEKELVERQPQVDMLQEISNSLLIKGHGEDCIEAEEKVHVIEKKLKQLREQVSQDLMALQGTQNPASPLPSFDEVDSGDQPPATSVPAPRAKFRAVRTTEGEEETESRVPGSTRPQRSFLSRVVRAALPLQLLLLLLLLLACLLPSSEEDYSCTQANNFARSFYPMLRYTNGPPPT

SEQ ID NO: 49908 - protein, 73 aa, Homo sapiens [sequence omitted]

SEQ ID NO: 49909 - protein, 225 aa, Homo sapiens
MESKRLRLLQEEDRRKKADTNSDRLFTVNDVKVGGSKYGIINLQSLKTPTLKVFMHENLYFTNRKAPLLFNGCRSGEIFAIDLRCGNQGKGWKATRLFHDSAVTSVRILQDEQYLMASDMAGKIKLWDLRTTKCVRQYEGHVNEYAYLPLHVHEEEGILVAVGQDCYTRIWSLHDARLLRTIPSPYPASKADIPSVAFSSRLGGSRGAPGLLMAVGQDLYCYSYS

SEQ ID NO: 49910 - protein, 368 aa, Homo sapiens
MLRKSQLGFLNVTNYCHLAHELRLSCMERKKVQIRSMDPSALASDRFNLILADTNSDRLFTVNDVKVGGSKYGIINLQSLKTPTLKVFMHENLYFTNRKVNSVCWASLNHLDSHILLCLMGLAETPGCATLLPASLFVNSHPGIDRPGMLCSFRIPGAWSCAWSLNIQANNCFSTGLSRRVLLTNVVTGHRQSFGTNSDVLAQQFALMAPLLFNGCRSGEIFAIDLRCGNQGKGWKATRLFHDSAVTSVRILQDEQYLMASDMAGKIKLWDLRTTKCVRQYEGHVNEYAYLPLHVHEEEGILVAVGQDCYTRIWSLHDARLLRTIPSPYPASKADIPSVAFSSRLGGSRGAPGLLMAVGQDLYCYSYS

SEQ ID NO: 49911 - protein, 70 aa, Homo sapiens
MGSHYVTQIGLELLGASHPPTSASQSAGITGSWGVLWQSIAPCTREKSRNDIFLGCISLPWSSSSSSQKH

SEQ ID NO: 49912 - protein, 60 aa, Homo sapiens
MFSPSCVSLLRCTGCCGDENLHCVPVETANVTMQLLKIRSGDRPSYVELTFSQHVRCECR

SEQ ID NO: 49913 - protein, 1183 aa, Homo sapiens
MWTGSHLKPFLLRTLSEAQKVNHFPRSYELTRKDRLYKNIIRMQHTHGFKAFHILPQTFLLPAEYAEFCNSYSKDRGPWIVKPVASSRGRGVYLINNPNQISLEENILVSRYINNPLLIDDFKFDVRLYVLVTSYDPLVIYLYEEGLARFATVRYDQGAKNIRNQFMHLTNYSVNKKSGDYVSCDDPEVEDYGNKWSMSAMLRYLKQEGRDTTALMAHVEDLIIKTIISAELAIATACKTFVPHRSSCFELYGFDVLIDSTLKPWLLEVNLSPSLACDAPLDLKIKASMISDMFTVVGFVCQDPAQRASTRPIYPTFESSRRNPFQKPQRPVSAQFQSSKAKQRCRPLSASDAEMKNLVGSAREKGPGKLGGSVLGLSMEEIKVLRRVKEENDRRGGFIRIFPTSETWEIYGSYLEHKTSMNYMLATRLFQDRMTADGAPELKIESLNSKAKLHAALYERKLLSLEVRKRRRRSSRLRAMRPKYPVITQPAEMNVKTETESEEEEEVALDNEDEEQEASQEESAGFLRENQAKYTPSLTALVENTPKENSMKVREWNNKGGHCCKLETQELEPKFNLMQILQDNGNLSKMQARIAFSAYLQHVQIRLMKDSGGQTFSASWAAKEDEQMELVVRFLKRASNNLQHSLRMVLPSRRLALLERRRILAHQLGDFIIVYNKETEQMAEKKSKKKVEEEEEDGVNMENFQEFIRQASEAELEEVLTFYTQKNKSASVFLGTHSKISKNNNNYSDSGAKGDHPETIMEEVKIKPPKQQQTTEIHSDKLSRFTTSAEKEAKLVYSNSSSGPTATLQKIPNTHLSSVTTSDLSPGPCHHSSLSQIPSAIPSMPHQPTILLNTVSASASPCLHPGAQNIPSPTGLPRCRSGSHTIGPFSSFQSAAHIYSQKLSRPSSAKAAGSCYLNKHHSGIAKTQKEGEDASLYSKRYNQSMVTAELQRLAEKQAARQYSPSSHINLLTQQVTNLNLATGIINRSSASAPPTLRPIISPSGPTWSTQSDPQAPENHSSSPGSRSLQTGGFAWEGEVENNVYSQATGVVPQHKYHPTAGSYQLQFALQQLEQQKLQSRQLLDQSRARHQAIFGSQTLPNSNLWTMNNGAGCRISSATASGQKPTTLPQKVVPPPSSCASLVPKPPPNHEQVLRRATSQKASNTRFRSSFQNYLWYFFQAVS

SEQ ID NO: 49914 - protein, 410 aa, Homo sapiens
MHLQRALVVLALLNFATVSLSLSTCTTLDFGHIKKKRVEAIRGQILSKLRLTSPPEPTVMTHVPYQVLALYNSTRELLEEMHGEREEGCTQENTESEYYAKEIHKFDMIQGLAEHNELAVCPKGITSKVFRFNVSSVEKNRTNLFRAEFRVLRVPNPSSKRNEQRIELFQILRPDEHIAKQRYIGGKNLPTRGTAEWLSFDVTDTVREWLLRRESNLGLEISIHCPCHTFQPNGDILENIHEVMEIKFKGVDNEDDHGRGDLGRLKKQKDHHNPHLILMMIPPHRLDNPGQGGQRKKRALDTNYCFRNLEENCCVRPLYIDFRQDLGWKWVHEPKGYYANFCSGPCPYLRSADTTHSTVLGLYNTLNPEASASPCCVPQDLEPLTILYYVGRTPKVEQLSNMVVKSCKCS

SEQ ID NO: 49915 - protein, 91 aa, Homo sapiens
MDSGLDKFSDSTFLLPSRPAQRGYHTRLNRLPGAAARCLRKGRRRLVGKETSINTLGTERISHIISDPRQKEKNKALASDFPHISACAHEF

SEQ ID NO: 49916 - protein, 659 aa, Homo sapiens [sequence omitted]

SEQ ID NO: 49917 - protein, 414 aa, Homo sapiens
MERQSHDYNWSFKYTGNIIKGVINMGSYNYLGFARNTGSCQEAAAKVLEEYGAGVCSTRQEIGNLDKHEELEELVARFLGVEAAMAYGMGFATNSMNIPALVGKGCLILSDELNHASLVLGARLSGATIRIFKHNNMQSLEKLLKDAIVYGQPRTRRPWKKILILVEGIYSMEGSIVRLPEVIALKKKYKAYLYLDEAHSIGALGPTGRGVVEYFGLDPEDVDVMMGTFTKSFGASGGYIGGKKELIDYLRTHSHSAVYATSLSPPVVEQIITSMKCIMGQDGTSLGKECVQQLAENTRYFRRRLKEMGFIIYGNEDSPVVPLMLYMPAKIGAFGREMLKRNIGVVVVGFPATPIIESRARFCLSAAHTKEILDTALKEIDEVGDLLQLKYSRHRLVPLLDRPFDETTYEETED

SEQ ID NO: 49918 - protein, 610 aa, Homo sapiens
MMYQTGMKILNGSNKKSQKREAYRYLQKAASMNHTKALERVSYALLFGDYLPQNIQAAREMFEKLTEEGSPKGQTALGFLYASGLGVNSSQAKALVYYTFGALGGNLIAHMVLGYRYWAGIGVLQSCESALTHYRLVANHVASDISLTGGSVVQRIRLPDEVENPGMNSGMLEEDLIQYYQFLAEKGDVQAQVGLGQLHLHGGRGVEQNHQRAFDYFNLAANAGNSHAMAFLGKMYSEGSDIVPQSNETALHYFKKAADMGNPVGQSGLGMAYLYGRGVQVNYDLALKYFQKAAEQGWVDGQLQLGSMYYNGIGVKRDYKQALKYFNLASQGGHILAFYNLAQMHASGTGVMRSCHTAVELFKNVCERGRWSERLMTAYNSYKDGDYNAAVIQYLLLAEQGYEVAQSNAAFILDQREASIVGENETYPRALLHWNRAASQGYTVARIKLGDYHFYGFGTDVDYETAFIHYRLASEQQHSAQAMFNLGYMHEKGLGIKQDIHLAKRFYDMAAEASPDAQVPVFLALCKLGVVYFLQYIRETNIRDMFTQLDMDQLLGPEWDLYLMTIIALLLGTVIAYRQRQHQDMPAPRPPGPRPAPPQQEGPPEQQPPQ

SEQ ID NO: 49919 - protein, 690 aa, Homo sapiens
MTEDLSLFLGNNTIRFTVWLHGVLDKLRSVTTEPSSLKSSDTNIFDSNVPSNKSNFSRGDERRHEAAVPPLAIPSARPEKRDSRVSTSSQESKTTNVRQTYDDGAATRLMSTVKPLREPAPSEDVIDIKPEPDDLIDEDLNFVQENPLSQKKPTVTLTYGSSRPSIEIYRPPASRNADSGVHLNRLQFQQQQNSIHAAKQLDMQSSWVYETGRLCEPEVLNSLEETYSPFFRNNSEKMSMEDENFRKRKLPVVSSVVKVKKFNHDGEEEEEDDDYGSRTGSISSSVSVPAKPERRPSLPPSKQANKNLILKAISEAQESVTKTTNYSTVPQKQTLPVAPRTRTSQEELLAEVVQGQSRTPRISPPIKEEETKGDSVEKNQGTQQRQLLSRLQIDPVMAETLQMSQDYYDMESMVHADTRSFILKKPKLSEEVVVAPNQESGMKTADSLRVLSGHLMQTRDLVQPDKPASPKFIVTLDGVPSPPGYMSDQEEDMCFEGMKPVNQTAASNKGLRGLLHPQQLHLLSRQLEDPNGSFSNAEMSELSVAQKPEKLLERCKYWPACKNGDECAYHHPISPCKAFPNCKFAEKCLFVHPNCKYDAKCTKPDCPFTHVSRRIPVLSPKPAVAPPAPPSSSQLCRYFPACKKMECPFYHPKHCRFNTQCTRPDCTFYHPTINVPPRHALKWIRPQTSE

SEQ ID NO: 49920 - protein, 533 aa, Homo sapiens
MTEDLSLFLGNNTIRFTVWLHGVLDKLRSVTTEPSSLKSSDTNIFDSNVPSNKSNFSRGDERRHEAAVPPLAIPSARPEKRDSRVSTSSQESKTTNVRQTYDDGAATRLMSTVKPLREPAPSEDVIDIKPEPDDLIDEDLNFVQENPLSQKKPTVTLTYGSSRPSIEIYRPPASRNADSGVHLNRLQFQQQQNSIHAAKQLDMQSSWVYETGRLCEPEVLNSLEETYSPFFRNNSEKMSMEDENFRKRKLPVVSSVVKVKKFNHDGEEEEEDDDYGSRTGSISSSVSVPAKPERRPSLPPSKQANKNLILKAISEAQESVTKTTNYSTVPQKQTLPVAPRTRTSQEELLAEVVQGQSRTPRISPPIKEEETKGDSVEKNQAEMSELSVAQKPEKLLERCKYWPACKNGDECAYHHPISPCKAFPNCKFAEKCLFVHPNCKYDAKCTKPDCPFTHVSRRIPVLSPKPVAPPAPPSSSQLCRYFPACKKMECPFYHPKHCRFNTQCTRPDCTFYHPTINVPPRHALKWIRPQTSE

SEQ ID NO: 49921 - protein, 559 aa, Homo sapiens
MTEDLSLFLGNNTIRFTVWLHGVLDKLRSVTTEPSSLKSSDTNIFDSNVPSNKSNFSRGDERRHEAAVPPLAIPSARPEKRDSRVSTSSQESKTTNVRQTYDDGAATRLMSTVKPLREPAPSEDVIDIKPEPDDLIDEDLNFVQENPLSQKKPTVTLTYGSSRPSIEIYRPPASRNADSGVHLNRLQFQQQQNSIHAAKQLDMQSSWVYETGRLCEPEVLNSLEETYSPFFRNNSEKMSMEDENFRKRKLPVVSSVVKVKKFNHDGEEEEEDDDYGSRTGSISSSVSVPAKPERRPSLPPSKQANKNLILKAISEAQESVTKTTNYSTVPQKQTLPVAPRTRTSQEELLAEVVQGQSRTPRISPPIKEEETKGDSVEKNQGTQQRQLLSRLQIDPVMAETLQMSQAEMSELSVAQKPEKLLERCKYWPACKNGDECAYHHPISPCKAFPNCKFAEKCLFVHPNCKYDAKCTKPDCPFTHVSRRIPVLSPKPAVAPPAPPSSSQLCRYFPACKKMECPFYHPKHCRFNTQCTRPDCTFYHPTINVPPRHALKWIRPQTSE

SEQ ID NO: 49922 - protein, 590 aa, Homo sapiens [sequence omitted]

SEQ ID NO: 49923 - protein, 533 aa, Homo sapiens
MAGELRPASLVVLPRSLAPAFERFCQVNTGPLPLLGQSEPEKWMLPPQGAISETRMGHPQFWKYEFGACTGSLASLEQYSEQLKDMVAFFLGCSFSLEEALEKAGLPRRDPAGHSQTTVPCVTHAGFCCPLVVTMRPIPKDKLEGLVRACCSLGELLGIKELSKPAYGDAMVCPPGEVPVFWPSPLTSLGAVSSCETPLAFASIPGCTVMTDLKDAKAPPGCLTPERIPEVHHISQDPLHYSIASVSASQKIRELESMIGIDPGNRGIGHLLCKDELLKASLSLSHARSVLITTGFPTHFNHEPPEETDGPPGAVALVAFLQALEKEVAIIVDQRAWNLHQKIVEDAVEQGVLKTQIPILTYQGGSVEAAQAFLCKNGDPQTPRFDHLVAIERAGRAADGNYYNARKMNIKHLVDPIDDLFLAAKKIPGISSTGVSNWGGYALACALYILYSCAVHSQYLRKAVGPSRAPGDQAWTQALPSVIKEEKMLGILVQHKVRSGVSGIVGMEVDGLPFHNTHAEMIQKLVDVTTAQV

SEQ ID NO: 49924 - protein, 242 aa, Homo sapiens
MDDSGFFSIQWFNLNSLLTGPELISDTYLALFLAQLQQEGYSIFVVKGDLPDCEADQLLQMIRVQQMHRPKLIGEELAQLKEQRVHKTDLERVLEANDGSGMLDEDEEDLQRALALSRQEIDMEDEEADLRRAIQLSMQGSSRNISQDMTQTSGTNLTSEELRKRREAYFEKQQQKQQQQQQQQQQGDLSGQSSHPCERPATSSGALGSDLGDAMSEEDMLQAAVTMSLETVRNDLKTEGKK

SEQ ID NO: 49925 - protein, 293 aa, Homo sapiens
MDDSGFFSIQVISNALKVWGLELILFNSPEYQRLRIDPINERSFICNYKEHWFTVRKLGKQWFNLNSLLTGPELISDTYLALFLAQLQQEGYSIFVVKGDLPDCEADQLLQMIRVQQMHRPKLIGEELAQLKEQRVHKTDLERVLEANDGSGMLDEDEEDLQRALALSRQEIDMEDEEADLRRAIQLSMQGSSRNISQDMTQTSGTNLTSEELRKRREAYFEKQQQKQQQQQQQQQQGDLSGQSSHPCERPATSSGALGSDLGDAMSEEDMLQAAVTMSLETVRNDLKTEGKK

SEQ ID NO: 49926 - protein, 26 aa, Homo sapiens
MDTLLESSITLLAFLGLSKETSTICL

SEQ ID NO: 49927 - protein, 498 aa, Homo sapiens
MFHSFKQFPRYVTGACCLFLAGKVEETPKKCKDIIKTARSLLNDVQFGQFGDDPKEEVMVLERILLQTIKFDLQVEHPYQFLLKYAKQLKGDKNKIQKLVQMAWTFVNDSLCTTLSLQWEPEIIAVAVMYLAGRLCKFEIQEWTSKPMYRRWWEQFVQDVPVDVLEDICHQILDLYSQGKQQMPHHTPHQLQQPPSLQPTPQVPQVQQSQPSQSSEPSQPQQKDPQQPAQQQQPAQQPKKPSPQPSSPRQVKRAVVVSPKEENKAAEPPPPKIPKIETTHPPLPPAHPPPDRKPPLAAALGEAEPPGPVDATDLPKVQIPPPAHPAPVHQPPPLPHRPPPPPPSSYMTGMSTTSSYMSGEGYQSLQSMMKTEGPSYGALPPAYGPPAHLPYHPHVYPPNPPPPPVPPPPASFPPPAIPPPTPGYPPPPPTYNPNFPPPPPRLPPTHAVPPHPPPGLGLPPASYPPPAVPPGGQPPVPPPIPPPGMPPVGGLGRAAWMR

SEQ ID NO: 49928 - protein, 403 aa, Homo sapiens
MVYDDTSKKWVPIKPGQQGFSRINIYHNTASNTFRVVGVKLQDQQVVINYSIVKGLKYNQATPTFHQWRDARQVYGLNFASKEEATTFSNAMLFALNIMNSQEGGPSSQRQVQNGPSPDEMDIQRRQVMEQHQQQRQESLERRTSATGPILPPGHPSSAASAPVSCSGPPPPPPPPVPPPPTGATPPPPPPLPAGGAQGSSHDESSMSGLAAAIAGAKLRRVQRPEDASGGSSPSGTSKSDANRASSGGGGGGLMEEMNKLLAKRRKAASQSDKPAEKKEDESQMEDPSTSPSPGTRAASQPPNSSEAGRKPWERSNSVEKPVSSILSRTPSVAKSPEAKSPLQSQPHSRMKPAGSVNDMALDAFDLDRMKQEILEEVVRELHKVKEEIIDAIRQELSGISTT

SEQ ID NO: 49929 - protein, 58 aa, Homo sapiens [sequence omitted]

SEQ ID NO: 49930 - protein, 40 aa, Homo sapiens
MGYSQEEIQESLSKMKYDEITATYLLLGRKSSEVRVIRKS

SEQ ID NO: 49931 - protein, 39 aa, Homo sapiens
MYYNRDWYKRNFAITFFMGKVALERIWNKLKQKQKKRSN

SEQ ID NO: 49932 - protein, 270 aa, Homo sapiens
MPREGGSTCTARCPDPGEHSSTWGEFEGFRESSAKSGQFSQSLELLEGPTEPQPPRTTSAPKECSSHQPCQGGPWVTGTSAVPPSEPILSYENILKCAFQEITVQQAAEDVSTIDHFLEISSEEKPGVERVHKLCNESRKLWRALQSIHTTSTSQRLWSESRCQENFFLVLGIDAAQKNLSGGQGHIMEDCDLKEPEGLLTVSSFCLQHCKALIQTKLSGPPGSKQGRLMTCSRFLKTPSCGGGQHITIPRKRMFTPRKLKLTLFNSDVC

SEQ ID NO: 49933 - protein, 791 aa, Homo sapiens
MLQRRKRYKNRTILGYKTLAAGSISMAEVMQHPSEGGQVLSLCSSIKEAPVKAAEIWIASLSSQPIDHEDSTMQAGPKAKSTDNYSEEEYESFSSEQEASDDAVQGQDLDEDDFDVGKPKKQRRSIVRTTSMTRQQNFKQKVVALLRRFKVSDEVLDSEQDPAEHIPEAEEDLDLLYDTLDMEHPSDSGPDMEDDDSVLSTPKPKLRPYFEGLSHSSSQTEIGSIHSARSHKEPPSPADVPEKTRSLGGRQPSDSVSDTVALGVPGPREHPGQPEDSPEAEASTLDVFTERLPPSGRITKTESLVIPSTRSEGKQAGRRGRSTSLKERQAARPQNERANSLDNERCPDARSQLQVQLQIPRKTVYDQLNHILISDDQLPENIILVNTSDWQGQFLSDVLQRHTLPVVCTCSPADVQAAFSTIVSRIQRYCNCNSQPPTPVKIAVAGAQHYLSAILRLFVEQLSHKTPDWLGYMRFLVIPLGSHPVARYLGSVDYRYNNFFQDLAWRDLFNKLEAQSAVQDTPDIVSRITQYIAGANCAHQLPIAEAMLTYKQKRKKHFHFDFTLSPDEESSQKFIPFVGVVKVGIVEPSSATSGDSDDAAPSGSGTLSSTPPSASPAAKEASPTPPSSPSVSGGLSSPSQGVGAELMGLQVDYWTAAQPADRKRDAEKKDLPVTKNTLKCTFRSLQVSRLPSSGEAAATPTMSMTVVTKEKNKKVMFLPKKAKDKDVESKSQCIEGISRLICTARQQQNMLRVLIDGVECSDVKFFQLAAQWSSHVKHFPICIFGHSKATF

SEQ ID NO: 49934 - protein, 409 aa, Homo sapiens
MNIDIASIDMVSEVNMDYTLTMYFQQYWRDKRLAYSGIPLNLTLDNRVADQLWVPDTYFLNDKKSFVHGVTVKNRMIRLHPDGTVLYGLRITTTAACMMDLRRYPLDEQNCTLEIESYGYTTDDIEFYWRGGDKAVTGVERIELPQFSIVEHRLVSRNVVFATGAYPRLSLSFRLKRNIGYFILQTYMPSILITILSWVSFWINYDASAARVALGITTVLTMTTINTHLRETLPKIPYVKAIDMYLMGCFVFVFLALLEYAFVNYIFFGRGPQRQKKLAEKTAKAKNDRSKSESNRVDAHGNILLTSLEVHNEMNEVSGGIGDTRNSAISFDNSGIQYRKQSMPREGHGRFLGDRSLPHKKTHLRRRSSQLKIKIPDLTDVNAIDRWSRIVFPFTFSLFNLVYWLYYVN

SEQ ID NO: 49935 - protein, 166 aa, Homo sapiens
MDGIPDVFRNACQAFPLDLCTDSFFTSRRPALEARLQLIHDAPEESLRAWVAATWHEQEGRVASLVSWDRFTSLQQAQDLVSCLGGPVLSGVCRHLAADFRHCRGGLPDLVVWNSQSRHFKLVEVKGPNDRLSHKQMIWLAELQKLGAEVEVCHVVAVGAKSQSLS

SEQ ID NO: 49936 - protein, 268 aa, Homo sapiens
MKEVKKSPKQLAAYINRTVGQTVKSPDKLRKVIYRRKKVHHPFPNPCYRKKQSPGSGGCDMANKENELACAGHLPEKLHHDSRTYLVNSSDSGSSQTESPSSKYSGFFSEVSQDHETMAQVLFSRNMRLNVALTFWRKRSISELVAYLLRIEDLGVVVDCLPVLTNCLQEEKQYISLGCCVDLLPLVKSLLKSKFEEYVIVGLNWLQAVIKRWWSELSSKTEIINDGNIQILKQQLSGLWEQENHLTLVPGYTGNIAKDVDAYLLQLH

SEQ ID NO: 49937 - protein, 63 aa, Homo sapiens
MYMAGNTISIFPTMMVCMMAWRPIQALMAISAKNGVQWWRTAFVNMRKQRLVPMYLGLIYILL

SEQ ID NO: 49938 - protein, 97 aa, Homo sapiens
MYMAGNTISIFPTMMVCMMAWRPIQALMAISATFKMLESSSQKFLQGLVYLIGNLMGLALAVYKCQSMGLLPTHASDWLAFIEPPERMEFSGGGLLL

SEQ ID NO: 49939 - protein, 785 aa, Homo sapiens
MQNNSRITVFDENADEASTAELSKPTVQPWIAPPMPRAKENELQAGPWNTGRSLEHRPRGNTASLIAVPAVLPSFTPYVEETARQPVMTPCKIEPSINHILSTRKPGKEEGDPLQRVQSHQQASEEKKEKMMYCKEKIYAGVGEFSFEEIRAEVFRKKLKEQREAELLTSAEKRAEMQKQIEEMEKKLKEIQTTQQERTGDQQEETMPTKETTKLQIASESQKIPGMTLSSSVCQVNCCARETSLAENIWQEQPHSKGPSVPFSIFDEFLLSEKKNKSPPADPPRVLAQRRPLAVLKTSESITSNEDVSPDVCDEFTGIEPLSEDAIITGFRNVTICPNPEDTCDFARAARFVSTPFHEIMSLKDLPSDPERLLPEEDLDVKTSEDQQTACGTIYSQTLSIKKLSPIIEDSREATHSSGFSGSSASVASTSSIKCLQIPEKLELTNETSENPTQSPWCSQYRRQLLKSLPELSASAELCIEDRPMPKLEIEKEIELGNEDYCIKREYLICEDYKLFWVAPRNSAELTVIKVSSQPVPWDFYINLKLKERLNEDFDHFCSCYQYQDGCIVWHQYINCFTLQDLLQHSEYITHEITVLIIYNLLTIVEMLHKAEIVHGDLSPRCLILRNRIHDPYDCNKNNQALKIVDFSYSVDLRVQLDVFTLSGFRTVQILEGQKILANCSSPYQVDLFGIADLAHLLLFKEHLQVFWDGSFWKLSQNISELKDGELWNKFFVRILNANDEATVSVLGELAAEMNGVFDTTFQSHLNKALWKVGKLTSPGALLFQ

SEQ ID NO: 49940 - protein, 767 aa, Homo sapiens [sequence omitted]

SEQ ID NO: 49941 - protein, 769 aa, Homo sapiens [sequence omitted]

SEQ ID NO: 49942 - protein, 450 aa, Homo sapiens
MAETVSTQVGTEGGLRASHQQNGDAGGDAKVELSPGPPKPAGREVEPAPVGGEHPSAAAPGPGKHKKRRGATRERVVPPPKKRRTGVSFGDEHFAETSYYFEGGLRKDNDFLRNTVHRHEPPVTAEPIRLLAENEDVVVVDKPSSIPVHPCGRFRHNTVIFILGKEHQLKELHPLHRLDRLTSGVLMFAKTAAVSERIHEQVRDRQLEKEYVCRVEGEFPTEEVTCKEPILVVSYKVGVCRVDPRGKPCETVFQRLSYNGQSSVVRCRPLTGRTHQIRVHLQFLGHPILNDPIYNSVAWGPSRGRGGYIPKTNEELLRDLVAEHQAKQSLDVLDLCEGDLSPGLTDSTAPSSELGKDDLEELAAAAQKMEEVAEAAPQELDTIALASEKAVETDVMNQETDPLCAECRLVRQDPLPQDLVMFLHALRYKGPGFEYFSPMPAWAQDDWQKD

SEQ ID NO: 49943 - protein, 396 aa, Homo sapiens [sequence omitted]

SEQ ID NO: 49944 - protein, 414 aa, Homo sapiens
MHRLPLLGEKQEAKENGTNLTFIGDKTAMHEPLQTWQDAPYIFIVHIGISSSKESSKENSLSNLFTMTVEVKGPYEYLTLEDYPLMIFFMVMCIVYVLFGVLWLAWSACYWRDLLRIQFWIGAVIFLGMLEKAVFYAEFQNIRYKGESVQGALILAELLSAVKRSLARTLVIIVSLGYGIVKPRLGVTLHKVVVAGALYLLFSGMEGVLRVTGAQTDLASLAFIPLAFLDTALCWWIFISLTQTMKLLKLRRNIVKLSLYRHFTNTLILAVAASIVFIIWTTMKFRIVTCQSDWRELWVDDAIWRLLFSMILFVIMVLWRPSANNQRFAFSPLSEEEEEDEQKEPMLKESFEGMKMRSTKQEPNGNSKVNKAQEDDLKWVEENVPSSVTDVALPALLDSDEERMITHFERSKME

SEQ ID NO: 49945 - protein, 52 aa, Homo sapiens
MEENLTQVGSILGNLKDMALNIGNEIDAQNPQIKRITDKAKNFKAWTARYLH

SEQ ID NO: 49946 - protein, 531 aa, Homo sapiens
MVVVEQIKSQKIHGCQILETVYKHSCGGLPPVRSALEKILAVCHGVMYKQLSAWMLHGLLLDQHEEFFIKQGPSSGNVSAQPEEDEEDLGIGGLTGKQLRELQDLRLIEEENMLAPSLKQFSLRVEILPSYIPVRVAEKILFVGESVQMFENQNVNLTRKGSILKNQEDTFAAELHRLKQQPLFSLVDFEQVVDRIRSTVAEHLWKLMVEESDLLGQLKIIKDFYLLGRGELFQAFIDTAQHMLKTPPTAVTEHDVNVAFQQSAHKVLLDDDNLLPLLHLTIEYHGKEHKADATQAREGPSRETSPREAPASGWAALGLSYKVQWPLHILFTPAVLEKYNVVFKYLLSVRRVQAELQHCWALQMQRKHLKSNQTDAIKWRLRNHMAFLVDNLQYYLQVDVLESQFSQLLHQINSTRDFESIRLAHDHFLSNLLAQSFILLKPVFHCLNEILDLCHSFCSLVSQNLGPLDERGAAQLSILVKGFSRQSSLLFKILSSVRNHQINSDLAQLLLRLDYNKYYTQAGGTLGSFGM

SEQ ID NO: 49947 - protein, 1110 aa, Homo sapiens
MEKLVARKVCVAFKQTVCGFDLLRANGHSFVCDVNGFSFVKNSMKYYDDCAKILGNTIMRELAPQFQIPWSIPTEAEDIPIVPTTSGTMMELRCVIAIIRHGDRTPKQKMKMEVKHPRFFALFEKHGGYKTGKLKLKRPEQLQEVLDITRLLLAELEKEPGGEIEEKTGKLEQLKSVLEMYGHFSGINRKVQLTYYPHGVKASNEGQDPQRETLAPSLLLVLKWGGELTPAGRVQAEELGRAFRCMYPGGQGDYAGFPGCGLLRLHSTFRHDLKIYASDEGRVQMTAAAFAKGLLALEGELTPILVQMVKSANMNGLLDSDGDSLSSCQHRVKARLHHILQQDAPFGPEDYDQLAPTRSTSLLNSMTIIQNPVKVCDQVFALIENLTHQIRERMQDPRSVDLQLYHSETLELMLQRWSKLERDFRQKSGRYDISKIPDIYDCVKYDVQHNGSLGLQGTAELLRLSKALADVVIPQEYGISREEKLEIAVGFCLPLLRKILLDLQRTHEDESVNKLHPLESHVHSLLSVFRYGGLLDETQDAQWQRALDYLSAISELNYMTQIVIMLYEDNTQDPLSEERFHVELHFSPGVKGVEEEGSAPAGCGFRPASSENEEMKTNQGSMENLCPGKASDEPDRALQTSPQPPEGPGLPRRSPLIRNRKAGSMEVLSETSSSRPGGYRLFSSSRPPTEMKQSGLGSQCTGLFSTTVLGGSSSAPNLQDYARSHGKKLPPASLKHRDELLFVPAVKRFSVSFAKHPTNGFEGCSMVPTIYPLETLHNALSLRQVSEFLSRVCQRHTDAQAQASAALFDSMHSSQASDNPFSPPRTLHSPPLQLQQRSEKPPWYSSGPSSTVSSAGPSSPTTVDGNSQFGFSDQPSLNSHVAEEHQGLGLLQETPGSGAQELSIEGEQELFEPNQSPQVPPMETSQPYEEVSQPCQEVPDISQPCQDISEALSQPCQKVPDISQQCQENHDNGNHTCQEVPHISQPCQKSSQLCQKVSEEVCQLCLENSEEVSQPCQGVSVEVGKLVHKFHVGVGSLVQETLVEVGSPAEEIPEEVIQPYQEFSVEVGRLAQETSAINLLSQGIPEIDKPSQEFPEEIDLQAQEVPEEIN

SEQ ID NO: 49948 - protein, 286 aa, Homo sapiens
MEQVDEITTSTTTSTNGAAYSNQAVQVRPSLNNGLEEAEETVNRDIPPLTAPVTPDSGYSSAHAEATYEEDWEVFDPYYFIKHVPPLTEEQLNRKPALPLKTRSTPEFSLVLDLDETLVHCSLNELEDAALTFPVLFQDVIYQVYVRLRPFFREFLERMSQMYEIILFTASKKVYADKLLNILDPKKQLVRHRLFREHCVCVQGNYIKDLNILGRDLSKTIIIDNSPQAFAYQLSNGIPIESWFMDKNDNELLKLIPFLEKLVELNEDVRPHIRDRFRLHDLLPPD

SEQ ID NO: 49949 - protein, 45 aa, Homo sapiens [sequence omitted]

SEQ ID NO: 49950 - protein, 1027 aa, Homo sapiens
MIPMALPNDNGSVSGVEPTPIPSYLITCYPFVQENQSNRQFPLYNNDIRWQQPNPNPTGPYFAYPIISAQPPVSTEYTYYQLMPAPCAQVMGFYHPFPTPYSNTFQAANTVNAITTECTERPSQLGQVFPLSSHRSRNSNRGSVVPKQQLLQQHIKSKRPLVKNVATQKETNAAGPDSRSKIVLLVDASQQTDFPSDIANKSLSETTATMLWKSKGRRRRASHPTAESSSEQGASEADIDSDSGYCSPKHSNNQPAAGALRNPDSGTMNHVESSMCAGGVNWSNVTCQATQKKPWMEKNQTFSRGGRQTEQRNNSQDEDGFQELNENGNAKDENIQQKLSSKVLDDLPENSPINIVQTPIPITTSVPKRAKSQKKKALAAALATAQEYSEISMEQKKLQEALSKAAGKKNKTPVQLDLGDMLAALEKQQQAMKARQITNTRPLSYTVVTAASFHTKDSTNRKPLTKSQPCLTSFNSVDIASSKAKKGKEKEIAKLKRPTALKKVILKEREEKKGRLTVDHNLLGSEEPTEMHLDFIDDLPQEIVSQEDTGLSMPSDTSLSPASQNSPYCMTPVSQGSPASSGIGSPMASSTITKIHSKRFREYCNQVLCKEIDECVTLLLQELVSFQERIYQKDPVRAKARRRLVMGLREVTKHMKLNKIKCVIISPNCEKIQSKGGLDEALYNVIAMAREQEIPFVFALGRKALGRCVNKLVPVSVVGIFNYFGAESLFNKLVELTEEARKAYKDMVAAMEQEQAEEALKNVKKVPHHMGHSRNPSAASAISFCSVISEPISEVNEKEYETNWRNMVETSDGLEASENEKEVSCKHSTSEKPSKLPFDTPPIGKQPSLVATGSTTSATSAGKSTASDKEEVKPDDLEWASQQSTETGSLDGSCRDLLNSSITSTTSTLVPGMLEEEEDEDEEEEEDYTHEPISVEVQLNSRIESWVSETQRTMETLQLGKTLNGSEEDNVEQSGEEEAEAPEVLEPGMDSEAWTADQQASPGQQKSSNCSSLNKEHSDSNYTTQTT

SEQ ID NO: 49951 - protein, 1072 aa, Homo sapiens [sequence omitted]

SEQ ID NO: 49952 - protein, 105 aa, Homo sapiens
MNKAATSHFNIRVMECRLAAKLLAKYKSLQWDKVLRLEEVQAKLGISLEEMLLVTEDALHPEPYNPEEICRCLGISLEELRTQILSPNTQDDGVVLYRPGWSATA

SEQ ID NO: 49953 - protein, 286 aa, Homo sapiens
MQEPPKSIEEFLKFQNWDYWPREIHFRDDDKWSCTLKKIKEDSSFVSIYTHLWENVPRIFEALLIMESKLKEYSLILQNHTSEIFKWKSMISETSSYRKLERYGEFLKKYHKKKKIMLSDEMETEKNIEGCSFTGFKANELTQLPRHLDAEQIYLFILKAHNFDERVFKIWKTHFLSEASIALLHDSFWWWFLHKFRIYPDCLAQAIYATFHEAFPESSYLFNDEFKEDLGNNIFLWCSGLKPQKGFWIHWKLKELSTTTIHGSKKAPAKSVKERIADSQEHISTS

SEQ ID NO: 49954 - protein, 34 aa, Homo sapiens
MQEPPKSIEEFLKFQNWKYQFEQLSLQEKYLYKS

SEQ ID NO: 49955 - protein, 24 aa, Homo sapiens
MGPSSCRKTSSGILLILHYASIED

SEQ ID NO: 49956 - protein, 21 aa, Homo sapiens
MYQLIKNAKCSGDKETGKLTH

SEQ ID NO: 49957 - protein, 1055 aa, Homo sapiens
MKYVTVYNLIKKRPDFKQQQDYFHSILGPGNIKKAVEEAERLSESLKLRYEEAEVRKKLEEKDRQEEAQRLQQKRQETGREDGGTLAKGSLENVLDSKDKTQKSNGEKNEKCETKEKGAITAKELYTMMTDKNISLIIMDARRMQDYQDSCILHSLSVPEEAISPGVTASWIEAHLPDDSKDTWKKRGNVEYVVLLDWFSSAKDLQIGTTLRSLKDALFKWESKTVLRNEPLVLEGGYENWLLCYPQYTTNAKVTPPPRRQNEEVSISLDFTYPSLEESIPSKPAAQTPPASIEVDENIELISGQNERMGPLNISTPVEPVAASKSDVSPIIQPVPSIKNVPQIDRTKKPAVKLPEEHRIKSESTNHEQQSPQSGKVIPDRSTKPVVFSPTLMLTDEEKARIHAETALLMEKNKQEKELRERQQEEQKEKLRKEEQEQKAKKKQEAEENEITEKQQKAKEEMEKKESEQAKKEDKETSAKRGKEITGVKRQSKSEHETSDAKKSVEDRGKRCPTPEIQKKSTGDVPHTSVTGDSGSGKPFKIKGQPESGILRTGTFREDTDDTERNKAQREPLTRARSEEMGRIVPGLPSGWAKFLDPITGTFRYYHSPTNTVHMYPPEMAPSSAPPSTPPTHKAKPQIPAERDREPSKLKRSYSSPDITQAIQEEEKRKPTVTPTVNRENKPTCYPKAEISRLSASQIRNLNPVFGGSGPALTGLRNLGNTCYMNSILQCLCNAPHLADYFNRNCYQDDINRSNLLGHKGEVAEEFGIIMKALWTGQYRYISPKDFKITIGKINDQFAGYSQQDSQELLLFLMDGLHEDLNKADNRKRYKEENNDHLDDFKAAEHAWQKHKQLNESIIVALFQGQFKSTVQCLTCHKKSRTFEAFMYLSLPLASTSKCTLQDCLRLFSKEEKLTDNNRFYCSHCRARRDSLKKIEIWKLPPVLLVHLKRFSYDGRWKQKLQTSVDFPLENLDLSQYVIGPKNNLKKYNLFSVSNHYGGLDGGHYTAYCKNAARQRWFKFDDHEVSDISVSSVKSSAAYILFYTSLGPRVTDVAT

SEQ ID NO: 49958 - protein, 1496 aa, Homo sapiens
MECMKRKELITVFHIGSDEHQDIDVAILTALLKGTNASAFDQLILTLAWDRVDIAKNHVFVYGQQWLVGSLEQAMLDALVMDRVAFVKLLIENGVSMHKFLTIPRLEELYNTKQGPTNPMLFHLVRDVKQGNLPPGYKITLIDIGLVIEYLMGGTYRCTYTRKRFRLIYNSLGGNNRRSGRNTSSSTPQLRKSHESFGNRADKKEKMRHNHFIKTAQPYRPKIDTVMEEGKKKRTKDEIVDIDDPETKRFPYPLNELLIWACLMKRQVMARFLWQHGEESMAKALVACKIYRSMAYEAKQSDLVDDTSEELKQYSNDFGQLAVELLEQSFRQDETMAMKLLTYELKNWSNSTCLKLAVSSRLRPFVAHTCTQMLLSDMWMGRLNMRKNSWYKVILSILVPPAILLLEYKTKAEMSHIPQSQDAHQMTMDDSENNFQNITEEIPMEVFKEVRILDSNEGKNEMEIQMKSKKLPITRKFYAFYHAPIVKFWFNTLAYLGFLMLYTFVVLVQMEQLPSVQEWIVIAYIFTYAIEKVREIFMSEAGKVNQKIKVWFSDYFNISDTIAIISFFIGFGLRFGAKWNFANAYDNHVFVAGRLIYCLNIIFWYVRLLDFLAVNQQAGPYVMMIGKMVANMFYIVVIMALVLLSFGVPRKAILYPHEAPSWTLAKDIVFHPYWMIFGEVYAYEIDVCANDSVIPQICGPGTWLTPFLQAVYLFVQYIIMVNLLIAFFNNVYLQVKAISNIVWKYQRYHFIMAYHEKPVLPPPLIILSHIVSLFCCICKRRKKDKTSDGPKLFLTEEDQKKLHDFEEQCVEMYFNEKDDKFHSGSEERIRVTFERVEQMCIQIKEVGDRVNYIKRSLQSLDSQIGHLQDLSALTVDTLKTLTAQKASEASKVHNEITRELSISKHLAQNLIDDGPVRPSVWKKHGVVNTLSSSLPQGDLESNNPFHCNILMKDDKDPQCNIFGQDLPAVPQRKEFNFPEAGSSSGALFPSAVSPPELRQRLHGVELLKIFNKNQKLGSSSTSIPHLSSPPTKFFVSTPSQPSCKSHLETGTKDQETVCSKATEGDNTEFGAFVGHRDSMDLQRFKETSNKIKILSNNNTSENTLKRVSSLAGFTDCHRTSIPVHSKQEKISRRPSTEDTHEVDSKAALIPDWLQDRPSNREMPSEEGTLNGLTSPFKPAMDTNYYYSAVERNNLMRLSQSIPFTPVPPRGEPVTVYRLEESSPNILNNSMSSWSQLGLCAKIEFLSKEEMGGGLRRAVKVQCTWSEHDILKSGHLYIIKSFLPEVVNTWSSIYKEDTVLHLCLREIQQQRAAQKLTFAFNQMKPKSIPYSPRFLEVFLLYCHSAGQWFAVEECMTGEFRKYNNNNGDEIIPTNTLEEIMLAFSHWTYEYTRGELLVLDLQGVGENLTDPSVIKAEEKRSCDMVFGPANLGEDAIKNFRAKHHCNSCCRKLKLPDLKRNDYTPDKIIFPQDEPSDLNLQPGNSTKESESTNSVRLML

SEQ ID NO: 49959 - protein, 1497 aa, Homo sapiens
MECMKRKELITVFHIGSDEHQDIDVAILTALLKGTNASAFDQLILTLAWDRVDIAKNHVFVYGQQWLVGSLEQAMLDALVMDRVAFVKLLIENGVSMHKFLTIPRLEELYNTKQGPTNPMLFHLVRDVKQGNLPPGYKITLIDIGLVIEYLMGGTYRCTYTRKRFRLIYNSLGGNNRRSGRNTSSSTPQLRKSHESFGNRADKKEKMRHNHFIKTAQPYRPKIDTVMEEGKKKRTKDEIVDIDDPETKRFPYPLNELLIWACLMKRQVMARFLWQHGEESMAKALVACKIYRSMAYEAKQSDLVDDTSEELKQYSNDFGQLAVELLEQSFRQDETMAMKLLTYELKNWSNSTCLKLAVSSRLRPFVAHTCTQMLLSDMWMGRLNMRKNSWYKVILSILVPPAILLLEYKTKAEMSHIPQSQDAHQMTMDDSENNFQNITEEIPMEVFKEVRILDSNEGKNEMEIQMKSKKLPITRKFYAFYHAPIVKFWFNTLAYLGFLMLYTFVVLVQMEQLPSVQEWIVIAYIFTYAIEKVREIFMSEAGKVNQKIKVWFSDYFNISDTIAIISFFIGFGLRFGAKWNFANAYDNHVFVAGRLIYCLNIIFWYVRLLDFLAVNQQAGPYVMMIGKMVANMFYIVVIMALVLLSFGVPRKAILYPHEAPSWTLAKDIVFHPYWMIFGEVYAYEIDVCANDSVIPQICGPGTWLTPFLQAVYLFVQYIIMVNLLIAFFNNVYLQVKAISNIVWKYQRYHFIMAYHEKPVLPPPLIILSHIVSLFCCICKRRKKDKTSDGPKLFLTEEDQKKLHDFEEQCVEMYFNEKDDKFHSGSEERIRVTFERVEQMCIQIKEVGDRVNYIKRSLQSLDSQIGHLQDLSALTVDTLKTLTAQKASEASKVHNEITRELSISKHLAQNLIDDGPVRPSVWKKHGVVNTLSSSLPQGDLESNNPFHCNILMKDDKDPQCNIFGQDLPAVPQRKEFNFPEAGSSSGALFPSAVSPPELRQRLHGVELLKIFNKNQKLGSSSTSIPHLSSPPTKFFVSTPSQPSCKSHLETGTKDQETVCSKATEGDNTEFGAFVGHRDSMDLQRFKETSNKIKILSNNNTSENTLKRVSSLAGFTDCHRTSIPVHSKQAEKISRRPSTEDTHEVDSKAALIPDWLQDRPSNREMPSEEGTLNGLTSPFKPAMDTNYYYSAVERNNLMRLSQSIPFTPVPPRGEPVTVYRLEESSPNILNNSMSSWSQLGLCAKIEFLSKEEMGGGLRRAVKVQCTWSEHDILKSGHLYIIKSFLPEVVNTWSSIYKEDTVLHLCLREIQQQRAAQKLTFAFNQMKPKSIPYSPRFLEVFLLYCHSAGQWFAVEECMTGEFRKYNNNNGDEIIPTNTLEEIMLAFSHWTYEYTRGELLVLDLQGVGENLTDPSVIKAEEKRSCDMVFGPANLGEDAIKNFRAKHHCNSCCRKLKLPDLKRNDYTPDKIIFPQDEPSDLNLQPGNSTKESESTNSVRLML

SEQ ID NO: 49960 - protein, 1049 aa, Homo sapiens
MLGYDASFGYIHAIKLAQQGNLLEKRVGYLAVSLFLHESHELLLLLVNTVVKDLQSTNLVEVCMALTVVSQIFPCEMIPAVLPLIEDKLQHSKEIVRRKAVLALYKFHLIAPNQVQHIHIKFRKALCDRDVGVMAASLHIYLRMIKENSSGYKDLTGSFVTILKQVVGGKLPVEFNYHSVPAPWLQIQLLRILGLLGKDDQRTSELMYDVLDESLRRAELNHNVTYAILFECVHTVYSIYPKSELLEKAAKCIGKFVLSPKINLKYLGLKALTYVIQQDPTLALQHQMTIIECLDHPDPIIKRETLELLYRITNAQNITVIVQKMLEYLHQSKEEYVIVNLVGKIAELAEKYAPDNAWFIQTMNAVFSVGGDVMHPDIPNNFLRLLAEGFDDETEDQQLRLYAVQSYLTLLDMENVFYPQRFLQVMSWVLGEYSYLLDKETPEEVIAKLYKLLMNDSVSSETKAWLIAAVTKLTSQAHSSNTVERLIHEFTISLDTCMRQHAFELKHLHENVELMKSLLPVDRSCEDLVVDASLSFLDGFVAEGLSQGAAPYKPPHQRQEEKLSQEKVLNFEPYGLSFSSSGFTGRQSPAGISLGSDVSGNSAETGLKETNSLKLEGIKKLWGKEGYLPKKESKTGDESGALPVPQESIMENVDQAITKKDQSQVLTQSKEEKEKQLLASSLFVGLGSESTINLLGKADTVSHKFRRKSKVKEAKSGETTSTHNMTCSSFSSLSNVAYEDDYYSNTLHDTGDKELKKFSLTSELLDSESLTELPLVEKFSYCSLSTPSLFANNNMEIFHPPQSTAASVAKESSLASSFLEETTEYIHSNAMEVCNNETISVSSYKIWKDDCLLMVWSVTNKSGLELKSADLEIFPAENFKVTEQPGCCLPVMEAESTKSFQYSVQIEKPFTEGNLTGFISYHMMDTHSAQLEFSVNLSLLDFIRPLKISSDDFGKLWLSFANDVKQNVKMSESQAALPSALKTLQQKLRLHIIEIIGNEGLLACQLLPSIPCLLHCRVHADVLALWFRSSCSTLPDYLLYQCQKVMEGS

SEQ ID NO: 49961 - protein, 339 aa, Homo sapiens
MNSVKYSSLVALAFIIRPTAVILWTPLLFRHFCQEPRKLDLILHHFLPVGFVTLSLSLMIDRIFFGQWTLVQFNFLKFNVLQNWGTFYGSHPWHWYFSQGFPVILGTHLPFFIHGCYLAPKRYRILLVTVLWTLLVYSMLSHKEFRFIYPVLPFCMVFCGYSLTHLKTWKKPALSFLFLSNLFLALYTGLVHQRGTLDVMSHIQKVCYNNPNKSSASIFIMMPCHSTPYYSHVHCPLPMRFLQCPPDLTGKSHYLDEADVFYLNPLNWLHREFHDDASLPTHLITFSILEEEISAFLISSNYKRTAVFFHTHLPEGRIGSHIYVYERKLKGKFNMKMKF

SEQ ID NO: 49962 - protein, 579 aa, Homo sapiens
MGFGHFYGTIQIQKRQQLVRKIHEDELNDMKDYLSQCQQEQESFIDYKSLKENLARCWTLTEAEKMSFETQKTNLATENQYLRVSLEKEEKALSSLQEELNKLREQIRILEDKGTSTELVKENQKLKQHLEEEKQKKHSFLSQRETLLTEAKMLKRELERERLVTTALRGELQQLSGSQLHGKSDSPNVYTEKKEIAILRERLTELERKLTFEQQRSDLWERLYVEAKDQNGKQGTDGKKKGGRGSHRAKNKSKETFLGSVKETFDAMKNSTKEFVRHHKEKIKQAKEAVKENLKKFSDSVKSTFRHFKDTTKNIFDEKGNKRFGATKEAAEKPRTVFSDYLHPQYKAPTENHHNRGPTMQNDGRKEKPVHFKEFRKNTNSKKCSPGHDCRENSHSFRKACSGVFDCAQQESMSLFNTVVNPIRMDEFRQIIQRYMLKELDTFCHWNELDQFINKFFLNGVFIHDQKLFTDFVNDVKDYLRNMKEYEVDNDGVFEKLDEYIYRHFFGHTFSPPYGPSRPDKKQRMVNIENSRHRKQEQKHLQPQPYKREGKWHKYGRTNGRQMANLEIELGQLPFDPQY

SEQ ID NO: 49963 - protein, 529 aa, Homo sapiens
MGFGHFYGTIQIQKRQQLVRKIHEDELNDMKDYLSQCQQEQESFIDYKSLKENLARCWTLTEAEKMSFETQKTNLATENQYLRVSLEKEEKALSSLQEELNKLREQIRILEDKGTSTELVKENQKLKQHLEEEKQKKHSFLSQRETLLTEAKMLKRELERERLVTTALRGELQQLSGSQLHGKSDSPNVYTEKKEIAILRERLTELERKLTFEQQRSDLWERLYVEAKDQNGKQGTDGKKKGGRGSHRAKNKSKETFLGSVKETFDAMKNSTKEFVRHHKEKIKQAKEAVKENLKKFSDSVKSTFRHFKDTTKNIFDEKGNKRFGATKEAAEKPRTVFSDYLHPQYKAPTENHHNRGPTMQNDGRKEKPVHFKEFRKNTNSKKCSPGHDCRENSHSFRKACSGVFDCAQQESMSLFNTVVNPIRMDEFRQIIQRYMLKELDTFCHWNELDQFINKFFLNGVFIHDQKLFTDFVNDVKDYLRNMKEYEVDNDGVFEKLDEYIYRHFFGHTFSPPYGPRSVYIKPCHYSSL

SEQ ID NO: 49964 - protein, 919 aa, Homo sapiens
MSEIKLNSDSEYIKLMHRTSACLPSSQNVDCQININGELERPHSQMNKNHGILRRSISLGGAYPNISCLSSLKHNCSKGGPSQLLIKFASGNEGKVDNLSRDSNRDCTNELSNSCKTRDDFLGQVDVPLYPLPTENPRLERPYTFKDFVLHPRSHKSRVKGYLRLKMTYLPKTSGSEDDNAEQAEELEPGWVVLDQPDAACHLQQQQEPSPLPPGWEERQDILGRTYYVNHESRRTQWKRPTPQDNLTDAENGNIQLQAQRAFTTRRQISEETESVDNRESSENWEIIREDEATMYSNQAFPSPPPSSNLDVPTHLAEELNARLTIFGNSAVSQPASSSNHSSRRGSLQAYTFEEQPTLPVLLPTSSGLPPGWEEKQDERGRSYYVDHNSRTTTWTKPTVQATVETSQLTSSQSSAGPQSQASTSDSGQQVTQPSEIEQGFLPKGWEVRHAPNGRPFFIDHNTKTTTWEDPRLKIPAHLRGKTSLDTSNDLGPLPPGWEERTHTDGRIFYINHNIKRTQWEDPRLENVAITGPAVPYSRDYKRKYEFFRRKLKKQNDIPNKFEMKLRRATVLEDSYRRIMGVKRADFLKARLWIEFDGEKGLDYGGVAREWFFLISKEMFNPYYGLFEYSATDNYTLQINPNSGLCNEDHLSYFKFIGRVAGMAVYHGKLLDGFFIRPFYKMMLHKPITLHDMESVDSEYYNSLRWILENDPTELDLRFIIDEELFGQTHQHELKNGGSEIVVTNKNKKEYIYLVIQWRFVNRIQKQMAAFKEGFFELIPQDLIKIFDENELELLMCGLGDVDVNDWREHTKYKNGYSANHQVIQWFWKAVLMMDSEKRIRLLQFVTGTSRVPMNGFAELYGSNGPQSFTVEQWGTPEKLPRAHTCFNRLDLPPYESFEELWDKLQMAIENTQGFDGVD

SEQ ID NO: 49965 - protein, 675 aa, Homo sapiens [sequence omitted]

SEQ ID NO: 49966 - protein, 539 aa, Homo sapiens
MKKENDEKSSSRSSGDKKNTSDRSSKTQASVKKEEKRSSEKSEKKESKDTKKIEGSKSPGHMVILDQTKGDHCRPSRRGRYEKIHGRSKEKERASLDKKRDKDYRRKEILPFEKMKEQRLREHLVRFERLRRAMELRRRREIAERERRERERIRIIREREERERLQRERERLEIERQKLERERMERERLERERIRIEQERRKEAERIAREREELRRQQQQLRYEQEKRNSLKRPRDVDHRRDDPYWSENKKLSLDTDARFGHGSDYSRQQNRFNDFDHRERGRFPESSAVQSSSFERRDRFVGQSEGKKARPTARREDPSFERYPKNFSDSRRNEPPPPRNELRESDRREVRGERDERRTVIIHDRPDITHPRHPREAGPNPSRPTSWKSEGSMSTDKRETRVERPERSGREVSGHSVRGAPPGNRSSASGYGSREGDRGVITDRGGGSQHYPEERHVVERHGRDTSGPRKEWHGPPSQGPSYHDTRRMGDGRAGAGMITQHSSNASPINRIVQISGNSMPRGSGSGFKPFKGGPPRRF

SEQ ID NO: 49967 - protein, 316 aa, Homo sapiens
MEKLAPKGPSPTPEDVSMKEENLCQAFSDALLCKIEDIDNEDWENPQLCSDYVKDIYQYLRQLEVLQSINPHFLDGRDINGRMRAILVDWLVQVHSKFRLLQETLYMCVGIMDRFLQVQPVSRKKLQLVGITALLLASKYEEMFSPNIEDFVYITDNAYTSSQIREMETLILKELKFELGRPLPLHFLRRASKAGEVDVEQHTLAKYLMELTLIDYDMVHYHPSKVAAAASCLSQKVLGQGKWNLKQQYYTGYTENEVLEVMQHMAKNVVKVNENLTKFIAIKNKYASSKLLKISMIPQLNSKAVKDLASPLIGRS

SEQ ID NO: 49968 - protein, 183 aa, Homo sapiens [sequence omitted]

SEQ ID NO: 49969 - protein, 1007 aa, Homo sapiens
MLQCPSVEVSFLPLIVNTVALPDELSYICTHGEDWDVAYIIHLYPSLTLRNLLPYSLRYLLEGTAETHELAEGSTADVLHSRISGEIMELVLVKYQGKNWNGHFRIRDTLPEFFPVCFSSDSTEVTTVDLSVHVRRIGSRMVLSVFSPYWLINKTTRVLQYRSEDIHVKHPADFRDIILFSFKKKNIFTKNKVQLKISTSAWSSSFSLDTVGSYGCVKCPANNMEYLVGVSIKMSSFNLSRIVTLTPFCTIANKSSLELEVGEIASDGSMPTNKWNYIASSECLPFWPESLSGKLCVRVVGCEGSSKPFFYNRQDNGTLLSLEDLNGGILVDVNTAEHSTVITFSDYHEGSAPALIMNHTPWDILTYKQSGSPEEMVLLPRQARLFAWADPTGTRKLTWTYAANVGEHDLLKDGCGQFPYDANIQIHWVSFLDGRQRVLLFTDDVALVSKALQAEEMEQADYEITLSLHSLGLSLVNNESKQEVSYIGITSSGVVWEVKPKQKWKPFSQKQIILLEQSYQKHQISRDHGWIKLDNNFEVNFDKDPMEMRLPIRSPIKRDFLSGIQIEFKQSSHQRSLRARLYWLQVDNQLPGAMFPVVFHPVAPPKSIALDSEPKPFIDVSVITRFNEYSKVLQFKYFMVLIQEMALKIDQGFLGAIIALFTPTTDPEAERRRTKLIQQDIDALNAELMETSMTDMSILSFFEHFHISPVKLHLSLSLGSGGEESDKEKQEMFAVHSVNLLLKSIGATLTDVDDLIFKLAYYEIRYQFYKRDQLIWSVVRHYSEQFLKQMYVLVLGLDVLGNPFGLIRGLSEGVEALFYEPFQGAVQGPEEFAEGLVIGVRSLFGHTVGGAAGVVSRITGSVGKGLAAITMDKEYQQKRREELSRQPRDFGDSLARGGKGFLRGVVGGVTGIITKPVEGAKKEGAAGFFKGIGKGLVGAVARPTGGIVDMASSTFQGIQRAAESTEEVSSLRPPRLIHEDGIIRPYDRQESEGSDLLEVNFVLHGHE

SEQ ID NO: 49970 - protein, 215 aa, Homo sapiens [sequence omitted]

SEQ ID NO: 49971 - protein, 59 aa, Homo sapiens
MPSPSPKGLPVKQYAVQSQLPVYEWPDVGSGEYDVGVVASFGRLLNEALILKFPYSFQF

SEQ ID NO: 49972 - protein, 632 aa, Homo sapiens
MDPKLCPADPDWIAFIHSNDIWISNIVTREERRLTYVHNELANMEEDARSAGVATFVLQEEFDRYSGYWWCPKAETTPSGGKILRILYEENDESEVEIIHVTSPMLETRRADSFRYPKTGTANPKVTFKMSEIMIDAEGRIIDVIDKELIQPFEILFEGVEYIARAGWTPEGKYAWSILLDRSQTRLQIVLISPELFIPVEDDVMERQRLIESVPDSVTPLIIYEETTDIWINIHDIFHVFPQSHEEEIEFIFASECKTGFRHLYKITSILKESKYKRSSGGLPAPSDFKCPIKEEIAITSGEWEVLGRHGSNIQVDEVRRLVYFEGTKDSPLEHHLYVVSYVNPGEVTRLTDRGYSHSCCISQHCDFFISKYSNQKNPHCVSLYKLSSPEDDPTCKTKEFWATILDSAGPLPDYTPPEIFSFESTTGFTLYGMLYKPHDLQPGKKYPTVLFIYGGPQVQLVNNRFKGVKYFRLNTLASLGYVVVVIDNRGSCHRGLKFEGAFKYKMVAIAGAPVTLWIFYDTGYTERYMGHPDQNEQGYYLGSVAMQAEKFPSEPNRLLLLHGFLDENVHFAHTSILLSFLVRAGKPYDLQIYPQERHSIRVPESGEHYELHLLHYLQENLGSRIAALKVI

SEQ ID NO: 49973 - protein, 683 aa, Homo sapiens
MDPKLCPADPDWIAFIHSNDIWISNIVTREERRLTYVHNELANMEEDARSAGVATFVLQEEFDRYSGYWWCPKAETTPSGGKILRILYEENDESEVEIIHVTSPMLETRRADSFRYPKTGTANPKVTFKMSEIMIDAEGRIIDVIDKELIQPFEILFEGVEYIARAGWTPEGKYAWSILLDRSQTRLQIVLISPELFIPVEDDVMERQRLIESVPDSVTPLIIYEETTDIWINIHDIFHVFPQSHEEEIEFIFASECKTGFRHLYKITSILKESKYKRSSGGLPAPSDFKCPIKEEIAITSGEWEVLGRHGSNIQVDEVRRLVYFEGTKDSPLEHHLYVVSYVNPGEVTRLTDRGYSHSCCISQHCDFFISKYSNQKNPHCVSLYKLSSPEDDPTCKTKEFWATILDSAGPLPDYTPPEIFSFESTTGFTLYGMLYKPHDLQPGKKYPTVLFIYGGPQVQLVNNRFKGVKYFRLNTLASLGYVVVVIDNRGSCHRGLKFEGAFKYKMGQIEIDDQVEGLQYLASRYDFIDLDRVGIHGWSYGGYLSLMALMQRSDIFRVAIAGAPVTLWIFYDTGYTERYMGHPDQNEQGYYLGSVAMQAEKFPSEPNRLLLLHGFLDENVHFAHTSILLSFLVRAGKPYDLQIYPQERHSIRVPESGEHYELHLLHYLQENLGSRIAALKVI

SEQ ID NO: 49974 - protein, 583 aa, Homo sapiens
MDPKLCPADPDWIAFIHSNDIWISNIVTREERRLTYVHNELANMEEDARSAGVATFVLQEEFDRYSGYWWCPKAETTPSGGKILRILYEENDESEVEIIHVTSPMLETRRADSFRYPKTGTANPKVTFKMSEIMIDAEGRIIDVIDKELIQPFEILFEGVEYIARAGWTPEGKYAWSILLDRSQTRLQIVLISPELFIPVEDDVMERQRLIESVPDSVTPLIIYEETTDIWINIHDIFHVFPQSHEEEIEFIFASECKTGFRHLYKITSILKESKYKRSSGGLPAPSDFKCPIKEEIAITSGEWEVLGRHGSNIQVDEVRRLVYFEGTKDSPLEHHLYVVSYVNPGEVTRLTDRGYSHSCCISQHCDFFISKYSNQKNPHCVSLYKLSSPEDDPTCKTKEFWATILDSAGPLPDYTPPEIFSFESTTGFTLYGMLYKPHDLQPGKKYPTVLFIYGGPQVAIAGAPVTLWIFYDTGYTERYMGHPDQNEQGYYLGSVAMQAEKFPSEPNRLLLLHGFLDENVHFAHTSILLSFLVRAGKPYDLQIYPQERHSIRVPESGEHYELHLLHYLQENLGSRIAALKVI

SEQ ID NO: 49975 - protein, 1713 aa, Homo sapiens
MTQNTLAVTDICIIIPSKGESPPHTFCKVDKNLNNSMWGSAVYLCYKKSVAKTNTVSYKAGLICRYPQEDYESFSLPESVPLFCLPMGATIECWPSNSKYPLPVFSTFVLTGASAEKVYGAAIQFYEPYSEENLTEKQRLLLGLTSADGKSDSSKTIHTNKCICLLSHWPFFDAFRKFLTFLYRYSISGPHVLPIEKHISHFMHKVPFPSPQRPRILVQLSPHDNLILSQPVSSPLPLSGGKFSTLLQNLGPENAVTLLVFAVTEHKILIHSLRPSVLTSVTEALVSMIFPFHWPCPYVPLCPLALADVLSAPCPFIVGIDSRYFDLYDPPPDVSCVDVDTNTISQIGDKKNVAWKILPKKPCKNLMNTLNNLHQQLAKLQQRPRDDGLMDLAINDYDFNSGKRLHMIDLEIQEAFLFFMASILKGYRSYLRPITQAPSETATDAASLFALQAFLRSRDRSHQKFYNMMTKTQMFIRFIEECSFVSDKDASLAFFDDCVDKVDMDKSGEVRLIELDESFKSEHTVFVTPPEIPHLPNGEEPPLQYSYNGFPVLRNNLFERPEGFLQAKKNKLPSKSSSPNSPLPMFRRTKQEIKSAHKIAKRYSSIPQMWSRCLLRHCYGLWFICLPAYVKVCHSKVRALKTAYDVLKKMQSKKMDPPDEVCYRILMQLCGQYDQPVLAVRVLFEMQKAGIDPNAITYGYYNKAVLESTWPSRSRSGYFLWTKVRNVVLGVTQFKRALKKHAHLSQTTLSGGQSDLGYNSLSKDEVRRGDTSTEDIQEEKDKKGSDCSSLSESESTKGSADCLPKLSYQNSSSIVRLTGTSNNSAGKISGESMESTPELLLISSLEDTNETRNIQSRCFRKRHKSDNETNLQQQVVWGNRNRNLSGGVLMGFMLNRINQEATPGDIVEKLGADAKILSNVISKSTRPNTLDIGKPPLRSKRDSLEKESSDDDTPFDGSNYLADKVDSPVIFDLEDLDSETDVSKAGCVATQNPKRIQRMNSSFSVKPFEKTDVATGFDPLSLLVAETEQQQKEEEEEDEDDSKSISTPSARRDLAEEIVMYMNNMSSPLTSRTPSIDLQRACDDKLNKKSPPLVKACRRSSLPPNSPKPVRLTKSKSYTKSEEKPRDRLWSSPAFSPTCPFREESQDTLTHSSPSFNLDTLLVPKLDVLRNSMFTAGKGVAEKASKWYSRFTMYTTSSKDQSSDRTSLSSVGAQDSESTSLTDEDVCHELEGPISSQETSATSGTKRIDLSRISLESSASLEGSLSKFALPGKSEVTSSFNASNTNIFQNYAMEVLISSCSRCRTCDCLVHDEEIMAGWTADDSNLNTTCPFCGNIFLPFLNIEIRDLRRPGRYFLKSSPSTENMHFPSSISSQTRQSCISTSASGLDTSALSVQGNFDLNSKSKLQENFCTRSIQIPANRSKTAMSKCPIFPMARSISTSGPLDKEDTGRQKLISTGSLPATLQGATDSLGLEWHLPSPDPVTVPYLSPLVVWKELESLLENEGDHAITVADFVDHHPIVFWNLVWYFRRLDLPSNLPGLILSSEHCNKYSKIPRHCMSEDSKYVLIQMLWDNMKLHQDPGQPLYILWNAHTQKYPMVHLLQKSDNSFNQELLKSMVKSIKMNDVYGPMSQILETLNKCPHFKRQRSLYREILFLSLVALGRENIDIDAFDKEYKMAYDRLTPSQVKSTHNCDRPPSTGVMECRKTFGEPYL

SEQ ID NO: 49976 - protein, 1766 aa, Homo sapiens
MTQNTLAVTDICIIIPSKGESPPHTFCKVDKNLNNSMWGSAVYLCYKKSVAKTNTVSYKAGLICRYPQEDYESFSLPESVPLFCLPMGATIECWPSNSKYPLPVFSTFVLTGASAEKVYGAAIQFYEPYSEENLTEKQRLLLGLTSADGKSDSSKTIHTNKCICLLSHWPFFDAFRKFLTFLYRYSISGPHVLPIEKHISHFMHKVPFPSPQRPRILVQLSPHDNLILSQPVSSPLPLSGGKFSTLLQNLGPENAVTLLVFAVTEHKILIHSLRPSVLTSVTEALVSMIFPFHWPCPYVPLCPLALADVLSAPCPFIVGIDSRYFDLYDPPPDVSCVDVDTNTISQIGDKKNVAWKILPKKPCKNLMNTLNNLHQQLAKLQQRPRDDGLMDLAINDYDFNSGKRLHMIDLEIQEAFLFFMASILKGYRSYLRPITQAPSETATDAASLFALQAFLRSRDRSHQKFYNMMTKTQMFIRFIEECSFVSDKDASLAFFDDCVDKVDMDKSGEVRLIELDESFKSEHTVFVTPPEIPHLPNGEEPPLQYSYNGFPVLRNNLFERPEGFLQAKKNKLPSKSSSPNSPLPMFRRTKQEIKSAHKIAKRYSSIPQMWSRCLLRHCYGLWFICLPAYVKVCHSKVRALKTAYDVLKKMQSKKMDPPDEVCYRILMQLCGQYDQPVLAVRVLFEMQKAGIDPNAITYGYYNKAVLESTWPSRSRSGYFLWTKVRNVVLGVTQFKRALKKHAHLSQTTLSADGSDLDAVSHGSMDSGHGTHTVEQAPFNTGLIKVYATDDRSSTGGQSDLGYNSLSKDEVRRGDTSTEDIQEEKDKKGSDCSSLSESESTKGSADCLPKLSYQNSSSIVRLTGTSNNSAGKISGESMESTPELLLISSLEDTNETRNIQSRCFRKRHKSDNETNLQQQVVWGNRNRNLSGGVLMGFMLNRINQEATPGDIVEKLGADAKILSNVISKSTRPNTLDIGKPPLRSKRDSLEKESSDDDTPFDGSNYLADKVDSPVIFDLEDLDSETDVSKAGCVATQNPKRIQRMNSSFSVKPFEKTDVATGFDPLSLLVAETEQQQKEEEEEDEDDSKSISTPSARRDLAEEIVMYMNNMSSPLTSRTPSIDLQRACDDKLNKKSPPLVKACRRSSLPPNSPKPVRLTKSKSYTKSEEKPRDRLWSSPAFSPTCPFREESQDTLTHSSPSFNLDTLLVPKLDVLRNSMFTAGKGVAEKASKWYSRFTMYTTSSKDQSSDRTSLSSVGAQDSESTSLTDEDVCHELEGPISSQETSATSGTKRIDLSRISLESSASLEGSLSKFALPGKSEVTSSFNASNTNIFQNYAMEVLISSCSRCRTCDCLVHDEEIMAGWTADDSNLNTTCPFCGNIFLPFLNIEIRDLRRPGRYFLKSSPSTENMHFPSSISSQTRQSCISTSASGLDTSALSVQGNFDLNSKSKLQENFCTRSIQIPANRSKTAMSKCPIFPMARSISTSGPLDKEDTGRQKLISTGSLPATLQGATDSLGLEWHLPSPDPVTVPYLSPLVVWKELESLLENEGDHAITVADFVDHHPIVFWNLVWYFRRLDLPSNLPGLILSSEHCNKYSKIPRHCMSEDSKYVLIQMLWDNMKLHQDPGQPLYILWNAHSQSRTLLFETQKYPMVHLLQKSDNSFNQELLKSMVKSIKMNDVYGPMSQILETLNKCPHFKRQRSLYREILFLSLVALGRENIDIDAFDKEYKMAYDRLTPSQVKSTHNCDRPPSTGVMECRKTFGEPYL

SEQ ID NO: 49977 - protein, 28 aa, Homo sapiens
MSPSNNVVPIHVPPTTENKPKVQCCQNI

SEQ ID NO: 49978 - protein, 327 aa, Homo sapiens [sequence omitted]

SEQ ID NO: 49979 - protein, 371 aa, Homo sapiens
MKAMLSYYYSTVMEQQVNGQLIEPLQIFPRACKPPGERNIHGLKVNTRAGPSQHSSPAVSDSLPSNSLKKSSAELKKILANGQMNEQDIRYRDTLGHGNGGTVYKAYHVPSGKILAVKVILLDITLELQKQIMSELEILYKCDSSYIIGFYGAFFVENRISICTEFMDGGSLDVYRKMPEHVLGRIAVAVVKGLTYLWSLKILHRDVKPSNMLVNTRGQVKLCDFGVSTQLVNSIAKTYVGTNAYMAPERISGEQYGIHSDVWSLGISFMELALGRFPYPQIQKNQGSLMPLQLLQCIVDEDSPVLPVGEFSEPFVHFITQCMRKQPKERPAPEELMGHPFIVQFNDGNAAVVSMWVCRALEERRSQQGPP

SEQ ID NO: 49980 - protein, 412 aa, Homo sapiens
MERYFDGNLEKLFAECHVINPSKKSRTRQMNTRSSAQDMPCQICYLNYPNSYFTGLECGHKFCMQCWSEYLTTKIMEEGMGQTISCPAHGCDILVDDNTVMRLITDSKVKLKYQHLITNSFVECNRLLKWCPAPDCHHVVKVQYPDAKPVRCKCGRQFCFNCGENWHDPVKCKWLKKWIKKCDDDSETSNWIAANTKECPKCHVTIEKDGGCNHMVCRNQNCKAEFCWVCLGPWEPHGSAWYNCNRYNEDDAKAARDAQERSRAALQRYLFYCNRYMNHMQSLRFEHKLYAQVKQKMEEMQQHNMSWIEVQFLKKAVDVLCQCRATLMYTYVFAFYLKKNNQSIIFENNQADLENATEVLSGYLERDISQDSLQDIKQKVQDKYRYCESRRRVLLQHVHEGYEKDLWEYIED

SEQ ID NO: 49981 - protein, 116 aa, Homo sapiens
MERKFHVLVGVTGSVAALKLPLLVSKLLDIPGTCVMRAWDRSKPLLFCPAMNTAMWEHPITAQQVDQLKAFGYVEIPCVAKKLVCGDEGLGAMAEVGTIVDKVKEVLFQHSGFQQS

SEQ ID NO: 49982 - protein, 175 aa, Homo sapiens
MERKFHVLVGVTGSVAALKLPLLVSKLLDIPGLEVAVVTTERAKHFYSPQDIPVTLYSDADEWEIWKSRSDPVLHIDLRRWADLLLVAPLDANTLGKVASGICDNLLVSDVLVPSSVPGPHTQFAELQTSLYKETCCCGAPVCPGRSCSAIPHIAPSALTFSVAHGHSPGPDGSV

SEQ ID NO: 49983 - protein, 476 aa, Homo sapiens
MGRTGPRAPLLPKTRIWSLTFSRKTSPVGARPGAAPRCGGGKVRASAVAKCPLPLKAHLRLRFRTARGQRQVAKQGGRRTLPPSLRMPEGPELHLASQFVNEACRALVFGGCVEKSSVSRNPEVPFESSAYRISASARGKELRLILSPLPGAQPQQEPLALVFRFGMSGSFQLVPREELPRHAHLRFYTAPPGPRLALCFVDIRRFGRWDLGGKWQPGRGPCVLQEYQQFRENVLRNLADKAFDRPICEALLDQRFFNGIGNYLRAEILYRLKIPPFEKARSVLEALQQHRPSPELTLSQKIRTKLQNPDLLELCHSVPKEVVQLGGKGYGSESGEEDFAAFRAWLRCYGMPGMSSLQDRHGRTIWFQGDPGPLAPKGRKSRKKKSKATQLSPEDRVEDALPPSKAPSRTRRAKRDLPKRTATQRPEGTSLQQDPEAPTVPKKGRRKGRQAASGHCRPRKVKADIPSLEPEGTSAS

SEQ ID NO: 49984 - protein, 299 aa, Homo sapiens [sequence omitted]

SEQ ID NO: 49985 - protein, 37 aa, Homo sapiens
MNRLLSAGPGFGEAAPISGLCSHLPSVPPPTEGRPCR

SEQ ID NO: 49986 - protein, 602 aa, Homo sapiens
MRGTGNKSTDGAYKPSFLTEQELKHLILEAADGFLFVVAAETGRVIYVSDSVTPVLNQPQSEWFGSTLYEQVHPDDVEKLREQLCTSENSMTGRILDLKTGTVKKEGQQSSMRMCMGSRRSFICRMRCGNAPLDHLPLNRITTMRKRFRNGLGPVKEGEAQYAVVHCTGYIKAWPPAGMTIPEEDADVGQGSKYCLVAIGRLQVTSSPVCMDMNGMSVPTEFLSRHNSDGIITFVDPRCISVIGYQPQDLLGKDILEFCHPEDQSHLRESFQQVVKLKGQVLSVMYRFRTKNREWMLIRTSSFTFQNPYSDEIEYIICTNTNVKQLQQQQAELEVHQRDGLSSYDLSQVPVPNLPAGVHEAGKSVEKADAIFSQERDPRFAEMFAGISASEKKMMSSASAAGTQQIYSQGSPFPSGHSGKAFSSSVVHVPGVNDIQSSSSTGQNMSQISRQLNQSQVAWTGSRPPFPGQQIPSQSSKTQSSPFGIGTSHTYPADPSSYSPLSSPATSSPSGNAYSSLANRTPGFAESGQSSGQFQGRPSEVWSQWQSQHHGQQSGEQHSHQQPGQTEVFQDMLPMPGDPTQGTGNYNIEDFADLGMFPPFSE

SEQ ID NO: 49987 - protein, 140 aa, Homo sapiens
MPKKAGATTKGKSQSKEPERPLPPLGPVAVDPKGCVTIAIHAKPGSKQNAVTDLTAEAVNVAIAAPPSEGEANAELCRYLSKVLELRKSDVVLDKTGSCYIAQAGLELLASSDLPASASQSAGITGVSHHTQPALLLISL

SEQ ID NO: 49988 - protein, 126 aa, Homo sapiens
MPKKAGATTKGKSQSKEPERPLPPLGPVAVDPKGCVTIAIHAKPGSKQNAVTDLTAEAVNVAIAAPPSEGEANAELCRYLSKVLELRKSDVVLDKGGKSREKVVKLLASTTPEEILEKLKKEAKKT

SEQ ID NO: 49989 - protein, 114 aa, Homo sapiens
MILEDDSWVQEAVLQEDGPESEPFPQSAGKGGPQEEVTRGPQGALGRLRELCRRWLRPEVHTKEQMLTMLPKEIQAWLQEHRPESSEEAAALVEDLTQTLQDSETASCVHGCPV

SEQ ID NO: 49990 - protein, 1235 aa, Homo sapiens
MLEAHHFPGPLLVELANEFISAVREGSLVNGKSLELLPIILTALATKKENLAYGKGVLSGEECKKQLINTLCSGRWDQQYVIQLTSMFKDVPLTAEEVEFVVEKALSMFSKMNLQEIPPLVYQLLVLSSKGSRKSVLEGIIAFFSALDKQHNEEQSGDELLDVVTVPSGELRHVEGTIILHIVFAIKLDYELGRELVKHLKVGQQGDSNNNLSPFSIALLLSVTRIQRFQDQVLDLLKTSVVKSFKDLQLLQGSKFLQNLVPHRSYVSTMILEVVKNSVHSWDHVTQGLVELGFILMDSYGPKKVLDGKTIETSPSLSRMPNQHACKLGANILLETFKIHEMIRQEILEQVLNRVVTRASSPISHFLDLLSNIVMYAPLVLQSCSSKVTEAFDYLSFLPLQTVQRLLKAVQPLLKVSMSMRDCLILVLRKAMFANQLDARKSAVAGFLLLLKNFKVLGSLSSSQCSQSLSVSQVHVDVHSHYNSVANETFCLEIMDSLRRCLSQQADVRLMLYEGFYDVLRRNSQLANSVMQTLLSQLKQFYEPKPDLLPPLKLEACILTQGDKISLQEPLDYLLCCIQHCLAWYKNTVIPLQQGEEEEEEEEAFYEDLDDILESITNRMIKSELEDFELDKSADFSQSTSIGIKNNICAFLVMGVCEVLIEYNFSISSFSKNRFEDILSLFMCYKKLSDILNEKAGKAKTKMANKTSDSLLSMKFVSSLLTALFRDSIQSHQESLSVLRSSNEFMRYAVNVALQKVQQLKETGHVSGPDGQNPEKIFQNLCDITRVLLWRYTSIPTSVEESGKKEKGKSISLLCLEGLQKIFSAVQQFYQPKIQQFLRALDVTDKEGEEREDADVSVTQRTAFQIRQFQRSLLNLLSSQEEDFNSKEALLLVTVLTSLSKLLEPSSPQFVQMLSWTSKICKENSREDALFCKSLMNLLFSLHVSYKSPVILLRDLSQDIHGHLGDIDQDVEVEKTNHFAIVNLRTAAPTVCLLVLSQAEKVLEEVDWLITKLKGQVSQETLSEEASSQATLPNQPVEKAIIMQLGTLLTFFHELVQTALPSGSCVDTLLKDLCKMYTTLTALVRYYLQVCQSSGGIPKNMEKLVKLSGSHLTPLCYSFISYVQNKSKSLNYTGEKKEKPAAVATAMARVLRETKPIPNLIFAIEQYEKFLIHLSKKSKVNLMQHMKLSTSRDFKIKGNILDMVLREDGEDENEEGTASEHGGQNKEPAKKKRKK

SEQ ID NO: 49991 - protein, 430 aa, Homo sapiens
MRSQRLLVTVIPHAVTGSDVVQWLAQKFCVSEEEALHLGAVLVQHGYIYPLRDPRSLMLRPDETPYRFQTPYFWTSTLRPAAELDYAIYLAKKNIRKRGTLVDYEKDCYDRLHKKINHAWDLVLMQAREQLRAAKQRSKGDRLVIACQEQTYWLVNRPPPGAPDVLEQGPGRGSCAASRVLMTKSADFHKREIEYFRKALGRTRVKSSVCLEAYLSFCGQRGPHDPLVSGCLPSNPWISDNDAYWVMNAPTVAAPTKLRVERWGFSFRELLEDPVGRAHFMDFLGKEFSGENLSFWEACEELRYGAQAQVPTLVDAVYEQFLAPGAAHWVNIDSRTMEQTLEGLRQPHRYVLDDAQLHIYMLMKKDSYPRFLKSDMYKALLAEAGIPLEMKRRVFPFTWRPRHSSPSPALLPTPVEPTAACGPGGGDGVA

SEQ ID NO: 49992 - protein, 117 aa, Homo sapiens [sequence omitted]

SEQ ID NO: 49993 - protein, 72 aa, Homo sapiens
MADMDELFSQVDEKRKKRDIPDYLCGKISFELMREPCITPSGITYDRKDIEEHLQVRPAAGGAGPVAWSWAP

SEQ ID NO: 49994 - protein, 120 aa, Homo sapiens
MNWECAIPGKKGTPWEGGLFKLRMLFKDDYPSSPPKCKFEPPLFHPNVYPSGTVCLSILEEDKDWRPAITIKQILLGIQELLNEPNIQDPAQAEAYTIYCQNRVEYEKRVRAQAKKFAPS

SEQ ID NO: 49995 - protein, 223 aa, Homo sapiens
MAASRPLSRFWEWGKNIVCVGRNYADHVREMRSAVLSEPVLFLKPSTAYAPEGSPILMPAYTRNLHHELELGVVMGKRCRAVPEAAAMDYVGGYALCLDMTARDVQDECKKKGLPWTLAKSFTASCPVSAFVPKEKIPDPHKLKLWLKVNGELRQEGETSSMIFSIPYIISYVSKIITLEEGDIILTGTPKGVGPVKENDEIEAGIHGLPKVSSATLPVRLQE

SEQ ID NO: 49996 - protein, 1600 aa, Homo sapiens
MRVRGFPSEKDFEDYIRYDNCSSSVLAAVVFEHPFNHSKEPLPLAVKYHLRFSYTRRNYMWTQTGSFFLKETEGWHTTSLFPLFPNPGPREPTSPDGGEPGYIREGFLAVQHAVDRAIMEYHADAATRQLFQRLTVTIKRFPYPPFIADPFLVAIQYQLPLLLLLSFTYTALTIARAVVQEKERRLKEYMRMMGLSSWLHWSAWFLLFFLFLLIAASFMTLLFCVKVKPNVAVLSRSDPSLVLAFLLCFAISTISFSFMVSTFFSKANMAAAFGGFLYFFTYIPYFFVAPRYNWMTLSQKLCSCLLSNVAMAMGAQLIGKFEAKGMGIQWRDLLSPVNVDDDFCFGQVLGMLLLDSVLYGLVTWYMEAVFPGQFGVPQPWYFFIMPSYWCGKPRAVAGKEEEDSDPEKALRNEYFEAEPEDLVAGIKIKHLSKVFRVGNKDRAAVRDLNLNLYEGQITVLLGHNGAGKTTTLSMLTGLFPPTSGRAYISGYEISQDMVQIRKSLGLCPQHDILFDNLTVAEHLYFYAQLKGLSRQKCPEEVKQMLHIIGLEDKWNSRSRFLSGGMRRKLSIGIALIAGSKVLILDEPTSGMDAISRRAIWDLLQRQKSDRTIVLTTHFMDEADLLGDRIAIMAKGELQCCGSSLFLKQKYGAGYHMTLVKEPHCNPEDISQLVHHHVPNATLESSAGAELSFILPRESTHRFEGLFAKLEKKQKELGIASFGASITTMEEVFLRVGKLVDSSMDIQAIQLPALQYQHERRASDWAVDSNLCGAMDPSDGIGALIEEERTAVKLNTGLALHCQQFWAMFLKKAAYSWREWKMVAAQVLVPLTCVTLALLAINYSSELFDDPMLRLTLGEYGRTVVPFSVPGTSQLGQQLSEHLKDALQAEGQEPREVLGDLEEFLIFRASVEGGGFNERCLVAASFRDVGERTVVNALFNNQAYHSPATALAVVDNLLFKLLCGPHASIVVSNFPQPRSALQAAKDQFNEGRKGFDIALNLLFAMAFLASTFSILAVSERAVQAKHVQFVSGVHVASFWLSALLWDLISFLIPSLLLLVVFKAFDVRAFTRDGHMADTLLLLLLYGWAIIPLMYLMNFFFLGAATAYTRLTIFNILSGIATFLMVTIMRIPAVKLEELSKTLDHVFLVLPNHCLGMAVSSFYENYETRRYCTSSEVAAHYCKKYNIQYQENFYAWSAPGVGRFVASMAASGCAYLILLFLIETNLLQRLRGILCALRRRRTLTELYTRMPVLPEDQDVADERTRILAPSPDSLLHTPLIIKELSKVYEQRVPLLAVDRLSLAVQKGECFGLLGFNGAGKTTTFKMLTGEESLTSGDAFVGGHRISSDVGKVRQRIGYCPQFDALLDHMTGREMLVMYARLRGIPERHIGACVENTLRGLLLEPHANKLVRTYSGGNKRKLSTGIALIGEPAVIFLDEPSTGMDPVARRLLWDTVARARESGKAIIITSHSMEECEALCTRLAIMVQGQFKCLGSPQHLKSKFGSGYSLRAKVQSEGQQEALEEFKAFVDLTFPGSVLEDEHQGMVHYHLPGRDLSWAKVFGILEKAKEKYGVDDYSVSQISLEQVFLSFAHLQPPTAEEGR

SEQ ID NO: 49997 - protein, 427 aa, Homo sapiens
MVICTRFISKEILTIREAVWLTDNTYKYEDLVRMMGEIVSALEGKIRVPTVVDYKEVLLTLVPVELRTQHLCSFLCELSLLHTSLSAYAPARLAAAALLLARLTHGQTQPWTTQLWDLTGFSYEDLIPCVLSLHKKCFHDDAPKDYRQVSLTAVKQRFEDKRYGEISQEEVLSYSQLCAALGVTQDSPDPPTFLSTGEIHAFLSSPSGRRTKRKRENSLQEDRGSFVTTPTAELSSQEETLLGSFLDWSLDCCSGYEGDQESEGEKEGDVTAPSGILDVTVVYLNPEQHCCQESSDEEACPEDKGPQDPQALALDTQIPATPGPKPLVRTSREPGKDVTTSGYSSVSTASPTSSVDGGLGALPQPTSVLSLDSDSHTQPCHHQARKSCLQCRPPSPPESSVPQQQVKRINLCIHSEEEDMNLGLVRL

SEQ ID NO: 49998 - protein, 105 aa, Homo sapiens [sequence omitted]

SEQ ID NO: 49999 - protein, 34 aa, Homo sapiens
MILQQPLQRGPQGGAQRLPRAALGVTWGLDARCV

SEQ ID NO: 50000 - protein, 394 aa, Homo sapiens
MAAKVVPMPPKPKQSFILRVPPDSKLGQDLLRDATNGPKTIHQLVLEHFLTFLPKPSLVQPSQKVKETLVIMKDVSSSLQNRVHPRPLVKLLPKGVQKEQETVSLYLKANPEELVVFEDLNVFHCQEECVSLDPTQQLTSEKEDDSSVGEMMLLAVNGSNPEGEDPEREPVENEDYREKSSDDDEMDSSLVSQQPPDNQEKERLNTSIPQKRKMRNLLVTIENDTPLEELSKYVDISIIALTRNRRTRRWYTCPLCGKQFNESSYLISHQRTHTGEKPYDCNHCGKSFNHKTNLNKHERIHTGEKPYSCSQCGKNFRQNSHRSRHEGIHIREKIFKCPECGKTFPKNEEFVLHLQSHEAERPYGCKKCGRRFGRLSNCTRHEKTHSACKTRKQK

SEQ ID NO: 50001 - protein, 105 aa, Homo sapiens [sequence omitted]

SEQ ID NO: 50002 - protein, 1403 aa, Homo sapiens
MEPGAAVPALRLESAFSERIRPEAENKSRKKKPPVSPPLLLVQDSETTGRQIEDRVALLLSEEVELSSTPPLPASRILKEGWERAGQCPPPPERKQSFLWEGSALTGAWAMEDFYTARLVPPLVPQRPAQGLMQEPVPPLVPPEHSELSERRSPALHGTPTAGCGSRGPSPSASQREHQALQDLVDLAREGLSASPWPGSGGLAGSEGTAGLDVVPGGLPLTGFVVPSQDKHPDRGGRTLLSLGLLVADFGAMVNNPHLSDVQFQTDSGEVLYAHKFVLYARCPLLIQYVNNEGFSAVEDGVLTQRVLLGDVSTEAARTFLHYLYTADTGLPPGLSSELSSLAHRFGVSELVHLCEQVPIATDSEGKPWEEKEAENCESRAENFQELLRSMWADEEEEAETLLKSKDHEEDQENVNEAEMEEIYEFAATQRKLLQEERAAGAGEDADWLEGGSPVSGQLLAGVQVQKQWDKVEEMEPLEPGRDEAATTWEKMGQCALPPPQGQHSGARGAEAPEQEAPEEALGHSSCSSPSRDCQAERKEGSLPHSDDAGDYEQLFSSTQGEISEPSQITSEPEEQSGAVRERGLEVSHRLAPWQASPPHPCRFLLGPPQGGSPRGSHHTSGSSLSTPRSRGGTSQVGSPTLLSPAVPSKQKRDRSILTLSKEPGHQKGKERRSVLECRNKGVLMFPEKSPSIDLTQSNPDHSSSRSQKSSSKLNEEDEVILLLDSDEELELEQTKMKSISSDPLEEKKALEISPRSCELFSIIDVDADQEPSQSPPRSEAVLQQEDEGALPENRGSLGRRGAPWLFCDRESSPSEASTTDTSWLVPATPLASRSRDCSSQTQISSLRSGLAVQAVTQHTPRASVGNREGNEVAQKFSVIRPQTPPPQTPSSCLTPVSPGTSDGRRQGHRSPSRPHPGGHPHSSPLAPHPISGDRAHFSRRFLKHSPPGPSFLNQTPAGEVVEVGDSDDEQEVASHQANRSPPLDSDPPIPIDDCCWHMEPLSPIPIDHWNLERTGPLSTSSPSRRMNEAADSRDCRSPGLLDTTPIRGSCTTQRKLQEKSSGAGSLGNSRPSFLNSALWDVWDGEEQRPPETPPPAQMPSAGGAQKPEGLETPKGANRKKNLPPKVPITPMPQYSIMETPVLKKELDRFGVRPLPKRQMVLKLKEIFQYTHQTLDSDSEDESQSSQPLLQAPHCQTLASQTYKPSRAGVHAQQEATTGPGAHRPKGPAKTKGPRHQRKHHESITPPSRSPTKEAPPGLNDDAQIPASQESVATSVDGSDSSLSSQSSSSCEFGAAFESAGEEEGEGEVSASQAAVQAADTDEALRCYIRSKPALYQKVLLYQPFELRELQAELRQNGLRVSSRRLLDFLDTHCITFTTAATRREKLQGRRRQPRGKKKVERN

SEQ ID NO: 50003 - protein, 138 aa, Homo sapiens
MHQICVLHYDIIWPSGFVCDNCLKKTGRPRKENKFSAKRLQTTRLGNHLEDRVNKFLRRQNHPEAGEVFVRVVASSDKTVEVKPGMKSRFVDSGEMSESFPYRTKALFAFEEIDGVDVCFFGMHVQEYGSDCPPPNTR

SEQ ID NO: 50004 - protein, 117 aa, Homo sapiens
MQVSQGMNSFNPMSLGNVQLPQAPMGPRAASPMNHSVQMNSMGSVPGMAISPSRMPQPPNMMGAHTNNMMAQAPAQSQFLPQNQFPSSSGAMSVGMGQPPAQTGVSQVLCPTGTVAP

SEQ ID NO: 50005 - protein, 148 aa, Homo sapiens
MDELKHQVMINQFVLTAGCAADQAKQLLQAAHWQFETALSAFFQETNIPYSHHHHQMASESFHSGGSGSPMAATATSPPPHFPHAATSSSAASSWPTAASPPGGPQHHQPQPPLWTPTPPSPASDWPPLAPQQATSEPRAHPAMEAER

SEQ ID NO: 50006 - protein, 197 aa, Homo sapiens
MPRNNQLLHFAFREDKQWKLQQIQDARNHVSQAIYLLTSRDQSYQFKTGAEVLKLMDAVMLQLTRARNRLTTPATLTLPEIAASGLTRMFAPALPSDLLVNVYINLNKLCLTVYQLHALQPNSTKNFRPAGGAVLHSPGAMFEWGSQRLEVSHVHKVECVIPWLNDALVYFTVSLQLCQQLKDKISVFSSYWSYRPF

SEQ ID NO: 50007 - protein, 230 aa, Homo sapiens
MAKESTQGHRSYLLPSGGSVTLSESTAIISYGTTGLVTWDAALYLAEWAIENPAVFTNRTVLELGSGAGLTGLAICKMCRPRAYIFSDCHSRVLEQLRGNVLLNGLSLEADITAKLDSPRVTVAQLDWDVATVHQLSAFQPDVVIAADVLYCPEAIMSLVGVLRRLAACREHQRAPEVYVAFTVRNPETCQLFTTELGRAGIRWEVEPRHEQKLFPYEEHLEMAMLNLTL

SEQ ID NO: 50008 - protein, 162 aa, Homo sapiens
MNIQSHLGEALIQDLINYCLSYIAKIKLPKKRGTFIEFRNGMLNVSPIGRSCSQEERIEFYELDKKENIRQKFVADLRKEFAGKGLTFSIGGQISFDVFPDGWDKRYCLRHVENDGYKTIYFFGDKTMPGGNDHEIFTDPRTMGYSVTAPEDTRRICELLFS

SEQ ID NO: 50009 - protein, 35 aa, Homo sapiens
MNIQSHLGEALIQDLINYCLSYIAKIKLPKKRKKI

SEQ ID NO: 50010 - protein, 63 aa, Homo sapiens
MSGFICPKCKKESQIFPPTTGGAELMCQDLEVPLLGRVPLDPLIGIQEFCNLHQSKEENLISS

SEQ ID NO: 50011 - protein, 220 aa, Homo sapiens [sequence omitted]

SEQ ID NO: 50012 - protein, 32 aa, Homo sapiens
MAKIQRLREVLVRRESELRFMLCNLAQISYLL

SEQ ID NO: 50013 - protein, 515 aa, Homo sapiens
MDKQCTVYPVSSSGLIYFYSYIIDLLSGTGFLEETSLFYGHYTIDGVKFQNFTYDLPLAYLLSTIASLALSLLWIVKRSVEGFKINLIRSEEHFQSYCNKIFAGWDFCITNRSMADLKHSSLRYELRADLEEERMRQKIAERTSEETIRIYSLRLFLNCIVLAVLGACFYAIYVATVFSQEHMKKEIDKMVFGENLFILYLPSIVITLANFITPMIFAKIIRYEDYSPGFEIRLTILRCVFMRLATICVLVFTLGSKITSCDDDTCDLCGYNQKLYPCWETQVGQEMYKLMIFDFIIILAVTLFVDFPRKLLVTYCSSCKLIQCWGQQEFAIPDNVLGIVYGQTICWIGAFFSPLLPAIATLKFIIIFYVKEWSLLYTCRPSPRPFRASNSNFFFLLVLLIGLCLAIIPLTISISRIPSSKACGPFTNFNTTWEVIPKTVSTFPSSLQSFIHGVTSEAFAVPFFMIICLIMFYFIALAGAHKRVVIQLREQLSLESRDKCYLIQKLTEAQRDMRN

SEQ ID NO: 50014 - protein, 132 aa, Homo sapiens [sequence omitted]

SEQ ID NO: 50015 - protein, 869 aa, Homo sapiens
MDSSRRKRDRDDNSVVGSDFEPWTNKRGEILARYTTTEKLSINLFMGSEKGKAGTATLAMSEKVRTRLEELDDFEEGSQKELLNLTQQDYVNRIEELNQSLKDAWASDQKVKALKIVIQCSKLLSDTSVIQFYPSKFVLITDILDTFGKLVYERIFSMCVDSRSVLPDHFSPENANDTAKETCLNWFFKIASIRELIPRFYVEASILKCNKFLSKTGISECLPRLTCMIRGIGDPLVSVYARAYLCRVGMEVAPHLKETLNKNFFDFLLTFKQIHGDTVQNQLVVQGVELPSYLPLYPPAMDWIFQCISYHAPEALLTEMMERCKKLGNNALLLNSVMSAFRAEFIATRSMDFIGMIKECDESGFPKHLLFRSLGLNLALADPPESDRLQILNEAWKVITKLKNPQDYINCAEVWVEYTCKHFTKREVNTVLADVIKHMTPDRAFEDSYPQLQLIIKKVIAHFHDFSVLFSVEKFLPFLDMFQKESVRVEVCKCIMDAFIKHQQEPTKDPVILNALLHVCKTMHDSVNALTLEDEKRMLSYLINGFIKMVSFGRDFEQQLSFYVESRSMFCNLEPVLVQLIHSVNRLAMETRKVMKGNHSRKTAAFVRACVAYCFITIPSLAGIFTRLNLYLHSGQVALANQCLSQADAFFKAAISLVPEVPKMINIDGKMRPSESFLLEFLCNFFSTLLIVPDHPEHGVLFLVRELLNVIQDYTWEDNSDEKIRIYTCVLHLLSAMSQETYLYHIDKVDSNDSLYGGDSKFLAENNKLCETVMAQILEHLKTLAKDEALKRQSSLGLSFFNSILAHGDLRNNKLNQLSVNLWHLAQRHGCADTRTMVKTLEYIKKQSKQPDMTHLTELALRLPLQTRT

SEQ ID NO: 50016 - protein, 776 aa, Homo sapiens
MDSSRRKRDRDDNSVVGSDFEPWTNKRGEILARYTTTEKLSINLFMGSEKGKAGTATLAMSEKVRTRLEELDDFEEGSQKELLNLTQQDYVNRIEELNQSLKDAWASDQKVKALKIVIQCSKLLSDTSVIQFYPSKFVLITDILDTFGKLVYERIFSMCVDSRSVLPDHFSPENANDTAKETCLNWFFKIASIRELIPRFYVEASILKCNKFLSKTGISECLPRLTCMIRGIGDPLVSVYARAYLCRALLTEMMERCKKLGNNALLLNSVMSAFRAEFIATRSMDFIGMIKECDESGFPKHLLFRSLGLNLALADPPESDRLQILNEAWKVITKLKNPQDYINCAEVWVEYTCKHFTKREVNTVLADVIKHMTPDRAFEDSYPQLQLIIKKVIAHFHDFSVLFSVEKFLPFLDMFQKESVRVEVCKCIMDAFIKHQQEPTKDPVILNALLHVCKTMHDSVNALTLEDEKRMLSYLINGFIKMVSFGRDFEQQLSFYVESRSMFCNLEPVLVQLIHACVAYCFITIPSLAGIFTRLNLYLHSGQVALANQCLSQADAFFKAAISLVPEVPKMINIDGKMRPSESFLLEFLCNFFSTLLIVPDHPEHGVLFLVRELLNVIQDYTWEDNSDEKIRIYTCVLHLLSAMSQETYLYHIDKVDSNDSLYGGDSKFLAENNKLCETVMAQILEHLKTLAKDEALKRQSSLGLSFFNSILAHGDLRNNKLNQLSVNLWHLAQRHGCADTRTMVKTLEYIKKQSKQPDMTHLTELALRLPLQTRT

SEQ ID NO: 50017 - protein, 463 aa, Homo sapiens [sequence omitted]

SEQ ID NO: 50018 - protein, 298 aa, Homo sapiens
MWTLRSPLTRSLYVNMTSGPGGPAAAAGGRKENHQWYVCNREKLCESLQAVFVQSYLDQGTQIFLNNSIEKSGWLFIQLYHSFVSSVFSLFMSRTSINGLLGRGSMFVFSPDQFQRLLKINPDWKTHRLLDLGAGDGEVTKIMSPHFEEIYATELSETMIWQLQKKKYRVLGINEWQNTGFQYDVISCLNLLDRCDQPLTLLKDIRSVLEPTRGRVILALVLPFHPYVENVGGKWEKPSEILEIKGQNWEEQVNSLPEVFRKAGFVIEAFTRLPYLCEGDMYNDYYVLDDAVFVLKPV

SEQ ID NO: 50019 - protein, 297 aa, Homo sapiens
MWTLRSPLTRSLYVNMTSGPGGPAAAAGGRKENHQWYVCNREKLCESLQAVFVQSYLDQGTQIFLNNSIEKSGWLFIQLYHSFVSSVFSLFMSRTSINGLLGRGSMFVFSPDQFQRLLKINPDWKTHRLLDLGAGDGEVTKIMSPHFEEIYATELSETMIWQLQKKKYRVLGINEWQNTGFQYDVISCLNLLDRCDQPLTLLKDIRSVLEPTRGRVILALVLPFHPYVENGGKWEKPSEILEIKGQNWEEQVNSLPEVFRKAGFVIEAFTRLPYLCEGDMYNDYYVLDDAVFVLKPV

SEQ ID NO: 50020 - protein, 504 aa, Homo sapiens [sequence omitted]

SEQ ID NO: 50021 - protein, 874 aa, Homo sapiens [sequence omitted]

SEQ ID NO: 50022 - protein, 796 aa, Homo sapiens [sequence omitted]

SEQ ID NO: 50023 - protein, 219 aa, Homo sapiens
MKQLANQTVGRAEKTEVLSEDLLQIERRLDTVRSICHHSHKRLVACFQGQHGTDAERRHKKLPLTALAQNMQEASTQLEDSLLGKMLETCGDAENQLALELSQHEVFVEKEIVDPLYGIAEVEIPNIQKQRKQLARLVLDWDSVRARWNQAHKSSGTNFQGLPSKIDTLKEEMDEAGNKVEQCKDQLAADMYNFMAKEGEYGKFFVTISGRKNQPLGLP

SEQ ID NO: 50024 - protein, 259 aa, Homo sapiens [sequence omitted]

SEQ ID NO: 50025 - protein, 50 aa, Homo sapiens
MLLHPPQSHGGPPQGAVPQSGVPALSASTPSPYPYIGHPQALSDPDCLLT

SEQ ID NO: 50026 - protein, 174 aa, Homo sapiens
MAAAAPVAADDDERRRRPGAALEDSRSQEGANGEAESGELSRLRAELAGALAEMETMKAVAEVSESTKAEAVAAVQRQCQEEVASLQAILKDSISSYEAQITALKQERQQQQQDCEEKERELGRLKQLLSRAYPLDSLEKQMEKVAHCLMVQDDCLSASHHVHIPASKKEEKEE

SEQ ID NO: 50027 - protein, 68 aa, Homo sapiens
MKVHSQGPHHVCELCNKGTGEVCPMAAAAAAAAAAAAAAVAAPPTAVGSLSGAEGVPVSSQPLPSQPW

SEQ ID NO: 50028 - protein, 384 aa, Homo sapiens [sequence omitted]

SEQ ID NO: 50029 - protein, 325 aa, Homo sapiens [sequence omitted]

SEQ ID NO: 50030 - protein, 281 aa, Homo sapiens
MVSSAYDHVRKTRVAIKKISPFEHQTYCQRTLREIQILLRFRHENVIGIRDILRASTLEAMRDVYIVQDLMETDLYKLLKSQQLSNDHICYFLYQILRGLKYIHSANVLHRDLKPSNLLINTTCDLKICDFGLARIADPEHDHTGFLTEYVATRWYRAPEIMLNSKGYTKSIDIWSVGCILAEMLSNRPIFPGKHYLDQLNHILALDLLDRMLTFNPNKRITVEEALAHPYLEQYYDPTDEPVAEEPFTFAMELDDLPKERLKELIFQETARFQPGVLEAP

SEQ ID NO: 50031 - protein, 180 aa, Homo sapiens
MAPPLAPLPPRDPNGAGSEWRKPGAVSFADVAVYFSREEWGCLRPAQRALYRDVMRETYGHLGALGESPTCLPGPCASTGPAAPLGAACGVGGPGAGQAASSQRGVCVLLPQESEAASRRSSPGWRRRPNCGIRLPRIRRWRSVRQKRTQQIPETRKRKDKGKGREPWRSPTLWPPGLLG

SEQ ID NO: 50032 - protein, 179 aa, Homo sapiens
MAPPLAPLPPRDPNGAGSEWRKPGAVSFADVAVYFSREEWGCLRPAQRALYRDVMRETYGHLGALGESPTCLPGPCASTGPAAPLGAACGVGGPGAGQAASSQRGVCVLLPQESEAASRRSSPGWRRRPNCGIRLPRIRRWRSVRQKRTQIPETRKRKDKGKGREPWRSPTLWPPGLLG

SEQ ID NO: 50033 - protein, 3207 aa, Homo sapiens
MTGSNPVSPASSSSPASSGAGGISPQHIAQDSSLDGPPGPPDGATVPLEGFSLSQAADLANKGPKWEKSHAEIAEQAKHEAEIETRIAELRKEGFWSLKRLPKVPEPPRPKGHWDYLCEEMQWLSADFAQERRWKRGVARKVVRMVIRHHEEQRQKEERARREEQAKLRRIASTMAKDVRQFWSNVEKVVQFKQQSRLEEKRKKALDLHLDFIVGQTEKYSDLLSQSLNQPLTSSKAGSSPCLGSSSAASSPPPPASRLDDEDGDFQPQEDEEEDDEETIEVEEQQEGNDAEAQRREIELLRREGELPLEELLRSLPPQLLEGPSSPSQTPSSHDSDTRDGPEEGAEEEPPQVLEIKPPPSAVTQRNKQPWHPDEDDEEFTANEEEAEDEEDTIAAEEQLEGEVDHAMELSELAREGELSMEELLQQYAGAYAPGSGSSEDEDEDEVDANSSDCEPEGPVEAEEPPQEDSSSQSDSVEDRSEDEEDEHSEEEETSGSSASEESESEESEDAQSQSQADEEEEDDDFGVEYLLARDEEQSEADAGSGPPTPGPTTLGPKKEITDIAAAAESLQPKGYTLATTQVKTPIPLLLRGQLREYQHIGLDWLVTMYEKKLNGILADEMGLGKTIQTISLLAHLACEKGNWGPHLIIVPTSVMLNWEMELKRWCPSFKILTYYGAQKERKLKRQGWTKPNAFHVCITSYKLVLQDHQAFRRKNWRYLILDEAQNIKNFKSQRWQSLLNFNSQRRLLLTGTPLQNSLMELWSLMHFLMPHVFQSHREFKEWFSNPLTGMIEGSQEYNEGLVKRLHKVLRPFLLRRVKVDVEKQMPKKYEHVIRCRLSKRQRCLYDDFMAQTTTKETLATGHFMSVINILMQLRKVCNHPNLFDPRPVTSPFITPGICFSTASLVLRATDVHPLQRIDMGRFDLIGLEGRVSRYEADTFLPRHRLSRRVLLEVATAPDPPPRPKPVKMKVNRMLQPVPKQEGRTVVVVNNPRAPLGPVPVRPPPGPELSAQPTPGPVPQVLPASLMVSASPAGPPLIPASRPPGPVLLPPLQPNSGSLPQVLPSPLGVLSGTSRPPTPTLSLKPTPPAPVRLSPAPPPGSSSLLKPLTVPPGYTFPPAAATTTSTTTATATTTAVPAPTPAPQRLILSPDMQARLPSGEVVSIGQLASLAQRPVANAGGSKPLTFQIQGNKLTLTGAQVRQLAVGQPRPLQRNVVHLVSAGGQHHLISQPAHVALIQAVAPTPGPTPVSVLPSSTPSTTPAPTGLSLPLAANQVPPTMVNNTGVVKIVVRQAPRDGLTPVPPLAPAPRPPSSGLPAVLNPRPTLTPGRLPTPTLGTARAPMPTPTLVRPLLKLVHSPSPEVSASAPGAAPLTISSPLHVPSSLPGPASSPMPIPNSSPLASPVSSTVSVPLSSSLPISVPTTLPAPASAPLTIPISAPLTVSASGPALLTSVTPPLAPVVPAAPGPPSLAPSGASPSASALTLGLATAPSLSSSQTPGHPLLLAPTSSHVPGLNSTVAPACSPVLVPASALASPFPSAPNPAPAQASLLAPASSASQALATPLAPMAAPQTAILAPSPAPPLAPLPVLAPSPGAAPVLASSQTPVPVMAPSSTPGTSLASASPVPAPTPVLAPSSTQTMLPAPVPSPLPSPASTQTLALAPALAPTLGGSSPSQTLSLGTGNPQGPFPTQTLSLTPASSLVPTPAQTLSLAPGPPLGPTQTLSLAPAPPLAPASPVGPAPAHTLTLAPASSSASLLAPASVQTLTLSPAPVPTLGPAAAQTLALAPASTQSPASQASSLVVSASGAAPLPVTMVSRLPVSKDEPDTLTLRSGPPSPPSTATSFGGPRPRRQPPPPPRSPFYLDSLEEKRKRQRSERLERIFQLSEAHGALAPVYGTEVLDFCTLPQPVASPIGPRSPGPSHPTFWTYTEAAHRAVLFPQQRLDQLSEIIERFIFVMPPVEAPPPSLHACHPPPWLAPRQAAFQEQLASELWPRARPLHRIVCNMRTQFPDLRLIQYDCGKLQTLAVLLRQLKAEGHRVLIFTQMTRMLDVLEQFLTYHGHLYLRLDGSTRVEQRQALMERFNADKRIFCFILSTRSGGVGVNLTGADTVVFYDSDWNPTMDAQAQDRCHRIGQTRDVHIYRLISERTVEENILKKANQKRMLGDMAIEGGNFTTAYFKQQTIRELFDMPLEEPSSSSVPSAPEEEEETVASKQTHILEQALCRAEDEEDIRAATQAKAEQVAELAEFNENDGFPAGEGEEAGRPGAEDEEMSRAEQEIAALVEQLTPIERYAMKFLEASLEEVSREELKQAEEQVEAARKDLDQAKEEVFRLPQEEEEGPGAGDESSCGTGGGTHRRSKKAKAPERPGTRVSERLRGARAETQGANHTPVISAHQTRSTTTPPRCSPARERVPRPAPRPRPTPASAPAAIPALVPVPVSAPVPISAPNPITILPVHILPSPPPPSQIPPCSSPACTPPPACTPPPAHTPPPAQTCLVTPSSPLLLGPPSVPISASVTNLPLGLRPEAELCAQALASPESLELASVASSETSSLSLVPPKDLLPVAVEILPVSEKNLSLTPSAPSLTLEAGSIPNGQEQEAPDSAEGTTLTVLPEGEELPLCVSESNGLELPPSAASDEPLQEPLEADRTSEELTEAKTPTSSPEKPQELVTAEVAAPSTSSSATSSPEGPSPARPPRRRTSADVEIRGQGTGRPGQPPGPKVLRKLPGRLVTVVEEKELVRRRRQQRGAASTLVPGVSETSASPGSPSVRSMSGPESSPPIGGPCEAAPSSSLPTPPQQPFIARRHIELGVTGGGSPENGDGALLAITPPAVKRRRGRPPKKNRSPADAGRGVDEAPSSTLKGKTNGADPVPGPETLIVADPVLEPQLIPGPQPLGPQPVHRPNPLLSPVEKRRRGRPPKARDLPIPGTISSAGDGNSESRTQPPPHPSPLTPLPPLLVCPTATVANTVTTVTISTSPPKRKRGRPPKNPPSPRPSQLPVLDRDSTSVLESCGLGRRRQPQGQGESEGSSSDEDGSRPLTRLARLRLEAEGMRGRKSGGSMVVAVIQDDLDLADSGPGGLELTPPVVSLTPKLRSTRLRPGSLVPPLETEKLPRKRAGAPVGGSPGLAKRGRLQPPSPLGPEGSVEESEAEASGEEEEGDGTPRRRPGPRRLVGTTNQGDQRILRSSAPPSLAGPAVSHRGRKAKT

SEQ ID NO: 50034 - protein, 499 aa, Homo sapiens
MDVLLTYLPKNYAKSELGAVIFWGQNQTLDPNNMTILNRTFQDEPLIMDFNGDLIPDIFGITNESNQPQILLGGNLSWHPALTTTSKMRIPHSHAFIDLTEDFTADLFLTTLNATTSTFQFEIWENLDGNFSVSTILEKPQNMMVVGQSAFADFDGDGHMDHLLPGCEDKNCQKSTIYLVRSGMKQWVPVLQDFSNKGTLWGFVPFVDEQQPTEIPIPITLHIGDYNMDGYPDALVILKNTSGSNQQAFLLENVPCNNASCEEARRMFKVYWELTDLNQIKDAMVATFFDIYEDGILDIVVLSKGYTKNDFAIHTLKNNFEADAYFVKVIVLSGLCSNDCPRKITPFGVNQPGPYIMYTTVDANGYLKNGSAGQLSQSAHLALQLPYNVLGLGRSANFLDHLYVGIPRPSGEKSIRKQEWTAIIPNSQLIVIPYPHNVPRSWSAKLYLTPSNIVLLTAIALIGVCVFILAIIGILHWQEKKADDREKRQEAHRFHFDAM

SEQ ID NO: 50035 - protein, 7 aa, Homo sapiens
MVPTSNI

SEQ ID NO: 50036 - protein, 1230 aa, Homo sapiens
MGGLQETSTTRTMKSRQAVSRVSREELEDRFLRLHDENILLKQHARKQEDKIKRMATKLIRLVNDKKRYERVGGGPKRLGRDVEMEEMIEQLQEKVHELEKQNETLKNRLISAKQQLQTQGYRQTPYNNVQSRINTGRRKANENAGLQECPRKGIKFQDADVAETPHPMFTKYGNSLLEEARGEIRNLENVIQSQRGQIEELEHLAEILKTQLRRKENEIELSLLQLREQQATDQRSNIRDNVEMIKLHKQLVEKSNALSAMEGKFIQLQEKQRTLRISHDALMANGDELNMQLKEQRLKCCSLEKQLHSMKFSERRIEELQDRINDLEKERELLKENYDKLYDSAFSAAHEEQWKLKEQQLKVQIAQLETALKSDLTDKTEILDRLKTERDQNEKLVQENRELQLQYLEQKQQLDELKKRIKLYNQENDINADELSEALLLIKAQKEQKNGDLSFLVKVDSEINKDLERSMRELQATHAETVQELEKTRNMLIMQHKINKDYQMEVEAVTRKMENLQQDYELKVEQYVHLLDIRAARIHKLEAQLKDIAYGTKQYKFKPEIMPDDSVDEFDETIHLERGENLFEIHINKVTFSSEVLQASGDKEPVTFCTYAFYDFELQTTPVVRGLHPEYNFTSQYLVHVNDLFLQYIQKNTITLEVHQAYSTEYETIAACQLKFHEILEKSGRIFCTASLIGTKGDIPNFGTVEYWFRLRVPMDQAIRLYRERAKALGYITSNFKGPEHMQSLSQQAPKTAQLSSTDSTDGNLNELHITIRCCNHLQSRASHLQPHPYVVYKFFDFADHDTAIIPSSNDPQFDDHMYFPVPMNMDLDRYLKSESLSFYVFDDSDTQENIYIGKVNVPLISLAHDRCISGIFELTDHQKHPAGTIHVILKWKFAYLPPSGSITTEDLGNFIRSEEPEVVQRLPPASSVSTLVLAPRPKPRQRLTPVDKKVSFVDIMPHQSDETSPPPEDRKEISPEVEHIPEIEINMLTVPHVPKVSQEGSVDEVKENTEKMQQGKDDVSLLSEGQLAEQSLASSEDETEITEDLEPEVEEDMSASDSDDCIIPGPISKNIKQPSEKIRIEIIALSLNDSQVTMDDTIQRLFVECRFYSLPAEETPVSLPKPKSGQWVYYNYSNVIYVDKENNKAKRDILKAILQKQEMPNRSLRFTVVSDPPEDEQDLECEDIGVAHVDLADMFQEGRDLIEQNIDGMGESVAQFVQPTIAELQTLY

SEQ ID NO: 50037 - protein, 55 aa, Homo sapiens
MGGLQETSTTRTMKSRQAVSRVSREELEDRFLRLHDENILLKQHARKQEDKIKRL

SEQ ID NO: 50038 - protein, 417 aa, Homo sapiens
MAVETTVHTHLSASPPQGSPYDHTPGMAGSLGYHPYAAPLGSYPYGDPAYRKNATRDATATLKAWLNEHRKNPYPTKGEKIMLAIITKMTLTQVSTWFANARRRLKKENKMTWTPRNRSEDEEEEENIDLEKNDEDEPQKPEDKGDPEGPEAGGAEQKAASGCERLQGPPTPAGKETEGSLSDSDFKEPPSEGRLDALQGPPRTGGPSPAGPAAARLAEDPAPHYPAGAPAPGPHPAAGEVPPGPGGPSVIHSPPPPPPPAVLAKPKLWSLAEIATSSDKVKDGGGGNEGSPCPPCPGPIAGQALGGSRASPAPAPSRSPSAQCPFPGGTVLSRPLYYTAPFYPGYTNYGSFGHLHGHPGPGPGPTTGPGSHFNGLNQTVLNRADALAKDPKMLRSQSQLDLCKDSPYELKKGMSDI

SEQ ID NO: 50039 - protein, 82 aa, Homo sapiens
MCLQRLRLTPEPHPAFRTFGIPQPSAAPHLSTFDPCFYRELVVVHGLSAADIWLMWRLLHGPHGPACAHPQPVAAGPFQWDS

SEQ ID NO: 50040 - protein, 479 aa, Homo sapiens
MNICNKPSNKTAPEKSVWTAPAQPSGPSPELQGQRSRRNGWSWPPHPLQIVAWLLYLFFAVIGFGILVPLLPHHWVPAGYACMGAIFAGHLVVHLTAVSIDPADANVRDKSYAGPLPIFNRSQHAHVIEDLHCNLCNVDVSARSKHCSACNKCVCGFDHHCKWLNNCVGERNYRLFLHSVASALLGVLLLVLVATYVFVEFFVNPMRLRTNRHFEVLKNHTDVWFVFLPAAPVETQAPAILALAALLILLGLLSTALLGHLLCFHIYLMWHKLTTYEYIVQHRPPQEAKGVHRELESCPPKMRPIQEMEFYMRTFRHMRPEPPGQAGPAAVNANPSQFLATRGQAEPPPPSSPDTLALPPRIRPQKKRKRRVYKVRTSETSDPASGPRAPSRRSSSSTDSADASPVHAAGPAGAYHSASAESVDEIPVAQTRLGSAALAAPRGRGRQPTLARQARAPAVFVSPSSGEPRAPGGREAGLA

SEQ ID NO: 50041 - protein, 482 aa, Homo sapiens
MNICNKPSNKTAPEKSVWTAPAQPSGPSPELQGQRSRRNGWSWPPHPLQIVAWLLYLFFAVIGFGILVPLLPHHWVPAGYACMGAIFAGHLVVHLTAVSIDPADANVRDKSYAGPLPIFNRSQHAHVIEDLHCNLCNVDVSARSKHCSACNKCVCGFDHHCKWLNNCVGERNYRLFLHSVASALLGVLLLVLVATYVFVEFFVNPMRLRTNRHFEVLKNHTDVWFVFLPAAPVETQAPAILALAALLILLGLLSTALLGHLLCFHIYLMWHKLTTYEYIVQHRPPQEAKGVHRELESCPPKMRPIQEMEFYMRTFRHMRPEPPGQAGPAAVNAKHSRPASPDPTPGRRDCAGPPVQVEWDRKKPLPWRSPLLLLAMWGPQAPPCLCRKRGRGACIKCERLRPRIRRRGLGPPAAAPARRRIPRTPALCTPLALPAPTTRRRQSPWTRFQWRRRAWAAPLWPPRGAGADSPRWRGRRVRPPFS

SEQ ID NO: 50042 - protein, 1161 aa, Homo sapiens
MFSVAHPAAKVPQPERLDLVYTALKRGLTAYLEVHQQEQEKLQGQIRESKRNSRLGFLYDLDKQVKSIERFLRRLEFHASKIDELYEAYCVQRRLRDGAYNMVRAYTTGSPGSREARDSLAEATRGHREYTESMCLLESELEAQLGEFHLRMKGLAGFARLCVGDQYEICMKYGRQRWKLRGRIEGSGKQVWDSEETIFLPLLTEFLSIKVTELKGLANHVVVGSVSCETKDLFAALPQVVAVDINDLGTIKLSLEVTWSPFDKDDQPSAASSVNKASTVTKRFSTYSQSPPDTPSLREQAFYNMLRRQEELENGTAWSLSSESSDDSSSPQLSGTARHSPAPRPLVQQPEPLPIQVAFRRPETPSSGPLDEEGAVAPVLANGHAPYSRTLSHISEASVDAALAEASVEAVGPESLAWGPSPPTHPAPTHGEHPSPVPPALDPGHSATSSTLGTTGSVPTSTDPAPSAHLDSVHKSTDSGPSELPGPTHTTTGSTYSAITTTHSAPSPLTHTTTGSTHKPIISTLTTTGPTLNIIGPVQTTTSPTHTMPSPTHTTASPTHTSTSPTHTPTSPTHKTSMSPPTTTSPTPSGMGLVQTATSPTHPTTSPTHPTTSPILINVSPSTSLELATLSSPSKHSDPTLPGTDSLPCSPPVSNSYTQADPMAPRTPHPSPAHSSRKPLTSPAPDPSESTVQSLSPTPSPPTPAPQHSDLCLAMAVQTPVPTAAGGSGDRSLEEALGALMAALDDYRGQFPELQGLEQEVTRLESLLMRQGLTRSRASSLSITVEHALESFSFLNEDEDEDNDVPGDRPPSSPEAGAEDSIDSPSARPLSTGCPALDAALVRHLYHCSRLLLKLGTFGPLRCQEAWALERLLREARVLEAVCEFSRRWEIPASSAQEVVQFSASRPGFLTFWDQCTERLSCFLCPVERVLLTFCNQYGARLSLRQPGLAEAVCVKFLEDALGQKLPRRPQPGPGEQLTVFQFWSFVETLDSPTMEAYVTETAEEVLLVRNLNSDDQAVVLKALRLAPEGRLRRDGLRALSSLLVHGNNKVMAAVSTQLRSLSLGPTFRERALLCFLDQLEDEDVQTRVAGCLALGCIKAPEGIEPLVYLCQTDTEAVREAARQSLQQCGEEGQSAHRRLEESLDALPRIFGPGSMASTAF

SEQ ID NO: 50043 - protein, 51 aa, Homo sapiens
MAGSGRLVLRPWIRELILGSETPSSPRAGQLLEVSPHSGPGDRGGGPGWWD

SEQ ID NO: 50044 - protein, 14 aa, Homo sapiens
MKELVRFLNLNIAH

SEQ ID NO: 50045 - protein, 596 aa, Homo sapiens
MFIGTADDRYLRPHAFYQVHRITGKTVATASQEIIIASTKVLEIPLLPENNMSASIDCAGILKLRNSDIELRKGETDIGRKNTRVRLVFRVHIPQPSGKVLSLQIASIPVECSQRSAQELPHIEKYSINSCSVNGGHEMVVTGSNFLPESKIIFLEKGQDGRPQWEVEGKIIREKCQGAHIVLEVPPYHNPAVTAAVQVHFYLCNGKRKKSQSQRFTYTPVLMKQEHREEIDLSSVPSLPVPHPAQTQRPSSDSGCSHDSVLSGQRSLICSIPQTYASMVTSSHLPQLQCRDESVSKEQHMIPSPIVHQPFQVTPTPPVGSSYQPMQTNVVYNGPTCLPINAASSQEFDSVLFQQDATLSGLVNLGCQPLSSIPFHSSNSGSTGHLLAHTPHSVHTLPHLQSMGYHCSNTGQRSLSSPVADQITGQPSSQLQPITYGPSHSGSATTASPAASHPLASSPLSGPPSPQLQPMPYQSPSSGTASSPSPATRMHSGQHSTQAQSTGQGGLSAPSSLICHSLCDPASFPPDGATVSIKPEPEDREPNFATIGLQDITLDDVNEIIGRDMSQISVSQGAGVSRQAPLPSPESLDLGRSDGL

SEQ ID NO: 50046 - protein, 9 aa, Homo sapiens
MFAYFLTVA

SEQ ID NO: 50047 - protein, 18 aa, Homo sapiens
MLENYSHLVSLEFLRIKD

SEQ ID NO: 50048 - protein, 1484 aa, Homo sapiens
MSQTSGGEAGSPPPAVVAADASSAPSSSSMGGACSSFTTSSSPTIYSTSVTDSKAMQVESCSSAVGVSNRGVSEKQLTSNTVQQHPSTPKRHTVLYISPPPEDLLDNSRMSCQDEGCGLESEQSCSMWMEDSPSNFSNMSTSSYNDNTEVPRKSRKRNPKQRPGVKRRDCEESNMDIFDADSAKAPHYVLSQLTTDNKGNSKAGNGTLENQKGTGVKKSPMLCGQYPVKSEGKELKIVVQPETQHRARYLTEGSRGSVKDRTQQGFPTVKLEGHNEPVVLQVFVGNDSGRVKPHGFYQACRVTGRNTTPCKEVDIEGTTVIEVGLDPSNNMTLAVDCVGILKLRNADVEARIGIAGSKKKSTRARLVFRVNIMRKDGSTLTLQTPSSPILCTQPAGVPEILKKSLHSCSVKGEEEVFLIGKNFLKGTKVIFQENVSDENSWKSEAEIDMELFHQNHLIVKVPPYHDQHITLPVSVGIYVVTNAGRSHDVQPFTYTPDPAAAGALNVNVKKEISSPARPCSFEEAMKAMKTTGCNLDKVNIIPNALMTPLIPSSMIKSEDVTPMEVTAEKRSSTIFKTTKSVGSTQQTLENISNIAGNGSFSSPSSSHLPSENEKQQQIQPKAYNPETLTTIQTQDISQPGTFPAVSASSQLPNSDALLQQATQFQTRETQSREILQSDGTVVNLSQLTEASQQQQQSPLQEQAQTLQQQISSNIFPSPNSVSQLQNTIQQLQAGSFTGSTASGSSGSVDLVQQVLEAQQQLSSVLFSAPDGNENVQEQLSADIFQQVSQIQSGVSPGMFSSTEPTVHTRPDNLLPGRAESVHPQSENTLSNQQQQQQQQQQVMESSAAMVMEMQQSICQAAAQIQSELFPSTASANGNLQQSPVYQQTSHMMSALSTNEDMQMQCELFSSPPAVSGNETSTTTTQQVATPGTTMFQTSSSGDGEETGTQAKQIQNSVFQTMVQMQHSGDNQPQVNLFSSTKSMMSVQNSGTQQQGNGLFQQGNEMMSLQSGNFLQQSSHSQAQLFHPQNPIADAQNLSQETQGSLFHSPNPIVHSQTSTTSSEQMQPPMFHSQSTIAVLQGSSVPQDQQSTNIFLSQSPMNNLQTNTVAQEAFFAAPNSISPLQSTSNSEQQAAFQQQAPISHIQTPMLSQEQAQPPQQGLFQPQVALGSLPPNPMPQSQQGTMFQSQHSIVAMQSNSPSQEQQQQQQQQQQQQQQQQQSILFSNQNTMATMASPKQPPPNMIFNPNQNPMANQEQQNQSIFHQQSNMAPMNQEQQPMQFQSQSTVSSLQNPGPTQSESSQTPLFHSSPQIQLVQGSPSSQEQQVTLFLSPASMSALQTSINQQDMQQSPLYSPQNNMPGIQGATSSPQPQATLFHNTAGGTMNQLQNSPGSSQQTSGMFLFGIQNNCSQLLTSGPATLPDQLMAISQPGQPQNEGQPPVTTLLSQQMPENSPLASSINTNQNIEKIDLLVSLQNQGNNLTGSF

SEQ ID NO: 50049 - protein, 88 aa, Homo sapiens
MSQTSGGEAGSPPPAVVAADASSAPSSSSMGGACSSFTTSSSPTIYSTSVTDSKAMQVESCSSAVGNIGKPKRNWSKEEPYVVWTISC

SEQ ID NO: 50050 - protein, 331 aa, Homo sapiens
MSLLFTYSHHSMATLPYLDSGALDGTHRVKLVPGYAGLQRLSKERLSGKSCACRRCMGDAGASDWFDSHFDGNISPVWTRENMDLPPDVQRWWMMLQPQFKSHNTNEVLEKLFQIVPGENPYRFRDPHQCRRCAVVGNSGNLRGSGYGQDVDGHNFIMRMNQAPTVGFEQDVGSRTTHHFMYPESAKNLPANVSFVLVPFKVLDLLWIASALSTGQIRFTYAPVKSFLRVDKEKVQIYNPAFFKYIHDRWTEHHGRYPSTGMLVLFFALHVCDEVNVYGFGADSRGNWHHYWENNRYAGEFRKTGVHDADFEAHIIDMLAKASKIEVYRGN

SEQ ID NO: 50051 - protein, 548 aa, Homo sapiens
MCEVVLGEFLKEIKKNPSSVKFAEMANILVIHCQTTDDLIQLTAMCWMREFIQLAGRVMLPYSSGILTAVLPCLAYDDRKKSIKEVANVCNQSLMKLVTPEDDELDELRPGQRQAEPTPDDALPKQEGTASGGPDGSCDSSFSSGISVFTAASTERAPVTLHLDGIVQVLNCHLSDTAIGMMTRIAVLKWLYHLYIKTPRKMFRHTDSLFPILLQTLSDESDEVILKDLEVLAEIASSPAGQTDDPGPLDGPDLQASHSELQVPTPGRAGLLNTSGTKGLECSPSTPTMNSYFYKFMINLLKRFSSERKLLEVRGPFIIRQLCLLLNAENIFHSMADILLREEDLKFASTMVHALNTILLTSTELFQLRNQLKDLKTLESQNLFCCLYRSWCHNPVTTVSLCFLTQNYRHAYDLIQKFGDLEVTVDFLAEVDKLVQLIECPIFTYLRLQLLDVKNNPYLIKALYGLLMLLPQSSAFQLLSHRLQCVPNPELLQTEDSLKAAPKSQKADSPSIDYAELLQHFEKVQNKHLEVRHQRSGRGDHLDRRVVL

SEQ ID NO: 50052 - protein, 203 aa, Homo sapiens
MHKLSVEAPPKILVERYLIEIAKNYNVPYEPDSVVMAEAPPGVETDLIDVGFTDDVKKGGPGRGGSGGFTAPVGGPDGTVPMPMPMPMPMPSANTPFSYPLPKGPSDFNGLPMGTYQAFPNIHPPQIPATPPSYESVSPGPKPEASAKLPSRPADNYDNFVLPELPSVPDTLPTASAGASTSASEDIDFDDLSRRFEELKKKT

SEQ ID NO: 50053 - protein, 60 aa, Homo sapiens
MKVDYGSPDHTKFVGSFKTKQDFIDLIEVIYRGAMRGKLIVQSPIDPKNIPKYDLLYQDI

SEQ ID NO: 50054 - protein, 131 aa, Homo sapiens
MQFHQHQKVWEVFQMSKGPGEDVDLFDMKQFKNSFKKILQRALKNVTVSFRETEENAVWIRIAWGTQYTKPNQYKPTYVVYYSQTPYAFTSSSMLRRNTPLLGQELEATGKIYLRQEEIILDITEMKKACN

SEQ ID NO: 50055 - protein, 266 aa, Homo sapiens
MQFHQHQKVWEVFQMSKGPGEDVDLFDMKQFKNSFKKILQRALKNVTVSFRETEENAVWIRIAWGTQYTKPNQYKPTYVVYYSQTPYAFTSSSMLRRNTPLLGQALTIASKHHQIVKMDLRSRYLDSLKAIVFKQYNQTFETHNSTTPLQERSLGLDINMDSRIIHENIVEKERVQRITQETFGDYPQPQLEFAQYKLETKFKSGLNGSILAEREEPLRCLIKFSSPHLLEALKSLAPAGIADAPLSPLLTCIPNKRMNYFKIRDK

SEQ ID NO: 50056 - protein, 266 aa, Homo sapiens
MDRFPFYHDNRQGWQNSIRHNLSLNDCFVKVPREKGRPGKGSYWTLDPRCLDMFENGNYRRRKRKPKPGPGAPEAKRPRAETHQRSAEAQPEAGSGAGGSGPAISRLQAAPAGPSPLLDGPSPPAPLHWPGTASPNEDAGDAAQGAAAVAVGQAARTGDGPGSPLRPASRSSPKSSDKSKSFSIDSILAGKQGQKPPSGDELLGGAKPGPGGRLGASLLAASSSLRPPFNASLMLDPHVQGGFYQLGIPFLSYFPLQVPDTVLHFQ

SEQ ID NO: 50057 - protein, 677 aa, Homo sapiens
MPSSLQTPQTQEQNGILDWLRKLRLHKYYPVFKQLSMEKFLSLTEEDLNKFESLTMGAKKKLKTQLELEKEKSERRCLNPSAPPLVTSSGVARVPPTSHVGPVQSGRGSHAAELRVEVEQPHHQLPREGSSSEYSSSSSSPMGVQAREESSDSAEENDRRVEIHLESSDKEKPVMLLNHFTSSSARPTAQVLPVQNEASSNPSGHHPLPPQMLSAASHITPIRMLNSVHKPERGSADMKLLSSSVHSLLSLEERNKGSGPRSSMKVDKSFGSAMMDVLPASAPHQPVQVLSGLSESSSMSPTVSFGPRTKVVHASTLDRVLKTAQQPALVVETSTAATGTPSTVLHAARPPIKLLLSSSVPADSAISGQTSCPNNVQISVPPAIINPRTALYTANTKVAFSAMSSMPVGPLQGGFCANSNTASPSSHPSTSFANMATLPSCPAPSSSPALSSVPESSFYSSSGGGGSTGNIPASNPNHHHHHHHQQPPAPPQPAPPPPGCIVCTSCGCSGSCGSSGLTVSYANYFQHPFSGPSVFTFPFLPFSPMCSSGYVSAQQYGGGSTFPVVHAPYSSSGTPDPVLSGQSTFAVPPMQNFMAGTAGVYQTQGLVGSSNGSSHKKSGNLSCYNCGATGHRAQDCKQPSMDFNRPGKRAPWPRPPGSRRTSAHKCLVFMKSKLLSL

SEQ ID NO: 50058 - protein, 45 aa, Homo sapiens [sequence omitted]

SEQ ID NO: 50059 - protein, 298 aa, Homo sapiens
MGYVRRDSHRLMVTALPPACQLVQVALGCFALRLECEILGEVLAQLGTSVLPAEELLQARRASGDVASCVAWLQQRLAQDEEPPPLPPRGSPAAYRAPLDLYRDLQEDEGSEDASLYGEPSPGPDSPPAELAYRPPLWEQSAKLWGTGGRAWEPPAEELPQASSPPYGALEEGLEPEPSAFSFLSLRRELSRPGDLATPESSAAASPRRIRAEGVPASAYRSVSEPPGYQAHSCLSPGALPTLCCDTCRQLHAAHCAALPACRPGHSLRVLLGDAQRRLWLQRAQMDTLLYNSPGARP

SEQ ID NO: 50060 - protein, 304 aa, Homo sapiens
MGTLLISKVREEYPDRIMNTFSVVPSPKVSDTVVEPYNATLSIHQLVENTDETYCIDNEALYDICFRTLKLATPTYGDLNHLVSATMSGVTTSLRFPGQLNADLRKLAVNMVPFPRLHFFMPGFAPLTARGSQQYRALTVPELTQQMFDAKNMMAACDPRHGRYLTVATVFRGRMSMKEVDEQMLAIQSKNSSYFVEWIPNNVKVAVCDIPPRGLKMSSTFIGNSTAIQELFKRISEQFTAMFRRKAFLHWYTGEGMDEMEFTEAESNMNDLVSEYQQYQDATAEEEGEMYEDDEEESEAQGPK

SEQ ID NO: 50061 - protein, 19 aa, Homo sapiens
MAILSLRAPGPWQAMQKEE

SEQ ID NO: 50062 - protein, 137 aa, Homo sapiens [sequence omitted]

SEQ ID NO: 50063 - protein, 98 aa, Homo sapiens
MEQLLSLWLEDQSQPNATLSAAIVQEKAEFDDLQREHGEGSQTERFHASQGWLVRFKECHCLPHFKMNSAAPSNKDMYTEMLKSIIEEGEYTPQVSLT

SEQ ID NO: 50064 - protein, 77 aa, Homo sapiens
MGQRGMSYAKNFAIVGAMFSCTECLIESYRGTSDWKNSVISGCITGGAIGFRAGLKAGAIGCGGFAAFSAAIDYYLR

SEQ ID NO: 50065 - protein, 495 aa, Homo sapiens [sequence omitted]

SEQ ID NO: 50066 - protein, 57 aa, Homo sapiens
MGWEGPNSRVDDTFWASWRAFAQIGPARSGFRLETLAGLRSRRLKQPKAFCLRDVAP

SEQ ID NO: 50067 - protein, 464 aa, Homo sapiens
MEPLGRQLTSGPNQEQVSPLTLLKLGNQEPGGQTALKSPPGVCSRDPTPEQTHRLARAMMAFTADLFSLVAQTSTCPNLILSPLSVALALSHLALGAQNHTLQRLQQVLHAGSGPCLPHLLSRLCQDLGPGAFRLAARMYLQKGFPIKEDFLEQSEQLFGAKPVSLTGKQEDDLANINQWVKEATEGKIQEFLSGLPEDTVLLLLNAIHFQGFWRNKFDPSLTQRDSFHLDEQFTVPVEMMQARTYPLRWFLLEQPEIQVAHFPFKNNMSFVVLVPTHFEWNVSQVLANLSWDTLHPPLVWERPTKVRLPKLYLKHQMDLVATLSQLGLQELFQAPDLRGISEQSLVVSGVQHQSTLELSEVGVEAAAATSIAMSRMSLSSFSVNRPFLFFIFEDTTGLPLFVGSVRNPNPSAPRELKEQQDSPGNKDFLQSLKGFPRGDKLFGPDLKLVPPMEEDYPQFGSPK

SEQ ID NO: 50068 - protein, 700 aa, Homo sapiens
MSLCHANRSAALFHLGQYETCLKDINRAQTHGYPERLQPKIMLRKAECLVALGRLQEASQTISDLERNFTATPALADVLPQTLQRNLHRLKMKMQEKDSLTESFPAALAKTLEDAALREENEQLSNASSSIGLCVDPLKGRCLVATKDILPGELLVQEDAFVSVLNPGELPPPHHGLDSKWDTRVTNGDLYCHRCLKHTLATVPCDGCSYAKYCSQECLQQAWELYHRTECPLGGLLLTLGVFCHIALRLTLLVGFEDVRKIITKLCDKISNKDICLPESNNQVKTLNYGLGESEKNGNIVETPIPGCDINGKYENNYNAVFNLLPHTENHSPEHKFLCALCVSALCRQLEAASLQAIPTERIVNSSQLKAAVTPELCPDVTIWGVAMLRHMLQLQCNAQAMTTIQHTGPKGSIVTDSRQVRLATGIFPVISLLNHSCSPNTSVSFISTVATIRASQRIRKGQEILHCYGPHKSRMGVAERQQKLRSQYFFDCACPACQTEAHRMAAGPRWEAFCCNSCGAPMQGDDVLRCGSRSCAESAVSRDHLVSRLQDLQQQVRVAQKLLRDGELERAVQRLSGCQRDAESFLWAEHAVVGEIADGLARACAALGDWQKSATHLQRSLYVVEVRHGPSSVEMGHELFKLAQIFFNGFAVPEALSTIQKAEEVLSLHCGPWDDEIQELQKMKSCLLDLPPTPVGPAL

SEQ ID NO: 50069 - protein, 33 aa, Homo sapiens
MGDVTYGACCVDDFTARALGADFLVHYGHSCLS

SEQ ID NO: 50070 - protein, 292 aa, Homo sapiens
MCPRIRFLVIRSSAISIINQVIGWIYFVAWSISFYPQVIMNWRRKSVIGLSFDFVALNLTGFVAYSVFNIGLLWVPYIKEQFLLKYPNGVNPVNSNDVFFSLHAVVLTLIIIVQCCLYERGGQRVSWPAIGFLVLAWLFAFVTMIVAAVGVTTWLQFLFCFSYIKLAVTLVKYFPQAYMNFYYKSTEGWSIGNVLLDFTGGSFSLLQMFLQSYNNDQWTLIFGDPTKFGLGVFSIVFDVVFFIQHFCLYRKRPGLQAARTGSGSRLRQDWAPSLQPKALPQTTSVSASSLKG

SEQ ID NO: 50071 - protein, 123 aa, Homo sapiens
MTATRALINMSSLPAQDKIRSRDASEDKSAEKRKKDKQEDSSDDDEAEEGEVEDENSSDVELDTLSQVEEESLLRNDLRPANKLAKGNRLFMRFATKGKCNIWYCFIFSIKMIYYGVTSFFFE

SEQ ID NO: 50072 - protein, 533 aa, Homo sapiens
MFSQSSHLVPHQRIHTGEKPLKCNECEKAFRQHSHLTEHQRLHSGEKPYECHRCGKTFSGRTAFLKHQRLHAGEKIEECEKTFSKDEELREEQRIHQEEKAYWCNQCGRNFQGTSDLIRHQVTHTGEKPYECKECGKTFNQSSDLLRHHRIHSGEKPCVCSKCGKSFRGSSDLIRHHRVHTGEKPYECSECGKAFSQRSHLVTHQKIHTGEKPYQCTECGKAFRRRSLLIQHRRIHSGEKPYECKECGKLFIWRTAFLKHQSLHTGEKLECEKTFSQDEELRGEQKIHQEAKAYWCNQCGRAFQGSSDLIRHQVTHTREKPYECKECGKTFNQSSDLLRHHRIHSGEKPYVCNKCGKSFRGSSDLIKHHRIHTGEKPYECSECGKAFSQRSHLATHQKIHTGEKPYQCSECGNAFRRRSLLIQHRRLHSGEKPYECKECGKLFMWHTAFLKHQRLHAGEKLEECEKTFSKDEELRKEQRTHQEKKVYWCNQCSRTFQGSSDLIRHQVTHTREKPYECKECGKTQSELRPSETS

SEQ ID NO: 50073 - protein, 241 aa, Homo sapiens
MCQQSMQKSSLEFHKANECQERPVECKFCKLDMQLSKLELHESYCGSRTELCQGCGQFIMHRMLAQHRDVCRSEQAQLGKGERISAPEREIYCHYCNQMIPENKYFHHMGKCCPDSEFKKHFPVGNPEILPSSLPSQAAENQTSTMEKDVRPKTRSINRFPLHSESSSKKAPRSKNKTLDPLLMSEPKPRTSSPRGDKAAYDILRRCSQCGILLPLPILNQHQEKCRWLASSKGKQVRNFS

SEQ ID NO: 50074 - protein, 126 aa, Homo sapiens
MEVQAPPGTTIGHVLQTWHPFLPKFSIQDADRQTVLRVVGPCWTCGCGTDTNFEVKTRDESRSVGRISKQWGGLVREALTDADDFGLQFPLDLDVRVKAVLLGATFLIDYMFFEKRGGAGPSAVTS

SEQ ID NO: 50075 - protein, 481 aa, Homo sapiens
MRAFRMLLYSKSTSLTFHWKLWGRHRGRRRGLAHPKNHLSPQQGGATPQVPSPCCRFDSPRGPPPPRLGLLGALMAEDGVRGSPPVPSGPPMEEDGLRWTPKSPLDPDSGLLSCTLPNGFGGQSGPEGERSLAPPDASILISNVCSIGDHVAQELFQGSDLGMAEEAERPGEKAGQHSPLREEHVTCVQSILDEFLQTYGSLIPLSTDEVVEKLEDIFQQEFSTPSRKGLVLQLIQSYQRMPGNAMVRGFRVAYKRHVLTMDDLGTLYGQNWLNDQVMNMYGDLVMDTVPEKVHFFNSFFYDKLRTKGYDGVKRWTKNVDIFNKELLLIPIHLEVHWSLISVDVRRRTITYFDSQRTLNRRCPKHIAKYLQAEAVKKDRLDFHQGWKGYFKMNVARQNNDSDCGAFVLQYCKHLALSQPFSFTQQDMPKLRRQIYKELCHCKLTVQGNPPIPTISLLIPSSLAHVQAVSNPSLLQGKTNNI

SEQ ID NO: 50076 - protein, 22 aa, Homo sapiens
MMIILGVICAIILIIIIVYFST

SEQ ID NO: 50077 - protein, 281 aa, Homo sapiens [sequence omitted]

SEQ ID NO: 50078 - protein, 148 aa, Homo sapiens
MAAFFALAALVQVNDPDAEVWVVVYTIPAVLTLLVGLNPEVTGNVIWKSISAIHILFCTVWAVGLASYLLHRTQQNILHEEEGRELSGLVIITAWIILCHSSSKNPVGGRIQLAIAIVITLFPFISWVYIYINKEMRSSWPTHCKTVI

SEQ ID NO: 50079 - protein, 138 aa, Homo sapiens
MAAFFALAALVQVVYTIPAVLTLLVGLNPEVTGNVIWKSISAIHILFCTVWAVGLASYLLHRTQQNILHEEEGRELSGLVIITAWIILCHSSSKNPVGGRIQLAIAIVITLFPFISWVYIYINKEMRSSWPTHCKTVI

SEQ ID NO: 50080 - protein, 26 aa, Homo sapiens
MRTCQQLSVSDKQLTDILLMEKKQEA

SEQ ID NO: 50081 - protein, 119 aa, Homo sapiens
MESLDTPAAYSLGLALLGLGVVLVLSSFFALGFAGTFLGDYFGILKEARVTVFPFNILDNPMYWGSTANYLGWAIMHASPTGLLLTVLVALTYIVALLYEEPFTAEIYRQKASGSHKRS

SEQ ID NO: 50082 - protein, 116 aa, Homo sapiens
MESLDTPAAYSLGLALLGLGVVLVLSSFFALGFAGTFLGDYFGILKEARVTVFPFNILDNPMYWGSTANYLGWAIISPAPAGAVGSEARQPHGPAPDGAGGPHLHSGSPIRRALHR

SEQ ID NO: 50083 - protein, 263 aa, Homo sapiens [sequence omitted]

SEQ ID NO: 50084 - protein, 402 aa, Homo sapiens
MAALCRTAESQAELQCTQLDLERKLKLNENAISRLQANQKSVLVSVSEVKAVAEMQFGELLAAVRKAQANVMLFLEEKEQAALSQANGIKAHLEYRSAEMEKSKQELETMAAISNTVQFLEEYCKFKNTEDITFPSVYIGLKDKLSGIRKVITESTVHLIQLLENYKKKLQEFSKEEEYDIRTQVSAIVQRKYWTSKPEPSTREQFLQYVHDITFDPDTAHKYLRLQEENRKVTNTTPWEHPYPDLPSRFLHWRQVLSQQSLYLHRYYFEVEIFGAGTYVGLTCKGIDQKGEERSSCISGNNFSWSLQWNGKEFTAWYSDMETPLKAGPFWRLGVYIDFPGGILSFYGVEYDSMTLVHKFACKFSEPVYAAFWLSKKENAIRIVDLGEEPEKPAPSLVGTAP

SEQ ID NO: 50085 - protein, 139 aa, Homo sapiens
MVTIILLLSCDFWAVKNVTGRLMVGLRWWNHIDEDGKSHWVFESRKESSQENKTVSEAESRIFWLGLIACPVLWVIFAFSALFSFRVKWLAVVIMGVVLQGANLYGYIRCKVRSRKHLTSMATSYFGKQFLRQVSVFWM

SEQ ID NO: 50086 - protein, 357 aa, Homo sapiens
MNITKGGLVLFSANSNSSCMELSKKIAERLGVEMGKVQVYQEPNRETRVQIQESVRGKDVFIIQTVSKDVNTTIMELLIMVYACKTSCAKSIIGVIPYFPYSKQCKMRKRGSIVSKLLASMMCKAGLTHLITMDLHQKEIQGFFNIPVDNLRASPFLLQYIQEEIPDYRNAVIVAKSPASAKRAQSFAERLRLGIAVIHGEAQDAESDLVDGRHSPPMVRSVAAIHPSLEIPMLIPKEKPPITVVGDVGGRIAIIVDDIIDDVDSFLAAAETLKERGAYKIFVMATHGLLSSDAPRRIEESAIDEVVVTNTIPHEVQKLQCPKIKTVDISMILSEAIRRIHNGESMSYLFRNIGLDD

SEQ ID NO: 50087 - protein, 308 aa, Homo sapiens
MNITKGGLVLFSANSNSSCMELSKKIAERLGVEMGKVQVYQEPNRETRVQIQESVRGKDVFIIQTVSKDVNTTIMELLIMVYACKTSCAKSIIGVIPYFPYSKQCKMRKRGSIVSKLLASMMCKAGLTHLITMDLHQKEIQGFFNIPVDNLRASPFLLQYIQEEIPDYRNAVIVAKSPASAKRAQSFAERLRLGIAVIHGEAQDAESDLVDGRHSPPMVRSVAAIHPSLEIPMLIPKEKPPITVVGDVGGRIAIIVVVVTNTIPHEVQKLQCPKIKTVDISMILSEAIRRIHNGESMSYLFRNIGLDD

SEQ ID NO: 50088 - protein, 399 aa, Homo sapiens
MLQVKYLLNQGIVLPQIVTGVAANLVNALANYLFLHQLHLGVIGSALANLISQYTLALLLFLYILGKKLHQATWGGWSLECLQDWASFLRLAIPSMLMLCMEWWAYEVGSFLSGILGMVELGAQSIVYELAIIVYMVPAGFSVAASVRVGNALGAGDMEQARKSSTVSLLITVLFAVAFSVLLLSCKDHVGYIFTTDRDIINLVAQVVPIYAVSHLFEALACTSGGVLRGSGNQKVGAIVNTIGYYVVGLPIGIALMFATTLGVMGLWSGIIICTVFQAVCFLGFIIQLNWKKACQQAQVHANLKVNNVPRSGNSALPQDPLHPGCPENLEGILTNDVGKTGEPQSDQQMRQEEPLPEHPQDGAKLSRKQLVLRRGLLLLGVFLILLVGILVRFYVRIQ

SEQ ID NO: 50089 - protein, 415 aa, Homo sapiens
MLQVKYLLNQGIVLPQIVTGVAANLVNALANYLFLHQLHLGVIGSALANLISQYTLALLLFLYILGKKLHQATWGGWSLECLQDWASFLRLAIPSMLMLCMEWWAYEVGSFLSGILGMVELGAQSIVYELAIIVYMVPAGFSVAASVRVGNALGAGDMEQARKSSTVSLLITVLFAVAFSVLLLSCKDHVGYIFTTDRDIINLVAQVVPIYAVSHLFEALACTSGGVLRGSGNQKVGAIVNTIGYYVVGLPIGIALMFATTLGVMGLWSGIIICTVFQAVCFLGFIIQLNWKKACQQAQVHANLKVNNVPRSGNSALPQDPLHPGCPENLEGILTNDVGKTGEPQSDQQMRQEEPLPEHPQDGAKLSRKQLVLRRGLLLLGVFLILLAGVRWCDHSSLQPRTLGLQAILLCQPPE

SEQ ID NO: 50090 - protein, 582 aa, Homo sapiens
MSFFRRKVKGKEQEKTSDVKSIKASISVHSPQKSTKNHALLEAAGPSHVAINAISANMDSFSSSRTATLKKQPSHMEAAHFGDLGRSCLDYQTQETKSSLSKTLEQVLHDTIVLPYFIQFMELRRMEHLVKFWLEAESFHSTTWSRIRAHSLNTVKQSSLAEPVSPSKKHETTASFLTDSLDKRLEDSGSAQLFMTHSEGIDLNNRTNSTQNHLLLSQECDSAHSLRLEMARAGTHQVSMETQESSSTLTVASRNSPASPLKELSGKLMKSIEQDAVNTFTKYISPDAAKPIPITEAMRNDIIARICGEDGQVDPNCFVLAQSIVFSAMEQEHFSEFLRSHHFCKYQIEVLTSGTVYLADILFCESALFYFSEYMEKEDAVNILQFWLAADNFQSQLAAKKGQYDGQEAQNDAMILYDKYFSLQATHPLGFDDVVRLEIESNICREGGPLPNCFTTPLRQAWTTMEKSSVKKASIKILKNFDEAIIVDAASLDPESLYQRTYAGKMTFGRVSDLGQFIRESEPEPDVRKSKGSMFSQAMKKWVQGNTDEAQEELAWKIAKMIVSDIMQQAQYDQPLEKSTKL

SEQ ID NO: 50091 - protein, 110 aa, Homo sapiens
MTSCTSWLQAPQAPGLCRDEQSSRISVPQLSGAPILLPDLEGTKLSNFQESSPLPHKHERKDKRSTPEEEGRSAPEKIIQSLKLCPGHHSPLIHLGFPHKAAGLPMNEHG

SEQ ID NO: 50092 - protein, 128 aa, Homo sapiens
MTSCTSWLQAPQAPGLCRDEQSSRISVPQLSGAPILLPDLEGTKLSNFQESSPLPHKHERKDKRSTPEEEGRSAPEKIIQSLKLCPGGHRPASLSSGCPAGCRLSFNLPPSMLLSVQKCCMPSSLKTC

SEQ ID NO: 50093 - protein, 346 aa, Homo sapiens [sequence omitted]

SEQ ID NO: 50094 - protein, 536 aa, Homo sapiens
MDKKNGKSYENKSGENQSVDKSDTIPIPNGVVTNNSGYITNGYMGKGADNDGSGSESGYTTPKKRKARRNSAKGCENLNIVQDKIMQQETSVPTLKQGLETFKPDYSEQKGNRVDGSKPIWKYETGPGGTSRGKPAVGDMLRKSSDSKPGVSSKKFDDRPKGKHASAVASKEDSWTLFKPPPVFPVDNSSAKIVPKISYASKVKENLNKTIQNSSVSPTSSSSSSSSTGETQTQSSSRLSQVPMSALKSVTSANFSNGPVLAGTDGNVYPPGGQPLLTTAANTLTPISSGTDSVLQDMSLTSAAVEQIKTSLFIYPSNMQTMLLSTAQVDLPSQTDQQNLGDIFQNQWGLSFINEPSAGPETVTGKSSEHKVMEVTFQGEYPATLVSQGAEIIPSGTEHPVFPKAYELEKRTSPQVLGSILKSGTTSESGALSLEPSHIGDLQKADTSSQGALVFLSKDYEIESQNPLASPTNTLLGSAKEQRYQRGLERNDSWGSFDLRAAIVYHTKEMESIWNLQKQDPKRIITYNEAMDSPDQ

SEQ ID NO: 50095 - protein, 1741 aa, Homo sapiens [sequence omitted]

SEQ ID NO: 50096 - protein, 408 aa, Homo sapiens [sequence omitted]

SEQ ID NO: 50097 - protein, 19 aa, Homo sapiens
MSQEIVYRTWLSYSLHAGT

SEQ ID NO: 50098 - protein, 397 aa, Homo sapiens
MEGIPEKDMDERRRLLEQKTQESQKKKQQDDSDEYDDDDSAASTSFQPQPVQPQQGYIPPMAQPGLPPVPGAPGMPPGIPPLMPGVPPLMPGMPPVMPGMPPGMMPMGGMMPPGPGIPPLMPGMPPGMPPPVPRPGIPPMTQAQAVSAPGILNRPPAPTATVPAPQPPVTKPLFPSAGQMGTPVTSSSTASSNSESLSASSKALFPSTAQAQAAVQGPVGTDFKPLNSTPATTTEPPKPTFPAYTQSTASTTSTTNSTAAKPAASITSKPATLTTTSATSKLIHPDEDISLEERRAQLPKYQRNLPRPGQAPIGNPPVGPIGGMMPPQPGIPQQQGMRPPMPPHGQYGGHHQGMPGYLPGAMPPYGQGPPMVPPYQGGPPRPPMGMRPPVMSQGGRY

SEQ ID NO: 50099 - protein, 413 aa, Homo sapiens
MEGIPEKDMDERRRLLEQKTQESQKKKQQDDSDEYDDDDSAASTSFQPQPVQPQQGYIPPMAQPGLPPVPGAPGMPPGIPPLMPGVPPLMPGMPPVMPGMPPGLHHQRKYTQSFCGENIMMPMGGMMPPGPGIPPLMPGMPPGMPPPVPRPGIPPMTQAQAVSAPGILNRPPAPTATVPAPQPPVTKPLFPSAGQMGTPVTSSSTASSNSESLSASSKALFPSTAQAQAAVQGPVGTDFKPLNSTPATTTEPPKPTFPAYTQSTASTTSTTNSTAAKPAASITSKPATLTTTSATSKLIHPDEDISLEERRAQLPKYQRNLPRPGQAPIGNPPVGPIGGMMPPQPGIPQQQGMRPPMPPHGQYGGHHQGMPGYLPGAMPPYGQGPPMVPPYQGGPPRPPMGMRPPVMSQGGRY

SEQ ID NO: 50100 - protein, 382 aa, Homo sapiens
MEGIPEKDMDERRRLLEQKTQESQKKKQQDDSDEYDDDDSAASTSFQPQPVQPQQGYIPPMAQPGLPPVPGAPGMPPGIPPLMPGVPPLMPGMPPVMPGMPPGLHHQRKYTQSFCGENIMMPMGGMMPPGPGIPPLMPGMPPGMPPPVPRPGIPPMTQAQAVSAPGILNRPPAPTATVPAPQPPVTKPLFPSAGQAQAAVQGPVGTDFKPLNSTPATTTEPPKPTFPAYTQSTASTTSTTNSTAAKPAASITSKPATLTTTSATSKLIHPDEDISLEERRAQLPKYQRNLPRPGQAPIGNPPVGPIGGMMPPQPGIPQQQGMRPPMPPHGQYGGHHQGMPGYLPGAMPPYGQGPPMVPPYQGGPPRPPMGMRPPVMSQGGRY

SEQ ID NO: 50101 - protein, 388 aa, Homo sapiens
MKRKILLDVARTSLQTKVHAELADVLTEVVVDSVLAVRRPGYPIDLFMVEIMEMKHKLGTDTKLIQGLVLDHGARHPDMKKRVEDAFILICNVSLEYEKTEVNSGFFYKTAEEKEKLVKAERKFIEDRVQKIIDLKDKVCAQSNKGFVVINQKGIDPFSLDSLAKHGIVALRRAKRRNMERLSLACGGMAVNSFEDLTVDCLGHAGLVYEYTLGEEKFTFIEECVNPCSVTLLVKGPNKHTLTQVKDAIRDGLRAIKNAIEDGCMVPGAGAIEVAMAEALVTYKNSIKGRARLGVQAFADALLIIPKVLAQNAGYDPQETLVKVQAEHVESKQLVGVDLNTGEPMVAADAGVWDNYCVKKQLLHSCTVIATNILLVDEIMRAGMSSLK

SEQ ID NO: 50102 - protein, 201 aa, Homo sapiens
MIQLLRSHRIKTVVDLVSADLEEVAQKCGLSYKAEALRRIQVVHAFDIFQMLDVLQELRGTVAQQVTGSSGTVKVVVVDSVTAVVSPLLGGQQREGLALMMQLARELKTLARDLGMAVVVTNHITRDRDSGRLKPALGRSWSFVPSTRILLDTIEGAGASGGRRMACLAKSSRQPTGFQEMVDIGTWGTSEQSATLQGDQT

SEQ ID NO: 50103 - protein, 209 aa, Homo sapiens
MAANVAHGLQQNVLYVDSNGGLTASRLLQLLQAKTQDEEEQAEALRRIQVVHAFDIFQMLDVLQELRGTVAQQVTGSSGTVKVVVVDSVTAVVSPLLGGQQREGLALMMQLARELKTLARDLGMAVVVTNHITRDRDSGRLKPALGRSWSFVPSTRILLDTIEGAGASGGRRMACLAKSSRQPTGFQEMVDIGTWGTSEQSATLQGDQT

SEQ ID NO: 50104 - protein, 323 aa, Homo sapiens
MINLYTDKDTGKPKGEATVSFDDPPSAKAAIDWFDGKEFHGNIIKVSFATRRPEFMRGGGSGGGRRGRGGYRGRGGFQGRGGDPKSGDWVCPNPSCGNMNFARRNSCNQCNEPRPEDSRPSGGDFRGRGYGGERGYRGRGGRGGDRGGYGGDRSGGGYGGDRSSGGGYSGDRSGGGYGGDRSGGGYGGDRGGGYGGDRGGGYGGDRGGGYGGDRGGYGGDRGGGYGGDRGGYGGDRGGYGGDRGGYGGDRGGYGGDRSRGGYGGDRGGGSGYGGDRSGGYGGDRSGGGYGGDRGGGYGGDRGGYGGKMGGRNDYRNDQRNRPY

SEQ ID NO: 50105 - protein, 911 aa, Homo sapiens
MADTFYTNAGCTLVALNPFKPVPQLYSPELMREYHAAPQPQKLKPHVFTVGEQTYRNVKSLIEPVNQSIVVSGESGAGKTWTSRCLMKFYAVVATSPASWESHKIAERIEQRILNSNPVMEAFGNACTLRNNNSSRFGKFIQLQLNRAQQMTGAAVQTYLLEKTRVACQASSERNFHIFYQICKGASEDERLQWHLPEGAAFSWLPNPERSLEEDCFEVTREAMLHLGIDTPTQNNIFKVLAGLLHLGNIQFAASEDEAQPCQPMDDAKYSVRTAASLLGLPEDVLLEMVQIRTIRAGRQQQVFRKPCARAECDTRRDCLAKLIYARLFDWLVSVINSSICADTDSWTTFIGLLDVYGFESFPDNSLEQLCINYANEKLQQHFVAHYLRAQQEEYAVEGLEWSFINYQDNQPCLDLIEGSPISICSLINEECRLNRPSSAAQLQTRIETALAGSPCLGHNKLSREPSFIVVHYAGPVRYHTAGLVEKNKDPIPPELTRLLQQSQDPLLMGLFPTNPKEKTQEEPPGQSRAPVLTVVSKFKASLEQLLQVLHSTTPHYIRCIKPNSQGQAQTFLQEEVLSQLEACGLVETIHISAAGFPIRVSHRNFVERYKLLRRLHPCTSSGPDSPYPAKGLPEWCPHSEEATLEPLIQDILHTLPVLTQAAAITGDSAEAMPAPMHCGRTKVFMTDSMLELLECGRARVLEQCARCIQGGWRRHRHREQERQWRAVMLIQAAIRSWLTRKHIQRLHAAATVIKRAWQKWRIRMACLAAKELDGVEEKHFSQAPCSLSTSPLQTRLLEAIIRLWPLGLVLANTAMGVGSFQRKLVVWACLQLPRGSPSSYTVQTAQDQAGVTSIRALPQGSIKFHCRKSPLRYADICPEPSPYSITGFNQILLERHRLIHVTSSAFTGLG

SEQ ID NO: 50106 - protein, 64 aa, Homo sapiens [sequence omitted]

SEQ ID NO: 50107 - protein, 77 aa, Homo sapiens
MDEPSPLAQPLELNQHSRFIIGSVSEDNSEDEISNLVKLDLLEEKEGSLSPASVGSDTLSDLGISSLQDGLALHIRL

SEQ ID NO: 50108 - protein, 419 aa, Homo sapiens
MEPYIKCAECGPPPFFLCLQCFTRGFEYKKHQSDHTYEIMTSDFPVLDPSWTAQEEMALLEAVMDCGFGNWQDVANQMCTKTKEECEKHYMKHFINNPLFASTLLNLKQAEEAKTADTAIPFHSTDDPPRPTFDSLLSRDMAGYMPARADFIEEFDNYAEWDLRDIDFVEDDSDILHALKMAVVDIYHSRLKERQRRKKIIRDHGLINLRKFQLMERRYPKEVQDLYETMRRFARIVGPVEHDKFIESHALEFELRREIKRLQEYRTAGITNFCSARTYDHLKKTREEERLKRTMLSEVLQYIQDSSACQQWLRRQADIDSGLSPSIPMASNSGRRSAPPLNLTGLPGTEKLNEKEKELCQMVRLVPGAYLEYKSALLNECNKQGGLRLAQARALIKIDVNKTRKIYDFLIREGYITKG

SEQ ID NO: 50109 - protein, 713 aa, Homo sapiens
MTPTGIDTAKLYPILMSSGLPRETLGQIWALANRTTPGKLTKEELYTVLAMIAVTQRGVPAMSPDALNQFPAAPIPTLSGFSMTLPTPVSQPTVIPSGPAGSMPLSLGQPVMGINLVGPVGGAAAQASSGFIPTYPANQVVKPEEDDFQDFQDASKSGSLDDSFSDFQELPASSKTSNSQHGNSAPSLLMPLPGTKALPSMDKYAVFKGIAADKSSENTVPPGDPGDKYSAFRELEQTAENKPLGESFAEFRSAGTDDGFTDFKTADSVSPLEPPTKDKTFPPSFPSGTIQQKQQTQVKNPLNLADLDMFSSVNCSSEKPLSFSAVFSTSKSVSTPQSTGSAATMTALAATKTSSLADDFGEFSLFGEYSGLAPVGEQDDFADFMAFSNSSISSEQKPDDKYDALKEEASPVPLTSNVGSTVKGGQNSTAASTKYDVFRQLSLEGSGLGVEDLKDNTPSGKSDDDFADFHSSKFSSINSDKSLGEKAVAFRHTKEDSASVKSLDLPSIGGSSVGKEDSEDALSVQFDMKLADVGGDLKHVMSDSSLDLPTVSGQHPPAAGSGSPSATSILQKKETSFGSSENITMTSLSKVTTFVSEDALPETTFPALASFKDTIPQTSEQKEYENRDYKDFTKQDLPTAERSQEATCPSPASSGASQETPNECSDDFGEFQSEKPKISKFDFLVATSQSKMKSSEEMIKSELATFDLSVQGE

SEQ ID NO: 50110 - protein, 50 aa, Homo sapiens
MKKIKELLQMSLEKKEKKKKKEKKKKHKKHKHRSSSSDRSSSEDEHSAGR

SEQ ID NO: 50111 - protein, 274 aa, Homo sapiens [sequence omitted]

SEQ ID NO: 50112 - protein, 352 aa, Homo sapiens
MEEMSLSGLDNSKLEAIAQEIYADLVEDSCLGFCFEVHRAVKCGYFFLDDTDPDSMKDFEIVDQPGLDIFGQVFNQWKSKECVCPNCSRSIAASRFAPHLEKCLGMGRNSSRIANRRIANSNNMNKSESDQEDNDDINDNDWSYGSEKKAKKRKSDKLWYLPFQNPNSPRRSKSLKHKNGELSNSDPFKYNNSTGISYETLGPEELRSLLTTQCGVISEHTKKMCTRSLRCPQHTDEQRRTVRIYFLGPSAVLPEVESSLDNDSFDMTDSQALISRLQWDGSSDLSPSDSGSSKTSENQGWGLGTNSSESRKTKKKKSHLSLVGTASGLGSNKKKKPKPPAPPTPSIYDDIN

SEQ ID NO: 50113 - protein, 198 aa, Homo sapiens
MARHVVQPGYPAHRRIVEVFGTEVLLENGDINRKVLGDLIFNQPDRRQLLNAITHPEIRKEMMKETFKYFLRGYRYVILDIPLLFETKKLLKYMKHTVVVYCDRDTQLARLMRRNSLNRKDAEARINAQLPLTDKARMARHVLDNSGEWSVTKRQVILLHTELERSLEYLPLRFGVLTGLAAIASLLYLLTHYLLPYA

SEQ ID NO: 50114 - protein, 99 aa, Homo sapiens
MARHVVQPGYPAHRRIVEVFGTEVLLENGDINRKVLGDLIFNQPDRRQLLNAITHPEIRKEMMKETFKYFLREPRTSPRGKKHVPSALKEADSLMRRDT

SEQ ID NO: 50115 - protein, 1055 aa, Homo sapiens
MNLPPDKVQLLSQYDNEKKWELICDQERFQVKNPPAAYIQKLKSYVDTGGVSRKVAADWMSNLGFKRRVQESTQVLRELETSLRTNHIGWVQEFLNEENRGLDVLLEYLAFAQCSVTYDMESTDNGASNSEKNKPLEQSVEDLSKGPPSSVPKSRHLTIKLTPAHSRKALRNSRIVSQKDDVHVCIMCLRAIMNYQSGFSLVMNHPACVNEIALSLNNKNPRTKALVLELLAAVCLVRGGHDIILAAFDNFKEVCGEQHRFEKLMEYFRNEDSNIDFMVACMQFINIVVHSVENMNFRVFLQYEFTHLGLDLYLERLRLTESDKLQVQIQAYLDNIFDVGALLEDTETKNAVLEHMEELQEQVALLTERLRDAENESMAKIAELEKQLSQARKELETLRERFSESTAMGPSRRPPEPEKAPPAAPTRPSALELKVEELEEKGLIRILRGPGDAVSIEILPVAVATPSGGDAPTPGVPTGSPSPDLAPAAEPAPGAAPPPPPPLPGLPSPQEAPPSAPPQAPPLPGSPEPPPAPPLPGDLPPPPPPPPPPPGTDGPVPPPPPPPPPPPGGPPDALGRRDSELGPGVKAKKPIQTKFRMPLLNWVALKPSQITGTVFTELNDEKVLQELDMSDFEEQFKTKSQGPSLDLSALKSKAAQKAPSKATLIEANRAKNLAITLRKGNLGAERICQAIEAYDLQALGLDFLELLMRFLPTEYERSLITRFEREQRPMEELSEEDRFMLCFSRIPRLPERMTTLTFLGNFPDTAQLLMPQLNAIIAASMSIKSSDKLRQILEIVLAFGNYMNSSKRGAAYGFRLQSLDALLEMKSTDRKQTLLHYLVKVIAEKYPQLTGFHSDLHFLDKAGSVSLDSVLADVRSLQRGLELTQREFVRQDDCMVLKEFLRANSPTMDKLLADSKTAQEAFESVVEYFGENPKTTSPGLFFSLFSRFIKAYKKAEQEVEQWKKEAAAQEAGADTPGKGEPPAPKSPPKARRPQMDLISELKRRQQKEPLIYESDRDGAIEDIITVIKTVPFTARTGKRTSRLLCEASLGEEMPL

SEQ ID NO: 50116 - protein, 1007 aa, Homo sapiens
MCSALEAVFIHGLHAKHIRAEAGGKRKKSAHQKPLPQPVFWPLLKAVTHKHIISELEHLTFVNTDVGRCRAWLRLALNDGLMECYLKLLLQEQARLHEYYQPTALLRDAEEGEFLLSFLQGLTSLSFELSYKSAILNEWTLTPLALSGLCPLSELDPLSTSGAELQRKESLDSISHSSGSEDIEVHHSGHKIRRNQKLTASSLSLDTASSSQLSCSLNSDSCLLQENGSKSPDHCEEPMSCDSDLGTANAEDSDRSLQEVLLEFSKAQVNSVPTNGLSQETEIPTPQASLSLHGLNTSTYLHCEAPAEPLPAQAASGTQDGVHVQEPRPQAPSPLDLQQPVESTSGQQPSSTVSETAREVGQGNGLQKAQAHDGAGLKLVVSSPTSPKNKSWISEDDFYRPSREQPLESASDHPIASYRGTPGSRPGLHRHFSQEPRKNCSLGALDQACVPSPGRRQAQAAPSQGHKSFRVVHRRQMGLSNPFRGLMKLGTVERRGAMGIWKELFCELSPLEFRLYLSNEEHTCVENCSLLRCESVGPAHSDGRFELVFSGKKLALRASSQDEAEDWLDRVREALQKVRPQQEDEWVNVQYPDQPEEPPEAPQGCLSPSDLLSEPAALQGTQFDWSSAQVPEPDAIKESLLYLYMDRTWMPYIFSLSLEALKCFRIRNNEKMLSDSHGVETIRDILPDTSLGGPSFFKIITAKAVLKLQAGNAEEAALWRDLVRKVLASYLETAEEAVTLGGSLDENCQEVLKFATRENGFLLQYLVAIPMEKGLDSQGCFCAGCSRQIGFSFVRPKLCAFSGLYYCDICHQDDASVIPARIIHNWDLTKRPICRQALKFLTQIRAQPLINLQMVNASLYEHVERMHLIGRRREQLKLLGDYLGLCRSGALKELSKRLNHRNYLLESPHRFSVADLQQIADGVYEGFLKALIEFASQHVYHCDLCTQRGFICQICQHHDIIFPFEFDTTVRCAECKTVFHQSCQAVVKKGCPRCARRRKYQEQNIFA

SEQ ID NO: 50117 - protein, 965 aa, Homo sapiens [sequence omitted]

SEQ ID NO: 50118 - protein, 547 aa, Homo sapiens
MNTSGQTALPQAPVNGLAKKLTKSSTHSDHDNSTSLNGGKRALTSSALHGGEMGGSESGDLKGGMTNCTLPHRSLDVEHTTLYSNNSTANKSSVNSMEQPALQGSSRLSPGTDSSSNLGGVKLEGKKSPLSSILFSALDSDTRITALLRRQADIESRARRLQKRLQVVQAKQVERHIQHQLGGFLEKTLSKLPNLESLRPRSQLMLTRKAEAALRKAASETTTSEGLSNFLKSNSISEELERFTASGIANLRCSEQAFDSDVTDSSSGGESDIEEEELTRADPEQRHVPLRRRSEWKWAADRAAIVSRWNWLQAHVSDLEYRIRQQTDIYKQIRANKGLIVLGEVPPPEHTTDLFLPLSSEVKTDHGTDKLIESVSQPLENHGAPIIGHISESLSTKSCGALRPVNGVINTLQPVLADHIPGDSSDAEEQLHKKQRLNLVSSSSDGTCVAARTRPVLSCKKRRLVRPNSIVPLSKKVHRNSTIRPGCDVNPSCALCGSGSINTMPPEIHYEAPLLERLSQLDSCVHPVLAFPDGKKDHRLESLMKET

SEQ ID NO: 50119 - protein, 23 aa, Homo sapiens
MVVHACRPLAAAIILTIRILLIY

SEQ ID NO: 50120 - protein, 230 aa, Homo sapiens [sequence omitted]

SEQ ID NO: 50121 - protein, 110 aa, Homo sapiens
MVFEKNVFNKTSRTESEIAFFGGMTIVYKNSIDLFLYVVGSSYENELMLMSVLTCLFESLNHMLSVILESDPQQVIQKVNFRADDGGLTEQSVAQVLQSAKEQIKWSLLK

SEQ ID NO: 50122 - protein, 136 aa, Homo sapiens
MVFEKNVFNKTSRTESEIAFFGGMTIVYKNSIDLFLYVVGSSYENELMLMSVLTCLFESLNHMLRKNVEKRWLLENMDGAFLVLDEIVDGGVILESDPQQVIQKVNFRADDGGLTEQSVAQVLQSAKEQIKWSLLK

SEQ ID NO: 50123 - protein, 28 aa, Homo sapiens
MDNLPRTAARYYFSKPELTPFSMQMSEK

SEQ ID NO: 50124 - protein, 187 aa, Homo sapiens
MTTGNNTVRFNPNFYRNGKVCLSILGTWTGPAWSPAQSISSVLISIQSLMTENPYHNEPGFEQERHPGDSKNYNECIRHETIRVAVCDMMEGKCPCPEPLRGVMEKSFLEYYDFYEVACKDRLHLQGQTMQDPFGEKRGHFDYQSLLMRLGLIRQKVLERLHNENAEMDSDSSSSGTETDLHGSLRV

SEQ ID NO: 50125 - protein, 84 aa, Homo sapiens
MGQEAGARWRPGGTRLSPISSDFSWFGCQGPRGLPGERGRPGAPGPAGARGNDGATGAAGPPVSVACRPQGLGVGRGLSICSWG

SEQ ID NO: 50126 - protein, 639 aa, Homo sapiens
MDGPPVRIAYMLVVHGRAIRQLKRLLKAVYHEQHFFYIHVDKRSDYLHREVVELAQGYDNVRVTPWRMVTIWGGASLLRMYLRSMRDLLEVPGWAWDFFINLSATDYPTRTNEELVAFLSKNRDKNFLKSHGRDNSRFIKKQGLDRLFHECDSHMWRLGERQIPAGIVVDGGSDWFVLTRSFVEYVVYTDDPLVAQLRQFYTYTLLPAESFFHTVLENSLACETLVDNNLRVTNWNRKLGCKCQYKHIVDWCGCSPNDFKPQDFLRLQQVSRPTFFARKFESTVNQEVLEILDFHLYGSYPPGTPALKAYWENTYDAADGPSGLSDVMLTAYTAFARLSLHHAATAAPPMGTPLCRFEPRGLPSSVHLYFYDDHFQGYLVTQAVQPSAQGPAETLEMWLMPQGSLKLLGRSDQASRLQSLEVGTDWDPKERLFRNFGGLLGPLDEPVAVQRWARGPNLTATVVWIDPTYVVATSYDITVDTETEVTQYKPPLSRPLRPGPWTVRLLQFWEPLGETRFLVLPLTFNRKLPLRKDDASWLHAGPPHNEYMEQSFQGLSSILNLPQPELAEEAAQRHTQLTGPALEAWTDRELSSFWSVAGLCAIGPSPCPSLEPCRLTSWSSLSPDPKSELGPVKADGRLR

SEQ ID NO: 50127 - protein, 171 aa, Homo sapiens
MLGASYAAVPLYRLYCQTTGLGGSAVAGHASDKIENMVPVKDRIIKISFNADVHASLQWNFRPQQTEIYVVPGETALAFYRAKNPTDKPVIGISTYNIVPFEAGQYFNKIQCFCFEEQRLNPQEEVDMPVFFYIDPEFAEDPRMIKVDLITLSYTFFEAKEGHKLPVPGYN

SEQ ID NO: 50128 - protein, 125 aa, Homo sapiens
MLGASYAAVPLYRLYCQTTGLGGSAVAGHASDKIENMVPVKDRIIKISFNADVHASLQWNFRPQQTEIYVVPGETALAFYRAKNPTDKPVIGISTYNIVPFEAGQYFNKIQVHQSVNFTEYDKDT

SEQ ID NO: 50129 - protein, 7 aa, Homo sapiens
MDCLSPR

SEQ ID NO: 50130 - protein, 117 aa, Homo sapiens
MPSEIKGLEFSEGLAQGKKQRLSKKLRRKLQMWLWSQTFCPVLYAWNDLGSRFWPRYVKVGSCFSKRSCSVPEGMVCKPSKSVHLTVLRWRCQRRGGQRCGWIPIQYPIISECKCSC

SEQ ID NO: 50131 - protein, 18 aa, Homo sapiens
MKTTEICGAPGVGKTQLW

SEQ ID NO: 50132 - protein, 737 aa, Homo sapiens
MIARLDTQLKNKLITLMGQKTSLTQETELLESLLQEVEHQLRSCSKSELISKSSEILMMFQQVHRKPMASFVTTPVPPDFTSELVPSYDSATFVLENFSTLRQRADPVYSPPLQVSGLCWRLKVYPDGNGVVRGYYLSVFLELSAGLPETSKYEYRVEMVHQSCNDPTKNIIREFASDFEVGECWGYNRFFRLDLLANEGYLNPQNDTVILRFQVRSPTFFQKSRDQHWYITQLEAAQTSYIQQINNLKERLTIELSRTQKSRDLSPPDNHLSPQNDDALETRAKKSACSDMLLEGGPTTASVREAKEDEEDEEKIQNEDYHHELSDGDLDLDLVYEDEVNQLDGSSSSASSTATSNTEENDIDEETMSGENDVEYNNMELEEGELMEDAAAAGPAGSSHGYVGSSSRISRRTHLCSAATSSLLDIDPLILIHLLDLKDRSSIENLWGLQPRPPASLLQPTASYSRKDKDQRKQQAMWRVPSDLKMLKRLKTQMAEVRCMKTDVKNTLSEIKSSSAASGDMQTSLFSADQAALAACGTENSGRLQDLGMELLAKSSVANCYIRNSTNKKSNSPKPARSSVAGSLSLRRAVDPGENSRSKGDCQTLSEGSPGSSQSGSRHSSPRALIHGSIGDILPKTEDRQCKALDSDAVVVAVFSGLPAVEKRRKMVTLGANAKGGHLEGLQMTDLENNSETGELQPVLPEGASAAPEEDTHSSFPDGEQIGPEDLSFNTDENSGR

SEQ ID NO: 50133 - protein, 386 aa, Homo sapiens
MEPKVINQMLSKAAQSGQWKYGQHACFCQKQGSGNNWAYGYSVHGPRHEESIMNIIRKEVEKCDSFSGFFIIMSMAGGTGSGLGAFVTQNLEDQYSNSLKMNQIIWPYGTGEVIVQNYNSILTLSHLYRSSDALLLHENDAIHKICAKLMNIKQISFSDINQVLAHQLGSVFQPTYSAESSFHYRRNPLGDLMEHLVPHPEFKMLSVRNIPHMSENSLAYTTFTWAGLLKHLRQMLISNAKMEEGIDRHVWPPLSGLPPLSKMSLNKDLHFNTSIANLVILRGKDVQSADVEGFKDPALYTSWLKPVNAFNVWKTQRAFSKYEKSAVLVSNSQFLVKPLDMIVGKAWNMFASKAYIHQYTKFGIEEEDFLDSFTSLEQVVASYCNL

SEQ ID NO: 50134 - protein, 331 aa, Homo sapiens
MEPKVINQMLSKAAQSGQWKYGQHACFCQKQGSGNNWAYGYSVHGPRHEESIMNIIRKEVEKCDSFSGFFIIMSMAGGTGSGLGAFVTQNLEDQYSNSLKMNQIIWPYGTGEVIVQNYNSILTLSHLYRSSDALLLHENDAIHKICAKLMNIKQISFSDINQVLAHQLGSVFQPTYSAESSFHYRRNPLGIDRHVWPPLSGLPPLSKMSLNKDLHFNTSIANLVILRGKDVQSADVEGFKDPALYTSWLKPVNAFNVWKTQRAFSKYEKSAVLVSNSQFLVKPLDMIVGKAWNMFASKAYIHQYTKFGIEEEDFLDSFTSLEQVVASYCNL

SEQ ID NO: 50135 - protein, 1899 aa, Homo sapiens
MIYPACFVLVPQSDIPTPSPVGSTHCSSSCLGVHQVPASTRDPAMSSVTLTPPTSPEEVQTVDPQSVQKWVKFSSVSDGFNSDSTSHHGGKIPRKLANHVVDRVWQECNMNRAQNKRKYSASSGGLCEEATAAKVASWDFVEATQRTNCSCLRHKNLKSRNAGQQGQAPSLGQQQQILPKHKTNEKQEKSEKPQKRPLTPFHHRVSVSDDVGMDADSASQRLVISAPDSQVRFSNIRTNDVAKTPQMHGTEMANSPQPPPLSPHPCDVVDEGVTKTPSTPQSQHFYQMPTPDPLVPSKPMEDRIDSLSQSFPPQYQEAVEPTVYVGTAVNLEEDEANIAWKYYKFPKKKDVEFLPPQLPSDKFKDDPVGPFGQESVTSVTELMVQCKKPLKVSDELVQQYQIKNQCLSAIASDAEQEPKIDPYAFVEGDEEFLFPDKKDRQNSEREAGKKHKVEDGTSSVTVLSHEEDAMSLFSPSIKQDAPRPTSHARPPSTSLIYDSDLAVSYTDLDNLFNSDEDELTPGSKKSANGSDDKASCKESKTGNLDPLSCISTADLHKMYPTPPSLEQHIMGFSPMNMNNKEYGSMDTTPGGTVLEGNSSSIGAQFKIEVDEGFCSPKPSEIKDFSYVYKPENCQILVGCSMFAPLKTLPSQYLPPIKLPEECIYRQSWTVGKLELLSSGPSMPFIKEGDGSNMDQEYGTAYTPQTHTSFGMPPSSAPPSNSGAGILPSPSTPRFPTPRTPRTPRTPRGAGGPASAQGSVKYENSDLYSPASTPSTCRPLNSVEPATVPSIPEAHSLYVNLILSESVMNLFKDCNFDSCCICVCNMNIKGADVGVYIPDPTQEAQYRCTCGFSAVMNRKFGNNSGLFLEDELDIIGRNTDCGKEAEKRFEALRATSAEHVNGGLKESEKLSDDLILLLQDQCTNLFSPFGAADQDPFPKSGVISNWVRVEERDCCNDCYLALEHGRQFMDNMSGGKVDEALVKSSCLHPWSKRNDVSMQCSQDILRMLLSLQPVLQDAIQKKRTVRPWGVQGPLTWQQFHKMAGRGSYGTDESPEPLPIPTFLLGYDYDYLVLSPFALPYWERLMLEPYGSQRDIAYVVLCPENEALLNGAKSFFRDLTAIYESCRLGQHRPVSRLLTDGIMRVGSTASKKLSEKLVAEWFSQAADGNNEAFSKLKLYAQVCRYDLGPYLASLPLDSSLLSQPNLVAPTSQSLITPPQMTNTGNANTPSATLASAASSTMTVTSGVAISTSVATANSTLTTASTSSSSSSNLNSGVSSNKLPSFPPFGSMNSNAAGSMSTQANTVQSGQLGGQQTSALQTAGISGESSSLPTQPHPDVSESTMDRDKVGIPTDGDSHAVTYPPAIVVYIIDPFTYENTDESTNSSSVWTLGLLRCFLEMVQTLPPHIKSTVSVQIIPCQYLLQPVKHEDREIYPQHLKSLAFSAFTQCRRPLPTSTNVKTLTGFGPGLAMETALRSPDRPECIRLYAPPFILAPVKDKQTELGETFGEAGQKYNVLFVGYCLSHDQRWILASCTDLYGELLETCIINIDVPNRARRKKSSARKFGLQKLWEWCLGLVQMSSLPWRVVIGRLGRIGHGELKDWSCLLSRRNLQSLSKRLKDMCRMCGISAADSPSILSACLVAMEPQGSFVIMPDSVSTGSVFGRSTTLNMQTSQLNTPQDTSCTHILVFPTSASVQVASATYTTENLDLAFNPNNDGADGMGIFDLLDTGDDLDPDIINILPASPTGSPVHSPGSHYPHGGDAGKGQSTDRLLSTEPHEEVPNILQQPLALGYFVSTAKAGPLPDWFWSACPQAQYQCPLFLKASLHLHVPSVQSDELLHSKHSHPLDSNQTSDVLRFVLEQYNALSWLTCDPATQDRRSCLPIHFVVLNQLYNFIMNML

SEQ ID NO: 50136 - protein, 518 aa, Homo sapiens
MLEKYKERLNRCVTMSKKLLIEKSKQEKMACRDKSMQDRLRLGHFTTVRHGASFTEQWTDGYAFQNLIKQQERINSQREEIERQRKMLAKRKPPAMGQAPPATNEQKQRKSKTNGAENETPSSGNTELKDTAPALGAHSLLRLTLAEYHEQEEIFKLRLGHLKKEEAEIQAELERLERVRNLHIRELKRIHNEDNSQFKDHPTLNDRYLLLHLLGRGGFSEVYKAFDLTEQRYVAVKIHQLNKNWRDEKKENYHKHACREYRIHKELDHPRIVKLYDYFSLDTDSFCTVLEYCEGNDLDFYLKQHKLMSEKEARSIIMQIVNALKYLNEIKPPIIHYDLKPGNILLVNGTACGEIKITDFGLSKIMDDDSYNSVDGMELTSQGAGTYWYLPPECFVVGKEPPKISNKVDVWSVGVIFYQCLYGRKPFGHNQSQQDILQENTILKATEVQFPPKPVVTPEAKAFIRRCLAYRKEDRIDVQQLACDPYLLPHIRKSVSTSSPAGAAIASTSGASNNSSSN

SEQ ID NO: 50137 - protein, 496 aa, Homo sapiens
MLEKYKERLNRCVTMSKKLLIEKSKQEKMACRDKSMQDRLRLGHFTTVRHGASFTEQWTDGYAFQNLIKQQERINSQREEIERQRKMLAKRKPPAMGQAPPATNEQKQRKSKTNGAENETLTLAEYHEQEEIFKLRLGHLKKEEAEIQAELERLERVRNLHIRELKRIHNEDNSQFKDHPTLNDRYLLLHLLGRGGFSEVYKAFDLTEQRYVAVKIHQLNKNWRDEKKENYHKHACREYRIHKELDHPRIVKLYDYFSLDTDSFCTVLEYCEGNDLDFYLKQHKLMSEKEARSIIMQIVNALKYLNEIKPPIIHYDLKPGNILLVNGTACGEIKITDFGLSKIMDDDSYNSVDGMELTSQGAGTYWYLPPECFVVGKEPPKISNKVDVWSVGVIFYQCLYGRKPFGHNQSQQDILQENTILKATEVQFPPKPVVTPEAKAFIRRCLAYRKEDRIDVQQLACDPYLLPHIRKSVSTSSPAGAAIASTSGASNNSSSN

SEQ ID NO: 50138 - protein, 303 aa, Homo sapiens
MTVNLARYKPTGEYVTVRRINLEACSNEMVTFLQGELHVSKLFNHPNIVPYRATFIADNELWVVTSFMAYGSAKDLICTHFMDGMNELAIAYILQGVLKALDYIHHMGYVHRSVKASHILISVDGKVYLSGLRSNLSMISHGQRQRVVHDFPKYSVKVLPWLSPEVLQQNLQGYDAKSDIYSVGITACELANGHVPFKDMPATQMLLEKLNGTVPCLLDTSTIPAEELTMSPSRSVANSGLSDSLTTSTPRPSNGDSPSHPYHRTFSPHFHHFVEQCLQRNPDARYPCWPGPGLRESRGCSGG

SEQ ID NO: 50139 - protein, 120 aa, Homo sapiens
MTVNLARYKPTGEYVTVRRINLEACSNEMVTFLQGELHVSKLFNHPNIVPYRATFIADNELWVVTSFMAYGSAKDLICTHFMDGMNELAIAYILQGVLKALDYIHHMGYVHRCVLRRPFP

SEQ ID NO: 50140 - protein, 310 aa, Homo sapiens [sequence omitted]

SEQ ID NO: 50141 - protein, 536 aa, Homo sapiens
MNVHKQCVINVPSLCGMDHTEKRGRIYLKAEVADEKLHVTVRDAKNLIPMDPNGLSDPYVKLKLIPDPKNESKQKTKTIRSTLNPQWNESFTFKLKPSDKDRRLSVEIWDWDRTTRNDFMGSLSFGVSELMKMPASGWYKLLNQEEGEYYNVPIPEGDEEGNMELRQKFEKAKLGPAGNKVISPSEDRKQPSNNLDRVKLTDFNFLMVLGKGSFGKVMLADRKGTEELYAIKILKKDVVIQDDDVECTMVEKRVLALLDKPPFLTQLHSCFQTVDRLYFVMEYVNGGDLMYHIQQVGKFKEPQAVFYAAEISIGLFFLHKRGIIYRDLKLDNVMLDSEGHIKIADFGMCKEHMMDGVTTRTFCGTPDYIAPEIIAYQPYGKSVDWWAYGVLLYEMLAGQPPFDGEDEDELFQSIMEHNVSYPKSLSKEAVSVCKGLMTKHPAKRLGCGPEGERDVREHAFFRRIDWEKLENREIQPPFKPKVCGKGAENFDKFFTRGQPVLTPPDQLVIANIDQSDFEGFSYVNPQFVHPILQSAV

SEQ ID NO: 50142 - protein, 288 aa, Homo sapiens
MEVDYSATVDQRLPECAKLAKEGRLQEVIETLLSLEKQTRTASDMVSTSRILVAVVKMCYEAKEWDLLNENIMLLSKRRSQLKQAVAKMVQQCCTYVEEITDLPIKLRLIDTLRMVTEGKIYVEIERARLTKTLATIKEQNGDVKEAASILQELQVETYGSMEKKERVEFILEQMRLCLAVKDYIRTQIISKKINTKFFQEENTEKLKLKYYNLMIQLDQHEGSYLSICKHYRAIYDTPCIQAESEKWQQALKSVVLYVILAPFDNEQSDLVHRISGDKKLEEIPKYK

SEQ ID NO: 50143 - protein, 1534 aa, Homo sapiens
MNKVASAPFLKGRTIMGWPDEKSMDELDLNYSIDAVRVIFTDTFSYHLKFSWGHRIPMMKEHRDHSAHCQAVNEKMKCEGSEFWEKGFVAFQAAINAAIIEIATNHSVMEQLMSVTGVHMKILPFVAQGGVATDFFIFFCIISFSTFIYYVSVNVTQERQYITSLMTMMGLRESAFWLSWGLMYAGFILIMATLMALIVKSAQIVVLTGFVMVFTLFLLYGLSLITLAFLMSVLIKKPFLTGLVVFLLIVFWGILGFPALYTRLPAFLEWTLCLLSPFAFTVGMAQLIHLDYDVNSNAHLDSSQNPYLIIATLFMLVFDTLLYLVLTLYFDKILPAEYGHRCSPLFFLKSCFWFQHGRANHVVLENETDSDPTPNDCFEPVSPEFCGKEAIRIKNLKKEYAGKCERVEALKGVVFDIYEGQITALLGHSGAGKTTLLNILSGLSVPTSGSVTVYNHTLSRMADIENISKFTGFCPQSNVQFGFLTVKENLRLFAKIKGILPHEVEKEVQRVVQELEMENIQDILAQNLSGGQNRKLTFGIAILGDPQVLLLDEPTAGLDPLSRHRIWNLLKEGKSDRVILFSTQFIDEADILADRKVFISNGKLKCAGSSLFLKKKWGIGYHLSLHLNERCDPESITSLVKQHISDAKLTAQSEEKLVYILPLERTNKFPELYRDLDRCSNQGIEDYGVSITTLNEVFLKLEGKSTIDESDIGIWGQLQTDGAKDIGSLVELEQVLSSFHETRKTISGVALWRQQVCAIAKVRFLKLKKERKSLWTILLLFGISFIPQLLEHLFYESYQKSYPWELSPNTYFLSPGQQPQDPLTHLLVINKTGSTIDNFLHSLRRQNIAIEVDAFGTRNGTDDPSYNGAIIVSGDEKDHRFSIACNTKRLNCFPVLLDVISNGLLGIFNSSEHIQTDRSTFFEEHMDYEYGYRSNTFFWIPMAASFTPYIAMSSIGDYKKKAHSQLRISGLYPSAYWFGQALVDVSLYFLILLLMQIMDYIFSPEEIIFIIQNLLIQILCSIGYVSSLVFLTYVISFIFRNGRKNSGIWSFFFLIVVIFSIVATDLNEYGFLGLFFGTMLIPPFTLIGSLFIFSEISPDSMDYLGASESEIVYLALLIPYLHFLIFLFILRCLEMNCRKKLMRKDPVFRISPRSNAIFPNPEEPEGEEEDIQMERMRTVNAMAVRDFDETPVIIASCLRKEYAGKKKNCFSKRKKKIATRNVSFCVKKGEVIGLLGHNGAGKSTTIKMITGDTKPTAGQVILKGSGGGEPLGFLGYCPQENALWPNLTVRQHLEVYAAVKGLRKGDAMIAITRLVDALKLQDQLKAPVKTLSEGIKRKLCFVLSILGNPSVVLLDEPSTGMDPEGQQQMWQVIRATFRNTERGALLTTHYMAEAEAVCDRVAIMVSGRLRCIGSIQHLKSKFGKDYLLEMKLKNLAQMEPLHAEILRLFPQAAQQERFSSLMVYKLPVEDVRPLSQAFFKLEIVKQSFDLEEYSLSQSTLEQVFLELSKEQELGDLEEDFDPSVKWKLLLQEEP

SEQ ID NO: 50144 - protein, 1496 aa, Homo sapiens
MNKVASAPFLKGRTIMGWPDEKSMDELDLNYSIDAVRVIFTDTFSYHLKFSWGHRIPMMKEHRDHSAHCQAVNEKMKCEGSEFWEKGFVAFQAAINAAIIEIATNHSVMEQLMSVTGVHMKILPFVAQGGVATDFFIFFCIISFSTFIYYVSVNVTQERQYITSLMTMMGLRESAFWLSWGLMYAGFILIMATLMALIVKSAQIVVLTGFVMVFTLFLLYGLSLITLAFLMSVLIKKPFLTGLVVFLLIVFWGILGFPALYTRLPAFLEWTLCLLSPFAFTVGMAQLIHLDYDVNSNAHLDSSQNPYLIIATLFMLVFDTLLYLVLTLYFDKILPAEYGHRCSPLFFLKSCFWFQHGRANHVVLENETDSDPTPNDCFEPVSPEFCGKEAIRIKNLKKEYAGKCERVEALKGVVFDIYEGQITALLGHSGAGKTTLLNILSGLSVPTSGSVTVYNHTLSRMADIENISKFTGFCPQSNVQFGFLTVKENLRLFAKIKGILPHEVEKEVQRVVQELEMENIQDILAQNLSGGQNRKLTFGIAILGDPQVLLLDEPTAGLDPLSRHRIWNLLKEGKSDRVILFSTQFIDEADILADRKVFISNGKLKCAGSSLFLKKKWGIGYHLSLHLNERCDPESITSLVKQHISDAKLTAQSEEKLVYILPLERTNKFPELYRDLDRCSNQGIEDYGVSITTLNEVFLKLEGKSTIDESDIGIWGQLQTDGAKDIGSLVELEQVLSSFHETRKTISGVALWRQQVCAIAKVRFLKLKKERKSLWTILLLFGISFIPQLLEHLFYESYQKSYPWELSPNTYFLSPGQQPQDPLTHLLVINKTGSTIDNFLHSLRRQNIAIEVDAFGTRNGTDDPSYNGAIIVSGDEKDHRFSIACNTKRLNCFPVLLDVISNGLLGIFNSSEHIQTDRSTFFEEHMDYEYGYRSNTFFWIPMAASFTPYIAMSSIGDYKKKAHSQLRISGLYPSAYWFGQALVDVSLYFLILLLMQIMDYIFSPEEIIFIIQNLLIQVVIFSIVATDLNEYGFLGLFFGTMLIPPFTLIGSLFIFSEISPDSMDYLGASESEIVYLALLIPYLHFLIFLFILRCLEMNCRKKLMRKDPVFRISPRSNAIFPNPEEPEGEEEDIQMERMRTVNAMAVRDFDETPVIIASCLRKEYAGKKKNCFSKRKKKIATRNVSFCVKKGEVIGLLGHNGAGKSTTIKMITGDTKPTAGQVILKGSGGGEPLGFLGYCPQENALWPNLTVRQHLEVYAAVKGLRKGDAMIAITRLVDALKLQDQLKAPVKTLSEGIKRKLCFVLSILGNPSVVLLDEPSTGMDPEGQQQMWQVIRATFRNTERGALLTTHYMAEAEAVCDRVAIMVSGRLRCIGSIQHLKSKFGKDYLLEMKLKNLAQMEPLHAEILRLFPQAAQQERFSSLMVYKLPVEDVRPLSQAFFKLEIVKQSFDLEEYSLSQSTLEQVFLELSKEQELGDLEEDFDPSVKWKLLLQEEP

SEQ ID NO: 50145 - protein, 46 aa, Homo sapiens
MAGSSPNTPQPVPEQSALCQGLYFHINQTLREAHFHSLQHRGRPLT

SEQ ID NO: 50146 - protein, 176 aa, Homo sapiens
MKSEELQRLTASEPLTLEQEYAMQCSWQEDADKCTFIVLDAEKWQAQPGATEESCMVGDVNLFLTDLEDLTLGEIEVMIAEPSCRGKGLGTEAVLAMLSYGVTTLGLTKFEAKIGQGNEPSIRMFQKLHFEQVATSSVFQEVTLRLTVSESEHQWLLEQTSHVEEKPYRDGSAEPC

SEQ ID NO: 50147 - protein, 105 aa, Homo sapiens
MDMNYIIQRKKEFRNPSIYEKLIQFCAIDELGTNYPKDMFDPHGWSEDSYYEALAKAQKIEMDKLEKAKKERTKACCRDVSAAPGDRSCPSPVRAGTASSWVLSL

SEQ ID NO: 50148 - protein, 162 aa, Homo sapiens
MDMNYIIQRKKEFRNPSIYEKLIQFCAIDELGTNYPKDMFDPHGWSEDSYYEALAKAQKIEMDKLEKAKKERTKIEFVTGTKKGTTTNATSTTTTTASTAVADAQKRKSKWDSAIPVTTIAQPTILTTTATLPAVVTVTTSASGSKTTVISAVGTIVKKAKQ

SEQ ID NO: 50149 - protein, 79 aa, Homo sapiens
MAQHGSDQHQVLVCTKLVEPFHAQVGSLYIVLGELQHQQDRGSVVKARVLTCVEGMNLPLLEQAIREQRLYKQERGGSQ

SEQ ID NO: 50150 - protein, 810 aa, Homo sapiens
MLPEGFQNRRLKKSQPRTWAAHTTACPPSFLPKRKNPAYLKSVSLQEPRSRWQESSEKRPGFRRQASLSQSIRKGAAQWFGVSGDWEGQRQQWQRRSLHHCSMRYGRLKASCQRDLELPSQEAPSFQGTESPKPCKMPKIVDPLARGRAFRHPEEMDRPHAPHPPLTPGVLSLTSFTSVRSGYSHLPRRKRMSVAHMSLQAAAALLKGRSVLDATGQRCRVVKRSFAFPSFLEEDVVDGADTFDSSFFSKEEMSSMPDDVFESPPLSASYFRGIPHSASPVSPDGVQIPLKEYGRAPVPGPRRGKRIASKVKHFAFDRKKRHYGLGVVGNWLNRSYRRSISSTVQRQLESFDSHRPYFTYWLTFVHVIITLLVICTYGIAPVGFAQHVTTQLVLRNKGVYESVKYIQQENFWVGPSSIDLIHLGAKFSPCIRKDGQIEQLVLRERDLERDSGCCVQNDHSGCIQTQRKDCSETLATFVKWQDDTGPPMDKSDLGQKRTSGAVCHQDPRTCEEPASSGAHIWPDDITKWPICTEQARSNHTGFLHMDCEIKGRPCCIGTKGSCEITTREYCEFMHGYFHEEATLCSQVHCLDKVCGLLPFLNPEVPDQFYRLWLSLFLHAGVVHCLVSVVFQMTILRDLEKLAGWHRIAIIFILSGITGNLASAIFLPYRAEVGPAGSQFGLLACLFVELFQSWPLLERPWKAFLNLSAIVLFLFICGLLPWIDNIAHIFGFLSGLLLAFAFLPYITFGTSDKYRKRALILVSLLAFAGLFAALVLWLYIYPINWPWIEHLTCFPFTSRFCEKYELDQVLH

SEQ ID NO: 50151 - protein, 224 aa, Homo sapiens
MKMKYYIEYMESTRDDSPLYIFDSSYGEHPKRRKLLEDYKVPKFFTDDLFQYAGEKRRPPYRWFVMGPPRSGTGIHIDPLGTSAWNALVQGHKRWCLFPTSTPRELIKVTRDEGGNQQDEAITWFNVIYPRTQLPTWPPEFKPLEILQKPGETVFVPGGWWHVVLNLDTTIAITQNFASSTNFPVVWHKTVRGRPKLSRKWYRYSTGSGSASHPQPPRATVSQP

SEQ ID NO: 50152 - protein, 1650 aa, Homo sapiens
MIGDGRSQNCWGASNSNAGINLNLNPNANPAAWPVLGHEGTVATGNPSSICSPVSAIGQNMGNQNGNPTGTLGAWGNLLPQESTEPQTSTSQNVSFSAQPQNLNTDGPNNTNPMNSSPNPINAMQTNGLPNWGMAVGMGAIIPPHLQGLPGANGSSVSQVSGGSAEGISNSVWGLSPGNPATGNSNSGFSQGNGDTVNSALSAKQNGSSSAVQKEGSGGNAWDSGPPAGPGILAWGRGSGNNGVGNIHSGAWGHPSRSTSNGVNGEWGKPPNQHSNSDINGKGSTGWESPSVTSQNPTVQPGGEHMNSWAKAASSGTTASEGSSDGSGNHNEGSTGREGTGEGRRRDKGIIDQGHIQLPRNDLDPRVLSNTGWGQTPVKQNTAWEFEESPRSERKNDNGTEAWGCAATQASNSGGKNDGSIMNSTNTSSVSGWVNAPPAAVPANTGWGDSNNKAPSGPGVWGDSISSTAVSTAAAAKSGHAWSGAANQEDKSPTWGEPPKPKSQHWGDGQRSNPAWSAGGGDWADSSSVLGHLGDGKKNGSGWDADSNRSGSGWNDTTRSGNSGWGNSTNTKANPGTNWGETLKPGPQQNWASKPQDNNVSNWGGAASVKQTGTGWIGGPVPVKQKDSSEATGWEEPSPPSIRRKMEIDDGTSAWGDPSNYNNKTVNMWDRNNPVIQSSTTTNTTTTTTTTTSNTTHRVETPPPHQAGTQLNRSPLLGPVSSGWGEMPNVHSKTENSWGEPSSPSTLVDNGTAAWGKPPSSGSGWGDHPAEPPVAFGRAGAPVAASALCKPASKSMQEGWGSGGDEMNLSTSQWEDEEGDVWNNAASQESTSSCSSWGNAPKKGLQKGMKTSGKQDEAWIMSRLIKQLTDMGFPREPAEEALKSNNMNLDQAMSALLEKKVDVDKRGLGVTDHNGMAAKPLGCRPPISKESSVDRPTFLDKDGGLVEEPTPSPFLPSPSLKLPLSHSALPSQALGGIASGLGMQNLNSSRQIPSGNLGMFGNSGAAQARTMQQPPQPPVQPLNSSQPSLRAQVPQFLSPQVQAQLLQFAAKNIGLNPALLTSPINPQHMTMLNQLYQLQLAYQRLQIQQQMLQAQRNVSGSMRQQEQQVARTITNLQQQIQQHQRQLAQALLVKQPPPPPPPPHLSLHPSAGKSAMDSFPSHPQTPGLPDLQTKEQQSSPNTFAPYPLAGLNPNMNVNSMDMTGGLSVKDPSQSQSRLPQWTHPNSMDNLPSAASPLEQNPSKHGAIPGGLSIGPPGKSSIDDSYGRYDLIQNSESPASPPVAVPHSWSRAKSDSDKISNGSSINWPPEFHPGVPWKGLQNIDPENDPDVTPGSVPTGPTINTTIQDVNRYLLKSGGSSPPSSQNATLPSSSAWPLSASGYSSSFSSIASAPSVAGKLSDIKSTWSSGPTSHTQASLSHELWKVPRNSTAPTRPPPGLTNPKPSSTWGASPLGWTSSYSSGSAWSTDTSGRTSSWLVLRNLTPQIDGSTLRTLCLQHGPLITFHLNLTQGNAVVRYSSKEEAAKAQKSLHMCVLGNTTILAEFAGEEEVNRFLAQGQALPPTSSWQSSSASSQPRLSAAGSSHGLVRSDAGHWNAPCLGGKGSSELLWGGVPQYSSSLWGPPSADDSRVIGSPTPLTTLLPGDLLSGESL

SEQ ID NO: 50153 - protein, 275 aa, Homo sapiens
MGGYLDDRFIQGSVVQTPYAFYHWQCIDVFVYFSHHTVTIPPVGWTNTAHRHGVCVLGTFITEWNEGGRLCEAFLAGDERSYQAVADRLVQITQFFRFDGWLINIENSLSLAAVGNMPPFLRYLTTQLHRQVPGGLVLWYDSVVQSGQLKWQDELNQHNRVFFDSCDGFFTNYNWREEHLERMLGQAGERRADVYVGVDVFARGNVVGGRFDTDKVGGGFRPRASGPVPPLGPHFLMDLPFPSAPQRNDSSCSSQSGDPVALRNRCPAPAKLCPH

SEQ ID NO: 50154 - protein, 612 aa, Homo sapiens
MGGYLDDRFIQGSVVQTPYAFYHWQCIDVFVYFSHHTVTIPPVGWTNTAHRHGVCVLGTFITEWNEGGRLCEAFLAGDERSYQAVADRLVQITQFFRFDGWLINIENSLSLAAVGNMPPFLRYLTTQLHRQVPGGLVLWYDSVVQSGQLKWQDELNQHNRVFFDSCDGFFTNYNWREEHLERMLGQAGERRADVYVGVDVFARGNVVGGRFDTDKSLELIRKHGFSVALFAPGWVYECLEKKDFFQNQDKFWGRLERYLPTHSICSLPFVTSFCLGMGARRVCYGQEEAVGPWYHLSAQEIQPLFGEHRLGGDGRGWVRTHCCLEDAWHGGSSLLVRGVIPPEVGNVAVRLFSLQAPVPPKIYLSMVYKLEGPTDVTVALELTTGDAGSCHIGGISVLNAETSSRHSLRPLRVPPTKLARWVGRCGRQLSGGWVQHCYEVSLRGCLLLDLLVCFSRPPGSREEESFTCRLGEIQVVDAASLLAPLPQVQAVTISHIRWQPSASEREGPPALLQLSCTLHWSFLLSQVRCFRIHCWGGMSDDSPGRELPRPEMPMFLGLAFATQYRIVDLLVEAAGPGQDRRMEFLVEPVPKEGFRVPQAEWGRAVLLYSAPA

SEQ ID NO: 50155 - protein, 678 aa, Homo sapiens
MDNVTGGMETSRQTYDDKLTAVESDLKKLGDQTGKKAISTNSELSTFRSDILDLRQQLREITEKTSKNKDTLEKLQASGDALVDRQSQLKETLENNSFLITTVNKTLQAYNGYVTNLQQDTSVLQGNLQNQMYSHNVVIMNLNNLNLTQVQQRNLITNLQRSVDDTSQAIQRIKNDFQNLQQVFLQAKKDTDWLKEKVQSLQTLAANNSALAKANNDTLEDMNSQLNSFTGQMENITTISQANEQNLKDLQDLHKDAENRTAIKFNQLEERFQLFETDIVNIISNISYTAHHLRTLTSNLNEVRTTCTDTLTKHTDDLTSLNNTLANIRLDSVSLRMQQDLMRSRLDTEVANLSVIMEEMKLVDSKHGQLIKNFTILQGPPGPRGPRGDRGSQGPPGPTGNKGQKGEKGEPGPPGPAGERGPIGPAGPPGERGGKGSKGSQGPKGSRGSPGKPGPQGSSGDPGPPGPPGKEGLPGPQGPPGFQGLQGTVGEPGVPGPRGLPGLPGVPGMPGPKGPPGPPGPSGAVVPLALQNEPTPAPEDNGCPPHWKNFTDKCYYFSVEKEIFEDAKLFCEDKSSHLVFINTREEQQWIKKQMVGRESHWIGLTDSERENEWKWLDGTSPDYKNWKAGQPDNWGHGHGPGEDCAGLIYAGQWNDFQCEDVNNFICEKDRETVLSSAL

SEQ ID NO: 50156 - protein, 2837 aa, Homo sapiens
MTLSHREPKELDPIVTRRYYYSIKDISVGGMCICYGHASSCPWDETTKKLQCQCEHNTCGESCNRCCPGYHQQPWRPGTVSSGNTCEACNCHNKAKDCYYDESVAKQKKSLNTAGQFRGGGVCINCLQNTMGINCETCIDGYYRPHKVSPYEDEPCRPCNCDPVGSLSSVCIKDDLHSDLHNGKQPGQCPCKEGYTGEKCDRCQLGYKDYPTCVSCGCNPVGSASDEPCTGPCVCKENVEGKACDRCKPGFYNLKEKNPRGCSECFCFGVSDVCSSLSWPVGQVNSMSGWLVTDLISPRKIPSQQDALGGRHQVSINNTAVMQRLAPKYYWAAPEAYLGNKLTAFGGFLKYTVSYDIPVETVDSNLMSHADVIIKGNGLTLSTQAEGLSLQPYEEYLNVVRLVPENFQDFHSKRQIDRDQLMTVLANVTHLLIRANYNSAKMALYRLESVSLDIASSNAIDLVVAADVEHCECPQGYTGTSCESCLSGYYRVDGILFGGICQPCECHGHAAECNVHGVCIACAHNTTGVHCEQCLPGFYGEPSRGTPGDCQPCACPLTIASNNFSPTCHLNDGDEVVCDWCAPGYSGAWCERCADGYYGNPTVPGESCVPCDCSGNVDPSEAGHCDSVTGECLKCLGNTDGAHCERCADGFYGDAVTAKNCRACECHVKGSHSAVCHLETGLCDCKPNVTGQQCDQCLHGYYGLDSGHGCRPCNCSVAGSVSDGCTDEGQCHCVPGVAGKRCDRCAHGFYAYQDGSCTPCDCPHTQNTCDPETGECVCPPHTQGVKCEECEDGHWGYDAEVGCQACNCSLVGSTHHRCDVVTGHCQCKSKFGGRACDQCSLGYRDFPDCVPCDCDLRGTSGDACNLEQGLCGCVEETGACPCKENVFGPQCNECREGTFALRADNPLGCSPCFCSGLSHLCSELEDYVRTPVTLGSDQPLLRVVSQSNLRGTTEGVYYQAPDFLLDAATVRQHIRAEPFYWRLPQQFQGDQLMAYGGKLKYSVAFYSLDGVGTSNFEPQVLIKGGRIRKQVIYMDAPAPENGVRQEQEVAMRENFWKYFNSVSEKPVTREDFMSVLSDIEYILIKASYGQGLQQSRISDISMEVGRKAEKLHPEEEVASLLENCVCPPGTVGFSCQDCAPGYHRGKLPAGSDRGPRPLVAPCVPCSCNNHSDTCDPNTGKCLNCGDNTAGDHCDVCTSGYYGKVTGSASDCALCACPHSPPASFSPTCVLEGDHDFRCDACLLGYEGKHCERCSSSYYGNPQTPGGSCQKCDCNPHGSVHGDCDRTSGQCVCRLGASGLRCDECEPRHILMETDCVSCDDECVGVLLNDLDEIGDAVLSLNLTGIIPVPYGILSNLENTTKYLQESLLKENMQKDLGKIKLEGVAEETDNLQKKLTRMLASTQKVNRATERIFKESQDLAIAIERLQMSITEIMEKTTLNQTLDEDFLLPNSTLQNMQQNGTSLLEIMQIRDFTQLHQNATLELKAAEDLLSQIQENYQKPLEELEVLKEAASHVLSKHNNELKAAEALVREAEAKMQESNHLLLMVNANLREFSDKKLHVQEEQNLTSELIVQGRGLIDAAAAQTDAVQDALEHLEDHQDKLLLWSAKIRHHIDDLVMHMSQRNAVDLVYRAEDHAAEFQRLADVLYSGLENIRNVSLNATSAAYVHYNIQSLIEESEELARDAHRTVTETSLLSESLVSNGKAAVQRSSRFLKEGNNLSRKLPGIALELSELRNKTNRFQENAVEITRQTNESLLILRAIPKGIRDKGAKTKELATSASQSAVSTLRDVAGLSQELLNTSASLSRVNTTLRETHQLLQDSTMATLLAGRKVKDVEIQANLLFDRLKPLKMLEENLSRNLSEIKLLISQARKQAASIKVAVSADRDCIRAYQPQISSTNYNTLTLNVKTQEPDNLLFYLGSSTASDFLAVEMRRGRVAFLWDLGSGSTRLEFPDFPIDDNRWHSIHVARFGNIGSLSVKEMSSNQKSPTKTSKSPGTANVLDVNNSTLMFVGGLGGQIKKSPAVKVTHFKGCLGEAFLNGKSIGLWNYIEREGKCRGCFGSSQNEDPSFHFDGSGYSVVEKSLPATVTQIIMLFNTFSPNGLLLYLGSYGTKDFLSIELFRGRVKVMTDLGSGPITLLTDRRYNNGTWYKIAFQRNRKQGVLAVIDAYNTSNKETKQGETPGASSDLNRLDKDPIYVGGLPRSRVVRRGVTTKSFVGCIKNLEISRSTFDLLRNSYGVRKGCLLEPIRSVSFLKGGYIELPPKSLSPESEWLVTFATTNSSGIILAALGGDVEKRGDREEAHVPFFSVMLIGGNIEVHVNPGDGTGLRKALLHAPTGTCSDGQAHSISLVRNRRIITVQLDENNPVEMKLGTLVESRTINVSNLYVGGIPEGEGTSLLTMRRSFHGCIKNLIFNLELLDFNSAVGHEQVDLDTCWLSERPKLAPDAEDSKLLPEPRAFPEQCVVDAALEYVPGAHQFGLTQNSHFILPFNQSAVRKKLSVELSIRTFASSGLIYYMAHQNQADYAVLQLHGGRLHFMFDLGKGRTKVSHPALLSDGKWHTVKTDYVKRKGFITVDGRESPMVTVVGDGTMLDVEGLFYLGGLPSQYQARKIGNITHSIPACIGDVTVNSKQLDKDSPVSAFTVNRCYAVAQEGTYFDGSGYAALVKEGYKVQSDVNITLEFRTSSQNGVLLGISTAKVDAIGLELVDGKVLFHVNNGAGRITAAYEPKTATVLCDGKWHTLQANKSKHRITLIVDGNAVGAESPHTQSTSVDTNNPIYVGGYPAGVKQKCLRSQTSFRGCLRKLALIKSPQVQSFDFSRAFELHGVFLHSCPGTES

SEQ ID NO: 50157 - protein, 186 aa, Homo sapiens
MERFTDDTFCEACKSTVGVDFKIKTVELRGKKIRLQIWDTAGQERFNSITSAYYRSAKGIILVYDITKKETFDDLPKWMKMIDKYASEDAELLLVGNKLDCETDREITRQQGEKFAQQITGMRFCEASAKDNFNVDEIFLKLVDDILKKMPLDILRNELSNSILSLQPEPEIPPELPPPRPHVRCC

SEQ ID NO: 50158 - protein, 220 aa, Homo sapiens
MQNGAGGALFVHRDTPENNPDTPFDFTPENYKRIEAIVKNYPEGHKAAAVLPVLDLAQRQNGWLPISAMNKVAEVLQVPPMRVYEVATFYTMYNRKPVGKYHIQVCTTTPCMLRNSDSILEAIQKKLGIKVGETTPDKLFTLIEVECLGACVNAPMVQINDNYYEDLTAKDIEEIIDELKAGKIPKPGPRSGRFSCEPAGGLTSLTEPPKGPGFGVQAGL

SEQ ID NO: 50159 - protein, 93 aa, Homo sapiens
MRVYEVATFYTMYNRKPVGKYHIQVCTTTPCMLRNSDSILEAIQKKLGIKVGETTPDKLFTLIEVECLGACVNAPMVQINDNYYVSISGGFDS

SEQ ID NO: 50160 - protein, 514 aa, Homo sapiens
MELHTFLTKIKSAKENLKKIQEMEKSDESSTDLEELKNADWARFWVQVMRDLRNGVKLKKVQERQYNPLPIEYQLTPYEMLMDDIRCKRYTLRKVMVNGDIPPRLKKSAHEIILDFIRSRPPLNPVSARKLKPTPPRPRSLHERILEEIKAERKLRPVSPEEIRRSRLDVTTPESTKNLVESSMVNGGLTSQTKENGLSTSQQVPAQRKKLLRAPTLAELDSSESEEETLHKSTSSSSVSPSFPEEPVLEAVSTRKKPPKFLPISSTPQPERRQPPQRRHSIEKETPTNVRQFLPPSRQSSRSLEEFCYPVECLALTVEEVMHIRQVLVKAELEKYQQYKDIYTALKKGKLCFCCRTRRFSFFTWSYTCQFCKRPVCSQCCKKMRLPSKPYSTLPIFSLGPSALQRGESSMRSEKPSTAHHRPLRSIARFSSKSKSMDKSDEELQFPKELMEDWSTMEVCVDCKKFISEIISSSRRSLVLANKRARLKRKTQSFYMSSPGPSEYCPSERTISEI

SEQ ID NO: 50161 - protein, 479 aa, Homo sapiens
MADSTTMLSISDPIHMVLIKTDIFGETTLVASYFLEWRSVLGSENGVTSLTVELMGVGTESKVSVGILNIKLEMYPPLNQTLSQEVVNTQLALERQKTAEKERLFLVYAKQWWREYLQIRPSHNSRLVKIFAQDENGINRPVCSYVKPLRAGRLLDTPRQAARFVNVLGYERAPVIGGGGKQEQWCTLLAFLCRNKGDCEDHANLLCSLLLGYGLEAFVCVGTKAKGVPHAWVMTCGTDGAITFWESLTGHRYIHKPTNPDEPPVAEQPKPLYPYRTIGCVFNHQMFLGNCQPSDAVETCVFDLNDESKWKPMSEEAIKSVCAPGATTSLPPFPPLCASTIDASVTSNEIEMQLRLLVSEHRKDLGLTTVWEDQLSYLLSPALASYEFERTTSISAGNEEFQDAIRRAVPDGHTFKGFPIHFVYRNARRAFATCLRSPFCEEIICCRGDQVRLAVRVRVFTYPESACAVWIMFACECAS

SEQ ID NO: 50162 - protein, 334 aa, Homo sapiens
MYRGNTTMDIKDLVKQFHQIKVEKWSEGTTPQKKLECLKEPGKTSVESKVPTQMEKSTDTDEDNVTRTEYSDKTTQFPSVYAVPGTEQTEAVGGLSSKPATPKTTTPPSSPPPTAVSPEFAYVPADPAQLAAQMLAMATSERGQPPPCSNMWTLYCLTDKNQQGHPSPPPAPGPFPQATLYLPNPKDPQFQQHPPKVTFPTYVMGDTKKTSAPPFILVGSNVQEAQGWKPLPGHAVVSQSDVLRYVAMQVPIAVPADEKYQKHTLSPQNANPPSGQDVPRPKSPVFLSVAFPVEDVAKKSSGSGDKCAPFGSYGIAGEVTVTTAHKRRKAETEN

SEQ ID NO: 50163 - protein, 375 aa, Homo sapiens [sequence omitted]

SEQ ID NO: 50164 - protein, 819 aa, Homo sapiens
MKEYRIWLKDKHLALQFIDWVLRGTAQVMFINNPLSGLIIFIGLLIQNPWWTITGGLGTVVSTLTALALGQDRSAIASGLHGYNGMLVGLLMAVFSEKLDYYWWLLFPVTFTAMSCPVLSSALNSIFSKWDLPVFTLPFNIAVTLYLAATGHYNLFFPTTLVEPVSSVPNITWTEMEMPLLLQAIPVGVGQVYGCDNPWTGGVFLVALFISSPLICLHAAIGSIVGLLAALSVATPFETIYTGLWSYNCVLSCIAIGGMFYALTWQTHLLALICALFCAYMEAAISNIMSVVGVPPGTWAFCLATIIFLLLTTNNPAIFRLPLSKVTYPEANRIYYLTVKSGEEEKAPSGGGGEHPPTAGPKVEEGSEAVLSKHRSVFHIEWSSIRRRSKVFGKGEHQERQNKDPFPYRYRKPTVELLDLDTMEESSEIKVETNISKTSWIRSSMAASGKRVSKALSYITGEMKECGEGLKDKSPVFQFFDWVLRGTSQVMFVNNPLSGILIILGLFIQNPWWAISGCLGTIMSTLTALILSQDKSAIAAGFHGYNGVLVGLLMAVFSDKGDYYWWLLLPVIIMSMSCPILSSALGTIFSKWDLPVFTLPFNITVTLYLAATGHYNLFFPTTLLQPASAMPNITWSEVQVPLLLRAIPVGIGQVYGCDNPWTGGIFLIALFISSPLICLHAAIGSTMGMLAALTIATPFDSIYFGLCGFNSTLACIAIGGMFYVITWQTHLLAIACALFAAYLGAALANMLSVFGLPPCTWPFCLSALTFLLLTTNNPAIYKLPLSKVTYPEANRIYYLSQERNRRASIITKYQAYDVS

SEQ ID NO: 50165 - protein, 202 aa, Homo sapiens
MESVNFSPANLSSTGSRYLNALVDSAVALETKDTSLASFIPAVNDLTSDLFRTKSKSEEIKIELEKLEKNLTATLVLEKCLQEDVKKAELHLSTERAKVDNRRQNMDFLKAKSEEFRFGIKAAEEQLSARGMDASLSHQSLVALSEKLARLKQQTIPLKKKLESYLDLMPNPSLAQVKIEEAKRELDSIEAELTRRVDMMEL

SEQ ID NO: 50166 - protein, 131 aa, Homo sapiens
MKKIEQRKTRPCFSTSNENRVLAQCLMELSYQTLKFTHQAREAVLFELARYHAPSTIFLDELESVMSQRGTASGGEHEGSLRMKTELLVQMDGLARSEDLVFVLAASNLPCNHMHFWAPGRSCPPCLQSRS

SEQ ID NO: 50167 - protein, 24 aa, Homo sapiens
MLLRRRIEDGHNFYLKISILQRHI

SEQ ID NO: 50168 - protein, 7 aa, Homo sapiens
MRRIEAV

SEQ ID NO: 50169 - protein, 279 aa, Homo sapiens [sequence omitted]

SEQ ID NO: 50170 - protein, 592 aa, Homo sapiens
MTSRDLGSHDNLSPPFVNSRIQSKTERGSYSSYGRESNLQGCHQQSLLGGDMDMGNPGTLSPTKPGSQYYQYSSNNPRRRPLHSSAMEVQTKKVRKVPPGLPSSVYAPSASTADYNRDSPGYPSSKPATSTFPSSFFMQDGHHSSDPWSSSSGMNQPGYAGMLGNSSHIPQSSSYCSLHPHERLSYPSHSSADINSSLPPMSTFHRSGTNHYSTSSCTPPANGTDSIMANRGSGAAGSSQTGDALGKALASIYSPDHTNNSFSSNPSTPVGSPPSLSAGTAVWSRNGGQASSSPNYEGPLHSLQSRIEDRLERLDDAIHVLRNHAVGPSTAMPGGHGDMHGIIGPSHNGAMGGLGSGYGTGLLSANRHSLMVGTHREDGVALRGSHSLLPNQVPVPQLPVQSATSPDLNPPQDPYRGMPPGLQGQSVSSGSSEIKSDDEGDENLQDTKSSEDKKLDDDKKDIKSITRSRSSNNDDEDLTPEQKAEREKERRMANNARERLRVRDINEAFKELGRMVQLHLKSDKPQTKLLILHQAVAVILSLEQQVRERNLNPKAACLKRREEEKVSSEPPPLSLAGPHPGMGDASNHMGQM

SEQ ID NO: 50171 - protein, 588 aa, Homo sapiens
MTSRDLGSHDNLSPPFVNSRIQSKTERGSYSSYGRESNLQGCHQQSLLGGDMDMGNPGTLSPTKPGSQYYQYSSNNPRRRPLHSSAMEVQTKKVRKVPPGLPSSVYAPSASTADYNRDSPGYPSSKPATSTFPSSFFMQDGHHSSDPWSSSSGMNQPGYAGMLGNSSHIPQSSSYCSLHPHERLSYPSHSSADINSSLPPMSTFHRSGTNHYSTSSCTPPANGTDSIMANRGSGAAGSSQTGDALGKALASIYSPDHTNNSFSSNPSTPVGSPPSLSAGTAVWSRNGGQASSSPNYEGPLHSLQSRIEDRLERLDDAIHVLRNHAVGPSTAMPGGHGDMHGIIGPSHNGAMGGLGSGYGTGLLSANRHSLMVGTHREDGVALRGSHSLLPNQVPVPQLPVQSATSPDLNPPQDPYRGMPPGLQGQSVSSGSSEIKSDDEGDENLQDTKSSEDKKLDDDKKDIKSITSNNDDEDLTPEQKAEREKERRMANNARERLRVRDINEAFKELGRMVQLHLKSDKPQTKLLILHQAVAVILSLEQQVRERNLNPKAACLKRREEEKVSSEPPPLSLAGPHPGMGDASNHMGQM

SEQ ID NO: 50172 - protein, 587 aa, Homo sapiens
MTSRDLGSHDNLSPPFVNSRIQSKTERGSYSSYGRESNLQGCHQQSLLGGDMDMGNPGTLSPTKPGSQYYQYSSNNPRRRPLHSSAMEVQTKKVRKVPPGLPSSVYAPSASTADYNRDSPGYPSSKPATSTFPSSFFMQDGHHSSDPWSSSSGMNQPGYAGMLGNSSHIPQSSSYCSLHPHERLSYPSHSSADINSSLPPMSTFHRSGTNHYSTSSCTPPANGTDSIMANRGSGAAGSSQTGDALGKALASIYSPDHTNNSFSSNPSTPVGSPPSLSGTAVWSRNGGQASSSPNYEGPLHSLQSRIEDRLERLDDAIHVLRNHAVGPSTAMPGGHGDMHGIIGPSHNGAMGGLGSGYGTGLLSANRHSLMVGTHREDGVALRGSHSLLPNQVPVPQLPVQSATSPDLNPPQDPYRGMPPGLQGQSVSSGSSEIKSDDEGDENLQDTKSSEDKKLDDDKKDIKSITSNNDDEDLTPEQKAEREKERRMANNARERLRVRDINEAFKELGRMVQLHLKSDKPQTKLLILHQAVAVILSLEQQVRERNLNPKAACLKRREEEKVSSEPPPLSLAGPHPGMGDASNHMGQM

SEQ ID NO: 50173 - protein, 528 aa, Homo sapiens
MTSRDLGSHDNLSPPFVNSRIQSKTERGSYSSYGRESNLQGCHQVYAPSASTADYNRDSPGYPSSKPATSTFPSSFFMQDGHHSSDPWSSSSGMNQPGYAGMLGNSSHIPQSSSYCSLHPHERLSYPSHSSADINSSLPPMSTFHRSGTNHYSTSSCTPPANGTDSIMANRGSGAAGSSQTGDALGKALASIYSPDHTNNSFSSNPSTPVGSPPSLSAGTAVWSRNGGQASSSPNYEGPLHSLQSRIEDRLERLDDAIHVLRNHAVGPSTAMPGGHGDMHGIIGPSHNGAMGGLGSGYGTGLLSANRHSLMVGTHREDGVALRGSHSLLPNQVPVPQLPVQSATSPDLNPPQDPYRGMPPGLQGQSVSSGSSEIKSDDEGDENLQDTKSSEDKKLDDDKKDIKSITSNNDDEDLTPEQKAEREKERRMANNARERLRVRDINEAFKELGRMVQLHLKSDKPQTKLLILHQAVAVILSLEQQVRERNLNPKAACLKRREEEKVSSEPPPLSLAGPHPGMGDASNHMGQM

SEQ ID NO: 50174 - protein, 591 aa, Homo sapiens
MTSRDLGSHDNLSPPFVNSRIQSKTERGSYSSYGRESNLQGCHQQSLLGGDMDMGNPGTLSPTKPGSQYYQYSSNNPRRRPLHSSAMEVQTKKVRKVPPGLPSSVYAPSASTADYNRDSPGYPSSKPATSTFPSSFFMQDGHHSSDPWSSSSGMNQPGYAGMLGNSSHIPQSSSYCSLHPHERLSYPSHSSADINSSLPPMSTFHRSGTNHYSTSSCTPPANGTDSIMANRGSGAAGSSQTGDALGKALASIYSPDHTNNSFSSNPSTPVGSPPSLSGTAVWSRNGGQASSSPNYEGPLHSLQSRIEDRLERLDDAIHVLRNHAVGPSTAMPGGHGDMHGIIGPSHNGAMGGLGSGYGTGLLSANRHSLMVGTHREDGVALRGSHSLLPNQVPVPQLPVQSATSPDLNPPQDPYRGMPPGLQGQSVSSGSSEIKSDDEGDENLQDTKSSEDKKLDDDKKDIKSITRSRSSNNDDEDLTPEQKAEREKERRMANNARERLRVRDINEAFKELGRMVQLHLKSDKPQTKLLILHQAVAVILSLEQQVRERNLNPKAACLKRREEEKVSSEPPPLSLAGPHPGMGDASNHMGQM

SEQ ID NO: 50175 - protein, 156 aa, Homo sapiens
MTTSISLQEAFDKLNPCPAGIIDQLSVIPNSNEPLKVTASVYIPAHGRLVCGREDGSIVIVPATQTAIVQLLQGEHMLRRGWPPHRTLRGHRNKVTCLLYPHQVSARYDQRYLISGGVDFSVIIWDIFSGEMKHIFCVHGGEITQLLVPPENCSVS

SEQ ID NO: 50176 - protein, 795 aa, Homo sapiens [sequence omitted]

SEQ ID NO: 50177 - protein, 32 aa, Homo sapiens
MGNRIEDLQKNVKDLMVQAGIENSIKEQMLKT

SEQ ID NO: 50178 - protein, 135 aa, Homo sapiens [sequence omitted]

SEQ ID NO: 50179 - protein, 1104 aa, Homo sapiens
MVCLGTGQSAGPLVSVQNHCPPCGLSPQESLGLALGQAQEPLHSLLEAAEDLAQELLALRSLVELRALLQRPRGTSGPLELLSEALCSVRGPSSTVGPSLNWYEASDLMELVGQEPESALPDSSLSPACSELIGALDSHPLSRLLWRRLKPLILGKLLFAPDTPFTRKLMAQVNRTFEELTLLRDVREVWEMLGPRIFTFMNDSSNVAMLQRLLQMQDEGRRQPRPGGRDHMEALRSFLDPGSGGYSWQDAHADVGHLVGTLGRVTECLSLDKLEAAPSEAALVSRALQLLAEHRFWAGVVFLGPEDSSDPTEHPTPDLGPGHVRIKIRMDIDVVTRTNKIRDRFWDPGPAADPLTDLRYVWGGFVYLQDLVERAAVRVLSGANPRAGLYLQQMPYPCYVDDVFLRVLSRSLPLFLTLAWIYSVTLTVKAVVREKETRLRDTMRAMGLSRAVLWLGWFLSCLGPFLLSAALLVLVLKLGDILPYSHPGVVFLFLAAFAVATVTQSFLLSAFFSRANLAAACGGLAYFSLYLPYVLCVAWRDRLPAGGRVAASLLSPVAFGFGCESLALLEEQGEGAQWHNVGTRPTADVFSLAQVSGLLLLDAALYGLATWYLEAVCPGQYGIPEPWNFPFRRSYWCGPRPPKSPAPCPTPLDPKVLVEEAPPGLSPGVSVRSLEKRFPGSPQPALRGLSLDFYQGHITAFLGHNGAGKTTTLSILSGLFPPSGGSAFILGHDVRSSMAAIRPHLGVCPQYNVLFDMLTVDEHVWFYGRLKGLSAAVVGPEQDRLLQDVGLVSKQSVQTRHLSGGMQRKLSVAIAFVGGSQVVILDEPTAGVDPASRRGIWELLLKYREGRTLILSTHHLDEAELLGDRVAVVAGGRLCCCGSPLFLRRHLGSGYYLTLVKARLPLTTNEKADTDMEGSVDTRQEKKNGSQGSRVGTPQLLALVQHWVPGARLVEELPHELVLVLPYTGAHDGSFATLFRELDTRLAELRLTGYGISDTSLEEIFLKVVEECAADTDMEDGSCGQHLCTGIAGLDVTLRLKMPPQETALENGEPAGSAPETDQGSGPDAVGRVQGWALTRQQLQALLLKRFLLARRSRRGLFAQ

SEQ ID NO: 50180 - protein, 156 aa, Homo sapiens
MHEFSAKDIDGHMVNLDKYRGFVCIVTNVASQGKTEVNYTQLVDLHARYAECGLRILAFPCNQFGKQEPGSNEEIKEFAAGYNVKFDMFSKICVNGDDAHPLWKWMKIQPKGKGILGNAIKWNFTKFLIDKNGCVVKRYGPMEEPLVIEKDLPHYF

SEQ ID NO: 50181 - protein, 1288 aa, Homo sapiens [sequence omitted]

SEQ ID NO: 50182 - protein, 366 aa, Homo sapiens
MKDKTTNQSRGFGFVKFKDPNCVGTVLASRPHTLDGRNIDPKPCTPRGMQPERTRPKEGWQKGPRSDNSKSNKIFVGGIPHNCGETELREYFKKFGVVTEVVMIYDAEKQRPRGFGFITFEDEQSVDQAVNMHFHDIMGKKVEVKRAEPRDSKSQAPGQPGASQWGSRVVPNAANGWAGQPPPTWQQGYGPQGMWVPAGQAIGGYGPPPAGRGAPPPPPPFTSYIVSTPPGGFPPPQGFPQGYGAPPQFSFGYGPPPPPPDQFAPPGVPPPPATPGAAPLAFPPPPSQAAPDMSKPPTAQPDFPYGQYAGYGQDLSGFGQGFSDPSQQPPSYGGPSVPGSGGPPAGGSGFGRGQNHNVQGFHPYRR

SEQ ID NO: 50183 - protein, 337 aa, Homo sapiens
MKDKTTNQSRGFGFVKFKDPNCVGTVLASRPHTLDGRNIDPKPCTPRGMQPERTRPKEGWQKGPRSDNSKSNKIFVGGIPHNCGETELREYFKKFGVVTEVVMIYDAEKQRPRGFGFITFEDEQSVDQAVNMHFHDIMGKKVEVKRAEPRDSKSQAPGQPGASQWGSRVVPNAANGWAGQPPPTWQQGYGPQGMWVPAGQAIGGYGPPPAGRGAPPPPPPFTSYIVSTPPGGFPPPQGFPQGYGAPPQFSFGYGPPPPPPDQFAPPGVPPPPATPGAAPLAFPPPPSQAAPDMSKPPTAQPDFPYGQYGLGSYSPAPPGCGPHFVYSLMVRLSSDVA

SEQ ID NO: 50184 - protein, 365 aa, Homo sapiens
MKDKTTNQSRGFGFVKFKDPNCVGTVLASRPHTLDGRNIDPKPCTPRGMQPERTRPKEGWQKGPRSDNSKSNKIFVGGIPHNCGETELREYFKKFGVVTEVVMIYDAEKQRPRGFGFITFEDEQSVDQAVNMHFHDIMGKKVEVKRAEPRDSKSQAPGQPGASQWGSRVVPNAANGWAGQPPPTWQQGYGPQGMWVPAGQAIGGYGPPPAGRGAPPPPPPFTSYIVSTPPGGFPPPQGFPQGYGAPPQFSFGYGPPPPPPDQFAPPGVPPPPATPGAAPLAFPPPPSQAAPDMSKPPTAQPDFPYGQYGYGQDLSGFGQGFSDPSQQPPSYGGPSVPGSGGPPAGGSGFGRGQNHNVQGFHPYRR

SEQ ID NO: 50185 - protein, 51 aa, Homo sapiens [sequence omitted]

SEQ ID NO: 50186 - protein, 303 aa, Homo sapiens
MVGVFFFMLLGSLLPVKIIETDFEKAHRSKKILSLCNTFGGGVFLATCFNALLPAVREKLQKVLSLGHISTDYPLAETILLLGFFMTVFLEQLILTFRKEKPSFIDLETFNAGSDVGSDSEYESPFMGGARGHALYVEPHGHGPSLSVQGLSRASPVRLLSLAFALSAHSVFEGLALGLQEEGEKVVSLFVGVAVHETLVAVALGISMARSAMPLRDAAKLAVTVSAMIPLGIGLGLGIESAQGVPGSVASVLLQGLAGGTFLFITFLEILAKELEEKSDRLLKVLFLVLGYTVLAGMVFLKW

SEQ ID NO: 50187 - protein, 595 aa, Homo sapiens
MLETFQNLASVDDETQFKASGSVSQQDIYGEKIPKESKIATFTRNVSWASVLGKIWDSLSIEDQTTNQGRNLRNHGLERLCESNDQCGEALSQIPHLNLYKKIPPGVKQYEYNTYGKVFMHRRTSLKSPITVHTGHKPYQCQECGQAYSCRSHLRMHVRTHNGERPYVCKLCGKTFPRTSSLNRHVRIHTAEKTYECKQCGKAFIDFSSLTSHLRSHTGEKPYKCKECGKAFSYSSTFRRHTITHTGEKPYKCKECAEAFSYSSTFRRHMISHTGEKPHKCKECGEAFSYSSAFRRHMITHTGEKPYECKQCGKTFIYLQSFRRHERIHTGEKPYECKQCGKTFIYPQSFRRHERTHGGEKPYECNQCGKAFSHPSSFRGHMRVHTGEKPYECKQCGKTFNWPISLRKHMRTHTREKPYECKQCGKAFSLSACFREHVRMHPEDKSYECKLCGKAFYCHISLQKHMRRHTAEKLYKCKQCGKAFSWPELLQQHVRTHTVEKPYECKECGKVFKWPSSLPIHMRLHTGEKPYQCKHCGKAFNCSSSLRRHVRIHTTEKQYKCNVGHPPANEFMCSASEKSHQERDLIKVVNMVLPL

SEQ ID NO: 50188 - protein, 498 aa, Homo sapiens
MSFRVSDLQMLLGFVGRSKSGLKHELVTRALQLVQFDCSPELFKKIKELYETRYAKKNSEPAPQPHRPLDPLTMHSTYDRAGAVPRTPLAGPNIDYPVLYGKYLNGLGRLPAKTLKPEVRLVKLPFFNMLDELLKPTELVPQNNEKLQESPCIFALTPRQVELIRNSRELQPGVKAVQVVLRICYSDTSCPQEDQYPPNIAVKVNHSYCSVPGYYPSNKPGVEPKRPCRPINLTHLMYLSSATNRITVTWGNYGKSYSVALYLVRQLTSSELLQRLKTIGVKHPELCKALVKEKLRLDPDSEIATTGVRVSLICPLVKMRLSVPCRAETCAHLQCFDAVFYLQMNEKKPTWMCPVCDKPAPYDQLIIDGLLSKILSECEDADEIEYLVDGSWCPIRAEKERSCSPQGAILVLGPSDANGLLPAPSVNGSGALGSTGGGGPVGSMENGKPGADVVDLTLDSSSSSEDEEEEEEEEEDEDEEGPRPKRRCPFQKGLVPAC

SEQ ID NO: 50189 - protein, 88 aa, Homo sapiens [sequence omitted]

SEQ ID NO: 50190 - protein, 50 aa, Homo sapiens
MSQNFDMFVSHYSSVSTPPCVHVYKLSGPDDDPLHKQPRFWASMMEAASE

SEQ ID NO: 50191 - protein, 420 aa, Homo sapiens
MAEESKNEYAAQLQRFNRDQAHFYFSQMPQIFDKLQDMDERRATRLGAGYGLLSEAELEVVPIIAKCLEGMKVAANAVDPKNDSHVLIELHKSGFARPGDVEFEDFSQPMNRAPSDSSLGTPSDGRPELRGPGRSRTKRWPFGKKNKPRPPPLSPLGGPVPSALPNGPPSPRSGRDPLAILSEISKSVKPRLASFRSLRGSRGTVVTEDFSHLPPEQQRKRLQQQLEERSRELQKEVDQREALKKMKDVYEKTPQMGDPASLEPQIAETLSNIERLKLEVQKYEAWLAEAESRVLSNRGDSLSRHARPPDPPASAPPDSSSNSASQDTKESSEEPPSEESQDTPIYTEFDEDFEEEPTSPIGHCVAIYHFEGSSEGTISMAEGEDLSLMEEDKGDGWTRVRRKEGGEGYVPTSYLRVTLN

SEQ ID NO: 50192 - protein, 364 aa, Homo sapiens [sequence omitted]

SEQ ID NO: 50193 - protein, 1345 aa, Homo sapiens [sequence omitted]

SEQ ID NO: 50194 - protein, 401 aa, Homo sapiens
MKTPTEEKPYECKECTKAFSCSSFFRAHMKIHIGKTNYECKECGKGFSCSSSLTEHKRIHSGDKPYECKECGKAFSCSSSLSKHKRIHSGDKPYECKECGKAFSSSSHLIIHIRIHTGEKPYECKECGKAFSESSKLTVHGRTHTGEKPYKCKECGKAYNCPSSLSIHMRKHTGEKPYECLECGKAFYLPTSLNTHVKNQSREKPYECKECGKAFSCPSSFRAHVRDHTGKIQYECKECGKTFSRSSSLTEHLRTHSGEKPYECKECGKAFISSSHLTVHIRTHTGEKPYECKKCGKAFIYPSALRIHMRTHTGEKPYECKECGKAFRHSSYLTVHARMHTGEKPFECLECGKAFSCPSSFRRHVRSHTGEKPYECKECGKAFVCPAYFRRHVKTHTRENI

SEQ ID NO: 50195 - protein, 398 aa, Homo sapiens
MVEDHRSNSYQDSVTFDDVAVEFTPEEWALLDTTQKYLYRDVMLENYMNLASVDFFFCLTSEWEIQPRTKRSSLQQGFLKNQIFTGIQMTRSYSGWKLCENCGEVFSEQFCLKTHMRAQNGGNTFEGNCYGKDSISVHKEASIGQELSKFNPCGKVFTLTPGLAVHLEILNGRQPYKCKECGKGFKYFASLDNHMGIHIGEKLCEFQECERAITTSSHLKQCVAVHTGKKSEKTKNCGKSFTNFSQLSAHAKTHKGEKSFECKECGRSFRNSSSFNVHIQIHTGIKPHKCTECGKAFTRSTHLTQHVRTHTGIKPYECKECGQAFTQYTGLAIHIRNHTGEKPYQCKECGKAFNRSSTLTQHRRIHTGEKPYECVECGKTFITSSHRSKHLKTHSGER

SEQ ID NO: 50196 - protein, 251 aa, Homo sapiens
MGGYLFSGSQAPQLSPALLRALGQKCPNLKRLCLHVADLSMVPITSLPSTLRTLELHSCEISMAWLHKQQDPTVLPLLECIVLDRVPAFRDEHLQGLTRFRALRSLVLGGTYRVTETGLDAGLQELSYLQRLEVLGCTLSADSTLLAISRHLRDVRKIRLTVRGLSAPGLAVLEGMPALESLCLQGPLVTPEMPSPTEILSSCLTMPKLRVLELQGLGWEGQEAEKILCKGLPHCMVIVRACPKESMDWWM

SEQ ID NO: 50197 - protein, 170 aa, Homo sapiens
MTLQLIKVQEGVGEGKVMFHSFVSKTEEELQAILEAKEKKLRLKAQRQAQQAQNVQRKQEQREAHRKKSLEGMKKARVGGSDEEASGIPSRTASLELDLFPEAKQKRLAKSPGRKRKRWEMDRGRGRLCDQKFPKTKDKSQGAQARRGPRGASRDGGRGRGRGRPGKRVA

SEQ ID NO: 50198 - protein, 183 aa, Homo sapiens
MAASMARGGVSARVLLQAARGTWWNRPGGTSGSGEGVALGTTRKFQATGSRPAGEEDAGGPERPGDVVNVVFVDRSGQRIPVSGRVGDNVLHLAQRHGVDLEGACEASLACSTCHVYVSEDHLDLLPPPEEREDDMLDMAPLLQENSRLGCQIVLTPELEGAEFTLPKITRNFYVDGHVPKPH

SEQ ID NO: 50199 - protein, 29 aa, Homo sapiens
MHTFASLTRNIRFSHQEHLWTQWPLRMWL

SEQ ID NO: 50200 - protein, 2039 aa, Homo sapiens
MIPLLQIGLLLFFAILIFAIIGLEFYMGKFHTTCFEEGTDDIQGESPAPCGTEEPARTCPNGTKCQPYWEGPNNGITQFDNILFAVLTVFQCITMEGWTDLLYNSNDASGNTWNWLYFIPLIIIGSFFMLNLVLGVLSGEFAKERERVENRRAFLKLRRQQQIERELNGYMEWISKAEEVILAEDETDGEQRHPFDGALRRTTIKKSKTDLLNPEEAEDQLADIASVGSPFARASIKSAKLENSTFFHKKERRMRFYIRRMVKTQAFYWTVLSLVALNTLCVAIVHYNQPEWLSDFLYYAEFIFLGLFMSEMFIKMYGLGTRPYFHSSFNCFDCGVIIGSIFEVIWAVIKPGTSFGISVLRALRLLRIFKVTKYWASLRNLVVSLLNSMKSIISLLFLLFLFIVVFALLGMQLFGGQFNFDEGTPPTNFDTFPAAIMTVFQILTGEDWNEVMYDGIKSQGGVQGGMVFSIYFIVLTLFGNYTLLNVFLAIAVDNLANAQELTKDEQEEEEAANQKLALQKAKEVAEVSPLSAANMSIAVKEQQKNQKPAKSVWEQRTSEMRKQNLLASREALYNEMDPDERWKAAYTRHLRPDMKTHLDRPLVVDPQENRNNNTNKSRAAEPTVDQRLGQQRAEDFLRKQARYHDRARDPSGSAGLDARRPWAGSQEAELSREGPYGRESDHHAREGSLEQPGFWEGEAERGKAGDPHRRHVHRQGGSRESRSGSPRTGADGEHRRHRAHRRPGEEGPEDKAERRARHREGSRPARGGEGEGEGPDGGERRRRHRHGAPATYEGDARREDKERRHRRRKENQGSGVPVSGPNLSTTRPIQQDLGRQDPPLAEDIDNMKNNKLATAESAAPHGSLGHAGLPQSPAKMGNSTDPGPMLAIPAMATNPQNAASRRTPNNPGNPSNPGPPKTPENSLIVTNPSGTQTNSAKTARKPDHTTVDIPPACPPPLNHTVVQVNKNANPDPLPKKEEEKKEEEEDDRGEDGPKPMPPYSSMFILSTTNPLRRLCHYILNLRYFEMCILMVIAMSSIALAAEDPVQPNAPRNNVLRYFDYVFTGVFTFEMVIKMIDLGLVLHQGAYFRDLWNILDFIVVSGALVAFAFTGNSKGKDINTIKSLRVLRVLRPLKTIKRLPKLKAVFDCVVNSLKNVFNILIVYMLFMFIFAVVAVQLFKGKFFHCTDESKEFEKDCRGKYLLYEKNEVKARDREWKKYEFHYDNVLWALLTLFTVSTGEGWPQVLKHSVDATFENQGPSPGYRMEMSIFYVVYFVVFPFFFVNIFVALIIITFQEQGDKMMEEYSLEKNERACIDFAISAKPLTRHMPQNKQSFQYRMWQFVVSPPFEYTIMAMIALNTIVLMMKFYGASVAYENALRVFNIVFTSLFSLECVLKVMAFGILNYFRDAWNIFDFVTVLGSITDILVTEFGNNFINLSFLRLFRAARLIKLLRQGYTIRILLWTFVQSFKALPYVCLLIAMLFFIYAIIGMQVFGNIGIDVEDEDSDEDEFQITEHNNFRTFFQALMLLFRSATGEAWHNIMLSCLSGKPCDKNSGILTRECGNEFAYFYFVSFIFLCSFLMLNLFVAVIMDNFEYLTRDSSILGPHHLDEYVRVWAEYDPAAWGRMPYLDMYQMLRHMSPPLGLGKKCPARVAYKRLLRMDLPVADDNTVHFNSTLMALIRTALDIKIAKGGADKQQMDAELRKEMMAIWPNLSQKTLDLLVTPHKSTDLTVGKIYAAMMIMEYYRQSKAKKLQAMREEQDRTPLMFQRMEPPSPTQEGGPGQNALPSTQLDPGGALMAHESGLKESPSWVTQRAQEMFQKTGTWSPEQGPPTDMPNSQPNSQSVEMREMGRDGYSDSEHYLPMEGQGRAASMPRLPAENQRRRGRPRGNNLSTISDTSPMKRSASVLGPKARRLDDYSLERVPPEENQRHHQRRRDRSHRASERSLGRYTDVDTGLGTDLSMTTQSGDLPSKERDQERGRPKDRKHRQHHHHHHHHHHPPPPDKDRYAQERPDHGRARARDQRWSRSPSEGREHMAHRQ

SEQ ID NO: 50201 - protein, 132 aa, Homo sapiens [sequence omitted]

SEQ ID NO: 50202 - protein, 346 aa, Homo sapiens [sequence omitted]

SEQ ID NO: 50203 - protein, 1864 aa, Homo sapiens
MAGFTGTYCEVDIDECQSSPCVNGGVCKDRVNGFSCTCPSGFSGSTCQLDVDECASTPCRNGAKCVDQPDGYECRCAEGFEGTLCDRNVDDCSPDPCHHGRCVDGIASFSCACAPGYTGTRCESQVDECRSQPCRHGGKCLDLVDKYLCRCPSGTTGVNCEVNIDDCASNPCTFGVCRDGINRYDCVCQPGFTGPLCNVEINECASSPCGEGGSCVDGENGFRCLCPPGSLPPLCLPPSHPCAHEPCSHGICYDAPGGFRCVCEPGWSGPRCSQSLARDACESQPCRAGGTCSSDGMGFHCTCPPGVQGRQCELLSPCTPNPCEHGGRCESAPGQLPVCSCPQGWQGPRCQQDVDECAGPAPCGPHGICTNLAGSFSCTCHGGYTGPSCDQDINDCDPNPCLNGGSCQDGVGSFSCSCLPGFAGPRCARDVDECLSNPCGPGTCTDHVASFTCTCPPGYGGFHCEQDLPDCSPSSCFNGGTCVDGVNSFSCLCRPGYTGAHCQHEADPCLSRPCLHGGVCSAAHPGFRCTCLESFTGPQCQTLVDWCSRQPCQNGGRCVQTGAYCLCPPGWSGRLCDIRSLPCREAAAQIGVRLEQLCQAGGQCVDEDSSHYCVCPEGRTGSHCEQEVDPCLAQPCQHGGTCRGYMGGYMCECLPGYNGDNCEDDVDECASQPCQHGGSCIDLVARYLCSCPPGTLGVLCEINEDDCGPGPPLDSGPRCLHNGTCVDLVGGFRCTCPPGYTGLRCEADINECRSGACHAAHTRDCLQDPGGGFRCLCHAGFSGPRCQTVLSPCESQPCQHGGQCRPSPGPGGGLTFTCHCAQPFWGPRCERVARSCRELQCPVGVPCQQTPRGPRCACPPGLSGPSCRSFPGSPPGASNASCAAAPCLHGGSCRPAPLAPFFRCACAQGWTGPRCEAPAAAPEVSEEPRCPRAACQAKRGDQRCDRECNSPGCGWDGGDCSLSVGDPWRQCEALQCWRLFNNSRCDPACSSPACLYDNFDCHAGGRERTCNPVYEKYCADHFADGRCDQGCNTEECGWDGLDCASEVPALLARGVLVLTVLLPPEELLRSSADFLQRLSAILRTSLRFRLDAHGQAMVFPYHRPSPGSEPRARRELAPEVIGSVVMLEIDNRLCLQSPENDHCFPDAQSAADYLGALSAVERLDFPYPLRDVRGEPLEPPEPSVPLLPLLVAGAVLLLVILVLGVMVARRKREHSTLWFPEGFSLHKDVASGHKGRREPVGQDALGMKNMAKGESLMGEVATDWMDTECPEAKRLKVEEPGMGAEEAVDCRQWTQHHLVAADIRVAPAMALTPPQGDADADGMDVNVRGPDGFTPLMLASFCGGALEPMPTEEDEADDTSASIISDLICQGAQLGARTDRTGETALHLAARYARADAAKRLLDAGADTNAQDHSGRTPLHTAVTADAQGVFQILIRNRSTDLDARMADGSTALILAARLAVEGMVEELIASHADVNAVDELGKSALHWAAAVNNVEATLALLKNGANKDMQDSKEETPLFLAAREGSYEAAKLLLDHFANREITDHLDRLPRDVAQERLHQDIVRLLDQPSGPRSPPGPHGLGPLLCPPGAFLPGLKAAQSGSKKSRRPPGKAGLGPQGPRGRGKKLTLACPGPLADSSVTLSPVDSLDSPRPFGGPPASPGGFPLEGPYAAATATAVSLAQLGGPGRAGLGRQPPGGCVLSLGLLNPVAVPLDWARLPPPAPPGPSFLLPLAPGPQLLNPGTPVSPQERPPPYLAVPGHGEEYPAAGAHSSPPKARFLRVPSEHPYLTPSPESPEHWASPSPPSLSDWSESTPSPATATGAMATTTGALPAQPLPLSVPSSLAQAQTQLGPQPEVTPKRQVLA

SEQ ID NO: 50204 - protein, 584 aa, Homo sapiens
MATSHSWEMPSSDTNANTSASGSASADSVLSRINQRLDMVPHLETDMMQGGVYGSGGERYDSYESCDSRAVLSERDLYRSGYDYSELDPEMEMAYEGQYDAYRDQFRMRGNDTFGPRAQGWARDARSGRPMASGYGRMWEDPMGARGQCMSGASRLPSLFSQNIIPEYGMFQGMRGGGAFPGGSRFGFGFGNGMKQMRRTWKTWTTADFRTKKKKRKQGGSPDEPDSKATRTDCSDNSDSDNDEGTEGEATEGLEGTEAVEKGSRVDGEDEEGKEDGREEGKEDPEKGALTTQDENGQTKRKLQAGKKSQDKQKKRQRDRMVERIQFVCSLCKYRTFYEDEMASHLDSKFHKEHFKYVGTKLPKQTADFLQEYVTNKTKKTEELRKTVEDLDGLIQQIYRDQDLTQEIAMEHFVKKVEAAHCAACDLFIPMQFGIIQKHLKTMDHNRNRRLMMEQSKKSSLMVARSILNNKLISKKLERYLKGENPFTDSPEEEKEQEEAEGGALDEGAQGEAAGISEGAEGVPAQPPVPPEPAPGAVSPPPPPPPEEEEEGAVPLLGGALQRQIRGIPGLDVEDDEEGGGGAP

SEQ ID NO: 50205 - protein, 109 aa, Homo sapiens
MPTREPPKTRGSRGHLHTHPPGPGPPLQGLAPRGLKTSAPRPPCQPQPGPHKAKTKKIVFEDELLSQALLGAKKPIGAIPKGHKPRPHPVPDYELRRPKLQPGFGGSLR

SEQ ID NO: 50206 - protein, 401 aa, Homo sapiens
MKSRRDKLHIPALTLDLSPSSQSPSLLGPSSPCSPCSPSLGLHPWSCRSGNRKSLVVGTPSPTLSRPLSPLSVPTAGSSPLDSPRNFSAASALNFPFARRADGRRWSLASLPSSGYGTNTPSSTLSSSSSSRERLHQLPFQPTPDELHFLSKHFRSSENVLDEEGGRSPRLRPRSRSLSPGRATGTFDNEIVMMNHVYRERFPKATAQMEGRLQEFLTAYAPGARLALADGVLGFIHHQIVELARDCLAKSGENLVTSRYFLEMQEKLERLLQDAHERSDSEEVSFIVQLVRKLLIIISRPARLLECLEFDPEEFYHLLEAAEGHAREGQGIKTDLPQYIIGQLGLAKDPLEEMVPLSHLEEEQPPAPESPESRALVGQSRRKPCESDFETIKLISNGAYG

SEQ ID NO: 50207 - protein, 162 aa, Homo sapiens
MLDRFEKTNEMLLNFNNLSSARLQQMSERFLHHTRTLVEMKRDLDSIFRRIRLHCALKCLGQFQPWDKILTTLKGKLARQHPEAFSHIPEASFLEEEDEDPIPPSTTTTIATSEQSTGSCDTSPDTVSPSLSPGFEDLSHVQPGSPAINGRSQTDDEEMTGE

SEQ ID NO: 50208 - protein, 462 aa, Homo sapiens
MHRLAPHCSFARWLLCNGSLFRYKHPSEEELRALAGKPRPRGRKERWANGLSEEKPLSVPRDAPFQLETCPLTTVDALVLRFFLEYQWFVDFAVYSGGVYLFTEAYYYMLGPAKETNIAVFWCLLTVTFSIKMFLTVTRLYFSAEEGGERSVCLTFAFLFLLLAMLVQVVREETLELGLEPGLASMTQNLEPLLKKQGWDWALPVAKLAIRVGLAVVGSVLGAFLTFPGLRLAQTHRDALTMSEDRPMLQFLLHTSFLSPLFILWLWTKPIARDFLHQPPFGETRFSLLSDSAFDSGRLWLLVVLCLLRLAVTRPHLQAYLCLAKARVEQLRREAGRIEAREIQQRVVRVYCYVTVVSLQYLTPLILTLNCTLLLKTLGGYSWGLGPAPLLSPDPSSASAAPIGSGEDEVQQTAARIAGALGGLLTPLFLRGVLAYLIWWTAACQLLASLFGLYFHQHLAGS

SEQ ID NO: 50209 - protein, 75 aa, Homo sapiens
MPLTFLAVWSSTTCGCLGRRCETSRGCLLQEALREAQQSPSFCTEGLLVPLGKGPLPPPVQKLPLKSVLGFPSSG

SEQ ID NO: 50210 - protein, 641 aa, Homo sapiens
MDNRDVAGKANRWFGVAPPKSGKMNMNILHQEELIAQKKREIEAKMEQKAKQNQVASPQPPHPGEITNAHNSSCISNKFANDGSFLQQFLKLQKAQTSTDAPTSAPSAPPSTPTPSAGKRSLLISRRTGLGLASLPGPVKSYSHAKQLPVAHRPSVFQSPDEDEEEDYEQWLEIKVSPPEGAETRKVIEKLARFVAEGGPELEKVAMEDYKDNPAFAFLHDKNSREFLYYRKKVAEIRKEAQKSQAASQKVSPPEDEEVKNLAEKLARFIADGGPEVETIALQNNRENQAFSFLYEPNSQGYKYYRQKLEEFRKAKASSTGSFTAPDPGLKRKSPPEALSGSLPPATTCPASSTPAPTIIPAPAAPGKPASAATVKRKRKSRWGPEEDKVELPPAELVQRDVDASPSPLSVQDLKGLGYEKGKPVGLVGVTELSDAQKKQLKEQQEMQQMYDMIMQHKRAMQDMQLLWEKAVQQHQHGYDSDEEVDSELGTWEHQLRRMEMDKTREWAEQLTKMGRGKHFIGDFLPPDELEKFMETFKALKEGREPDYSEYKEFKLTVENIGYQMLMKMGWKEGEGLGSEGQGIKNPVNKGTTTVDGAGFGIDRPAELSKEDDEYEAFRKRMMLAYRFRPNPLNNPRRPYY

SEQ ID NO: 50211 - protein, 366 aa, Homo sapiens
MPPLVRGAQQIHSIRQHSSTGPPPLLLAPRASVPSVQIQGQRIIQQGLIRVANVPNTSLLVNIPQPTPASLKGTTATSAQANSTPTSVASVVTSAESPASRQAAAKLALRKQLEKTLLEIPPPKPPAPEMNFLPSAANNEFIYLVGLEEVVQNLLETQAGRMSAATVLSREPYMCAQCKTDFTCRWREEKSGAIMCENCMTTNQKKALKVEHTSRLKAAFVKALQQEQEIEQRLLQQGTAPAQAKAEPTAAPHPVLKQASSQLSRGSATTPRGVLHTFSPSPKLQNSASATALVSRTGRHSERTVSAGKGSATSNWKKTPLSTGGTLAFVSPSLAVHKSSSAVDRQREYLLDMIPPRSIPQSATWK

SEQ ID NO: 50212 - protein, 412 aa, Homo sapiens
MLENYRNLIFLGIVVSKPNLITCLEQGKKPLTMKRHEMIAKPPVMYSHFAQDLWSEQSIKDSFQKVILRRYEKCRHDNLQLKKGCESVDECPVHKRGYNGLKQCLATTQRKIFQCDEYVKFLHKFSNSNKHKIRDTGKKSFKCIEYGKTFNQSSTRTTYKKIDAGEKRYKCEECGKAYKQSSHLTTHKKIHTGEKPYKCEECGKAYKQSCNLTTHKIIHTGEKPYRCRECGKAFNHPATLFSHKKIHTGEKPYKCDKCGKAFISSSTLTKHEIIHTGEKPYKCEECGKAFNRSSNLTKHKRIHTGDVPYKCDECGKTFTWYSSLSKHKRAHTGEKPYKCEECGKAFTAFSTLTEHKIIHTGEKPYKCEECGKAFNWSSALNKHKKIHIRQKPCIVKNVENLLNVPQPLISIR

SEQ ID NO: 50213 - protein, 722 aa, Homo sapiens
MANLSYIKNFRFSSLAKDELGYCLTSFEAAIEYIRQGSLSAKPPESEGFGDRLFLKQRMSLLSQMTSSPTDCLFKHIASGNQKEVERLLSQEDHDKDTVQKMCHPLCFCDDCEKLVSGRLNDPSVVTPFSRDDRGHTPLHVAAVCGQASLIDLLVSKGAMVNATDYHGATPLHLACQKGYQSVTLLLLHYKASAEVQDNNGNTPLHLACTYGHEDCVKALVYYDVESCRLDIGNEKGDTPLHIAARWGYQGVIETLLQNGASTEIQNRLKETPLKCALNSKILSVMEAYHLSFERRQKSSEAPVQSPQRSVDSISQESSTSSFSSMSASSRQEETKKDYREVEKLLRAVADGDLEMVRYLLEWTEEDLEDAEDTVSAADPEFCHPLCQCPKCAPAQKRLAKVPASGLGVNVTSQDGSSPLHVAALHGRADLIPLLLKHGANAGARNADQAVPLHLACQQGHFQVVKCLLDSNAKPNKKDLSGNTPLIYACSGGHHELVALLLQHGASINASNNKGNTALHEAVIEKHVFVVELLLLHGASVQVLNKRQRTAVDCAEQNSKIMELLQVVPSCVASLDDVAETDRKEYVTVKIRKKWNSKLYDLPDEPFTRQFYFVHSAGQFKGKTSREIMARDRSVPNLTEGSLHEPGRQSVTLRQNNLPAQSGSHAAEKGNSDWPERPGLTQTGPGHRRMLRRHTVEDAVVSQGPEAAGPLSTPQEVSASRS

SEQ ID NO: 50214 - protein, 837 aa, Homo sapiens [sequence omitted]

SEQ ID NO: 50215 - protein, 356 aa, Homo sapiens
MGSYGPFGRMPTYSQFSPSSLVGQQFGAVGVAGSSLTSFGTETSNSGTLPQSSAVGSAFTQDTRSLKTQLSQGRSSPQLDPLRKSPTMEQAVQTASAHLPAPAAVGRRSPVSTRPLPSASQKAGENQEHRRAEVHKVSRPENEQLRNDNKRQVAPGAPSAPRRGRGGHRGGRGRFGIRRDGPMKFEKDFDFESANAQFNKEEIDREFHNKLKLKEDKLEKQEKPVNGEDKGDSGVDTQNSEGNADEEDPLGPNCYYDKTKSFFDNISCDDNRERRPTWAEERRLNAETFGIPLRPNRGRGGYRGRGGLGFRGGRGRGGGRGGTFTAPRGFRGGFRGGRGGREFADFEYRKTTAFGP

SEQ ID NO: 50216 - protein, 356 aa, Homo sapiens
MGSYGPFGRMPTYSQFSPSSLVGQQFGAVGVAGSSLTSFGTETSNSGTLPQSSAVGSAFTQDTRSLKTQLSQGRSSPQLDPLRKSPTMEQAVQTASAHLPAPAAVGRRSPVSTRPLPSASQKAGENQEHRRAEVHKVSRPENEQLRNDNKRQVAPGAPSAPRRGRGGHRGGRGRFGIRRDGPMKFEKDFDFESANAQFNKEEIDREFHNKLKLKEDKLEKQEKPVNGEDKGDSGVDTQNSEGNADEEDPLGPNCYYDKTKSFFDNISCDDNRERRPTWAEERRLNAETFGIPLRPNRGRGGYRGRGGLGFRGGRGRGGGRGGTFTAPRGFRGGFRGGRGGREFADFEYRKDNKVAA

SEQ ID NO: 50217 - protein, 133 aa, Homo sapiens [sequence omitted]

SEQ ID NO: 50218 - protein, 368 aa, Homo sapiens
MVQNYENLVSVAGLSVTKPYVIMLLEDGKEPWMMEKKLSKDWESRWENKELSTKKDIYDEDSPQPVTMEKVVKQSYEFSNSNKNLEYTECDTFRSTFHSKSTLSEPQNNSAEGNSHKYDILKKNLSKKSVIKSERINGGKKLLNSNKSGAAFNQSKSLTLPQTCNREKIYTCSECGKAFGKQSILSRHWRIHTGEKPYECRECGKTFSHGSSLTRHQISHSGEKPYKCIECGKAFSHGSSLTNHQSTHTGEKPYECMNCGKSFSRVSLLIQHLRIHTQEKRYECRICGKAFIHSSSLIHHQKSHTGEKPYECRECGKAFCCSSHLTQHQRIHSMKKKYECNKCLKVFSSFSFLVQHQSIHTEEKPFEV

SEQ ID NO: 50219 - protein, 497 aa, Homo sapiens
MDKVAHEINHGIGQAGKEAEKLGHGVNNAAGQVGKEADKLIHHGVHHGANQAGSEAGKFGQGVDNAAGQAGNEAGRFGQGVHHAAGQAGNEAGRFGQGVHHAAGQAGNEAGRFGQGAHHGLSEGWKETEKFGQGIHHAAGQVGKEAEKFGQGAHHAAGQAGNEAGRFGQGVHHGLSEGWKETEKFGQGVHHTAGQVGKEAEKFGQGAHHAAGQAGNEAGRFGQGAHHAAGQAGNEAGRFGQGVHHGLSEGWKETEKFGQGVHHAASQFGKETEKLGHGVHHGVNEAWKEAEKFGQGVHHAASQVGKEEDRVVQGLHHGVSQAGREAGQFGHDIHHTAGQAGKEGDIAVHGVQPGVHEAGKEAGQFGQGVHHTLEQAGKEADKAVQGFHTGVHQAGKEAEKLGQGVNHAADQAGKEVEKLGQGAHHAAGQAGKELQNAHNGVNQASKEANQLLNGNHQSGSSSHQGGATTTPLASGASVNTPFINLPALWRSVANIMP

SEQ ID NO: 50220 - protein, 92 aa, Homo sapiens
MNVCDNLGDHLVGNVYVKFRREEDGERAVAELSNRWFNGQAVHGNVPEVASATSCICGPFPRTSRGSSMGGDPGAGWSAKAQSWLSATSASQ

SEQ ID NO: 50221 - protein, 1024 aa, Homo sapiens
MVSRDVLGGWCRDSEFRCKTKDSCLPKEIYEVTSSQWVRMEKCHSLVGSSVRDDWECKGQFQHQDINQERYLEKAIMTYETTPTFCLQTSLTLHHRIHPGEKLYKSTECMAFKYGSELTQQQETHTGEKLYKCKECGKAFHHFSYLVKHQRIHTGEKPCACKEYGKAFISGSHLIQHQKMYTDERPHECQESVKAFRPSAHLIQHWRIHTGDKPYECKECGKSFTSGSTLNQHQQIHTGEKPYHCKQCGKSFTVGSTLIRHQQIHTGEKPYDCKECGKSFASGSALIRHQRIHTGEKPYDCKECGKSFTFHSALIRHQRIHTGEKPYDCKECGKSFTFRSGLIGHQAIHTGEKPYDCKECGKSFTAGSTLIQHQRIHTGEKPYDCKECGKSFASGSALLQHQRIHTGEKPYCCKECGKSFTFRSTRNRHQRIHTGEKPYNCKECGKSFASGSALLQHQRIHTGEKPYHCKECGKSFTFRSGLIGHQAVHTGEKPYDCKECGKSFTSRSALIQHQRIHTGEKPYHCKECGKSFTVGSTLLQHQQIHTGEKPYDCKECGKAFRLRLRLTQHQQIHTGEKPYQCQECGKAFVSVSGLTQHHRIHTGEKPYECPDCGKAFRQRTYLNQHRRIHTGEKPYECKECGKSFTFCSGLIQHQQNHTDEKPYDGKECGKSFTSHSTLIQHQQIHTGEKPYDCKECGKSFTSHSTLIQHQQIHTGEKLYDCKECGKSFTSHSTLIQHQPLHTGEKPYHCKECGKSFTLRSALIQHRPVHTGEKRYSCKECGKSFTSRSTLIEHQRIHTGEKPYHCKECGKSFAFRSAIIQHRRIHTGEKPYDCKECGKAFRRRSKLTQHQRIHTGEKPYRCHECGKAFVRFSGLTKHHSIHTGEKPYECKTCGKSFRQRTHLTLHQRIHTGDRPYECKECGKSFTCGSELIRHQRTHTGEKPYDCKECGKAFRCPSQLSQHKRIHTGEKTYQCPECGKAFFYASGLSRHQSVHTGEKPYECKTCGKAFKQLTQLTRHQRIHDLT

SEQ ID NO: 50222 - protein, 632 aa, Homo sapiens
MMFRDVAVDFSQEEWECLDLEQRDLYRDVMLENYSNMVSLGFCIYQPEAFSLLEKGKEPWKILRDETRGPCPDMQSRCQTKKLLPKNGIFEREIAQLEIMRICKNHSLDCLCFRGDWEGNTQFQTLQDNQEECFKQVIRTCEKRPTFNQHTVFNLHQRLNTGDKLNEFKELGKAFISGSDHTQHQLIHTSEKFCGDKECGNTFLPDSEVIQYQTVHTVKKTYECKECGKSFSLRSSLTGHKRIHTGEKPFKCKDCGKAFRFHSQLSVHKRIHTGEKSYECKECGKAFSCGSDLTRHQRIHTGEKPYECNECRKAFSQRSHLIKHQRIHTGEKPYECKECGKAFTRGSHLTQHQRIHTGEKSHECKECGKAFIRGSNLAQHQNVHVGRKPYKCEKCGKAYIWSSHLARHQRIHTGRKPYECKQCGKTFTWASYLAQHEKIHNERKSYECKECGKTFLHGSEFNRHQKIHTGERNYECKECGKTFFRGSELNRHQKIHTGKRPYECEECGKAFLWGSQLTRHQRMHTGEEPYVCKECGKSFIWGSQLTRHKKIHTDAEPYGCKKSSHIFSHHSYFTEQKIHNSANLCEWTDYGNTFSHESNFAQHQNIYTFEKSYEFKDFEKAFSSSSHFISLL

SEQ ID NO: 50223 - protein, 654 aa, Homo sapiens
MLENYSNLVSLDLPSRCASKDLSPEKNTYETELSQWEMSDRLENCDLEESNSRDYLEAKGKMEKQQENQKEYFRQGMIIYDKMSIFNQHTYLSQHSRCHSTEKPYKCKECGKAFRRASHLTQHQSIHTGEKPYECKQCGKAFSRDSQLSLHQRLHTGEKPYACKECGKAFTQSSQLILHHRIHTGEKPYKCEECGKAFIRSSQLTRHQKVHTGEKPYECKECGKAFTQNSQLTLHQRLHTGEKLYECKECRKVFTQLSQLILHKRIHTGEKPYECKECGKAFICGSQLSQHQKIHNGEKPYECKECGRAFIRGSLLMQHQRIHTGEKPYKCEECGKAFIRGSQLTQHQRIHTNEKPYECKECGKMFSHGSQLTQHQRIHTGEKPYQCKECGKAFNRGSLLTRHQRIHTGEKPYECKECGKTFSRGSELTQHERIHTGEKPYECKECGKSFIRGSQLTQHQRIHTGEKPYECKECRMAFTQSSHLSQHQRLHTGEKPYVCNECGKAFARGLLLIQHQRIHTGEKPYQCKECGKAFIRGSQLTQHQRIHTGEKPYECKECGKAFSHGSQLTLHQRIHTGEKPYECRECRKAFTQSSHLSRHQRIHTGEKPYQCKECGKAFTRGSQLTQHQRIHISEKSFEYKECGIDFSHGSQVYM

SEQ ID NO: 50224 - protein, 441 aa, Homo sapiens
MLENYGNLVSMGLYTPKPQVISLLEQGKEPWMVGRELTRGLCSDLESMCETKLLSLKKEVYEIELCQREIMGLTKHGLEYSSFGDVLEYRSHLAKQLGYPNGHFSQEIFTPEYMPTFIQQTFLTLHQIINNEDRPYECKKCGKAFSQNSQFIQHQRIHIGEKSYECKECGKFFSCGSHVTRHLKIHTGEKPFECKECGKAFSCSSYLSQHQRIHTGKKPYECKECGKAFSYCSNLIDHQRIHTGEKPYECKVCGKAFTKSSQLFQHARIHTGEKPYECKECGKAFTQSSKLVQHQRIHTGEKPYECKECGKAFSSGSALTNHQRIHTGEKPYDCKECGKAFTQSSQLRQHQRIHAGEKPFECLECGKAFTQNSQLFQHQRIHTDEKPYECNECGKAFNKCSNLTRHLRIHTGEKPYNCKECGKAFSSGSDLIRHQGIHTNK

SEQ ID NO: 50225 - protein, 27 aa, Homo sapiens
MYRVWKSLQPEIKSCSTSEDSYWRKTL

SEQ ID NO: 50226 - protein, 660 aa, Homo sapiens
MENYDNLVSLGHSVSKPDLITLLEQGKEPWMIVREETRGECTDLDSRCEIISDGKMQLYRKHSCVTLHQRIHNGQKPYECKQCQKSFSHLTELMVHQTIHTSEEPDQCEKFRKAFSHLTDLRKHQKINAREKPYECEECGKVFSYPANLAQHGKVHVEKPYECKECGEAFRTSRQLTVHHRFHYGEKPYECKECGKAFSVYGRLSRHQSIHTGEKPFECNKCGKSFRLKAGLKVHQSIHTGEKPHECKECGKAFRQFSHLVGHKRIHTGEKPYECKECGKGFTCRYQLTMHQRIYSGEKHYECKENGEAFSSGHQLTAPHTFESVEKPYKCEECGKAFSVHGRLTRHQGIHSGKKPYECNKCGKSFRLNSSLKIHQNIHTGEKPYKCKECGKAFSQRAHLAHHNRIHTGYKPFECKECGKSFRCASYLVIHERIHTGEKPYVCQECGKGFSYSHKLTIHRRVHTGEKPYECKECGKAFSVSGQLTQHLSIHSGKKPFECNKCGKSFRFISVLKAHQNIHSAEKPYECKECGKAFRHATSLIYHDRTHAGEKSYECKECGETFSHASHLIIHERIHTSDKPYECKRCGKAFHCASYLVRHESVHADGNPYMCEECGKAFNSSHELSIHHRVHTGEKPFKCNKCRRSFRLRSILEVHQRIHI

SEQ ID NO: 50227 - protein, 235 aa, Homo sapiens [sequence omitted]

SEQ ID NO: 50228 - protein, 215 aa, Homo sapiens
MAMAYGSSLAAQGKELVDKNIDRFIPITKLKYYFAVDTMYVGRKLGLLFFPYLHQDWEVQYQQDTPVAPRFDVNAPDLYIPAMAFITYVLVAGLALGTQDRFSPDLLGLQASSALAWLTLEVLAILLSLYLVTVNTDLTTIDLVAFLGYKYVGMIGGVLMGLLFGKIGYYLVLGWCCVAIFVFMFPLLPGAVAHACNPSTLGGRGGRITRSGRCG

SEQ ID NO: 50229 - protein, 257 aa, Homo sapiens
MYEQLKGEWNRKSPNLSKCGEELGRLKLVLLELNFLPTTGTKLTKQQLILARDILEIGAQWSILRKDIPSFERYMAQLKCYYFDYKEQLPESAYMHQLLGLNLLFLLSQNRVAEFHTELERLPAKDIQTNVYIKHPVSLEQYLMEGSYNKVFLAKGNIPAESYTFFIDILLDTIRDEIAGCIEKAYEKILFTEATRILFFNTPKKMTDYAKKRGWVLGPNNYYSFASQQQKPEDTTIPSTELAKQVIEYARQLEMIV

SEQ ID NO: 50230 - protein, 70 aa, Homo sapiens [sequence omitted]

SEQ ID NO: 50231 - protein, 1114 aa, Homo sapiens
MTAVAWYINDMKRKQEHAARLQEVQRRLGGWTGPELSAFGELVLEGAFRGGGGGGPRLRGGERLLFLFSRMLLVAKRRGLEYTYKGHIFCCNLSVSESPRDPLGFKVSDLTIPKHRHLLQAKNQEEKRLWIHCLQRLFFENHPASIPAKAKQVLLENSLHCAPKSKPVLEPLTPPLGSPRPRDARSFTPGRRNTAPSPGPSVIRRGRRQSEPVKDPYVMFPQNAKPGFKHAGSEGELYPPESQPPVSGSAPPEDLEDAGPPTLDPSGTSITEEILELLNQRGLRDPGPSTHDIPKFPGDSQVPGDSETLTFQALPSRDSSEEEEEEEEGLEMDERGPSPLHVLEGLESSIAAEMPSIPCLTKIPDVPNLPEIPSRCEIPEGSRLPSLSDISDVFEMPCLPAIPSVPNTPSLSSTPTLSCDSWLQGPLQEPAEAPATRRELFSGSNPGKLGEPPSGGKAGPEEDEEGVSFTDFQPQDVTQHQGFPDELAFRSCSEIRSAWQALEQGQLARPGFPEPLLILEDSDLGGDSGSGKAGAPSSERTASRVRELARLYSERIQQMQRAETRASANAPRRRPRVLAQPQPSPCLPQEQAEPGLLPAFGHVLVCELAFPLTCAQESVPLGPAVWVQAAIPLSKQGGSPDGQGLHVSNLPKQDLPGIHVSAATLLPEQGGSRHVQAPAATPLPKQEGPLHLQVPALTTFSDQGHPEIQVPATTPLPEHRSHMVIPAPSTAFCPEQGHCADIHVPTTPALPKEICSDFTVSVTTPVPKQEGHLDSESPTNIPLTKQGGSRDVQGPDPVCSQPIQPLSWHGSSLDPQGPGDTLPPLPCHLPDLQIPGTSPLPAHGSHLDHRIPANAPLSLSQELPDTQVPATTPLPLPQVLTDIWVQALPTSPKQGSLPDIQGPAAAPPLPEPSLTDTQVQKLTPSLEQKSLIDAHVPAATPLPERGGSLDIQGLSPTPVQTTMVLSKPGGSLASHVARLESSDLTPPHSPPPSSRQLLGPNAAALSRYLAASYISQSLARRQGPGGGAPAASRGSWSSAPTSRASSPPPQPQPPPPPARRLSYATTVNIHVGGGGRLRPAKAQVRLNHPALLASTQESMGLHRAQGAPDAPFHM

SEQ ID NO: 50232 - protein, 799 aa, Homo sapiens
MLENYSHLISLGSSISKPDVITLLEQEKEPWIVVSKETSRWYPDLESKYGPEKISPENDIFEINLPKHVIKQISKTLGLEAFYFRNDSEYRSRFEGRQGHQEGYINQKIISYEEMPAYTHASPIHNTHKPYECKECGKYFSCGSNLIQHQSIHTGEKPYKCKECGKAFQLHIQLTRHQKFHTGEKTFECKECGKAFNLPTQLNRHKNIHTVKKLFECKECGKSFNRSSNLTQHQSIHAGVKPYQCKECGKAFNRGSNLIQHQKIHSNEKPFVCRECEMAFRYHYQLIEHCRIHTGEKPFECKECRKAFTLLTKLVRHQKIHMGEKPFECRECGKAFSLLNQLNRHKNIHTGEKPFECKECGKSFNRSSNLIQHQSIHADVKPYECKECGKGFNRGANLIQHQKIHSNEKPFVCRECEMAFRYHYQLIQHCQIHTGGKPFECKECGKAFSLLTQLARHKNIHTGEKPFECKDCGKAFNRGSNLVQHQSIHTGEKPYECKECGKAFRLHLQLSQHEKTHTGEKPFECKECGKFFRRGSNLNQHRSIHTGKKPFECKECGKAFRLHMHLIRHQKFHTGEKPFECKECGKAFSLHTQLNHHKNIHTGEKPFKCKECGKSFNRVSNLVQHQSIHAGVKPYECKECGKGFSRVSNLIQHQKTHSSAKPFVCKECRKTFRYHYQLTEHYRIHTGEKPFECKECGKAFGLLTQLAQHQIIHTGEKPFKCKECGKAFNRGSNLVQPQSIHTGEKPYECKECGKAFRLHLQLSLHQKLVQVRNPLNVRNVGQPSDISSNLLNIRKFILG

SEQ ID NO: 50233 - protein, 345 aa, Homo sapiens [sequence omitted]

SEQ ID NO: 50234 - protein, 485 aa, Homo sapiens
MYQELKVPAEEPANELPMNEIEAWKAAEKKARWVLLVLILAVVGFGALMTQLFLWEYGDLHLFGPNQRPAPCYDPCEAVLVESIPEGLDFPNASTGNPSTSQAWLGLLAGAHSSLDIASFYWTLTNNDTHTQEPSAQQGEEVLRQLQTLAPKGVNVRIAVSKPSGPQPQADLQALLQSGAQVRMVDMQKLTHGVLHTKFWVVDQTHFYLGSANMDWRSLTQVKELGVVMYNCSCLARDLTKIFEAYWFLGQAGSSIPSTWPRFYDTRYNQETPMEICLNGTPALAYLASAPPPLCPSGRTPDLKALLNVVDNARSFIYVAVMNYLPTLEFSHPHRFWPAIDDGLRRATYERGVKVRLLISCWGHSEPSMRAFLLSLAALRDNHTHSDIQVKLFVVPADEAQARIPYARVNHNKYMVTERATYIGTSNWSGNYFTETAGTSLLVTQNGRGGLRSQLEAIFLRDWDSPYSHDLDTSADSVGNACRLL

SEQ ID NO: 50235 - protein, 1421 aa, Homo sapiens
MPLANHRDDEHGVASMVSVHVEHPQEASVVVHQVERVSGPWEEADAEAVARAEAAARAEAAAPYTVLAQSAPREDGYSDASGFGYCFRELRGGECASPLPGLRTQEVCCRGAGLAWGVHDCQLCSERLGNSERVSAPDGPCPTGFERVNGSCEDVDECATGGRCQHGECANTRGGYTCVCPDGFLLDSSRSSCISQHVISEAKGPCFRVLRDGGCSLPILRNITKQICCCSRVGKAWGRGCQLCPPFGSEGFREICPAGPGYHYSASDLRYNTRPLGQEPPRVSLSQPRTLPATSRPSAGFLPTHRLEPRPEPRPDPRPGPELPLPSIPAWTGPEIPESGPSSGMCQRNPQVCGPGRCISRPSGYTCACDSGFRLSPQGTRCIDVDECRRVPPPCAPGRCENSPGSFRCVCGPGFRAGPRAAECLDVDECHRVPPPCDLGRCENTPGSFLCVCPAGYQAAPHGASCQDVDECTQSPGLCGRGACKNLPGSFRCVCPAGFRGSACEEDVDECAQEPPPCGPGRCDNTAGSFHCACPAGFRSRGPGAPCQDVDECARSPPPCTYGRCENTEGSFQCVCPMGFQPNTAGSECEDVDECENHLACPGQECVNSPGSFQCRTCPSGHHLHRGRCTDVDECSSGAPPCGPHGHCTNTEGSFRCSCAPGYRAPSGRPGPCADVNECLEGDFCFPHGECLNTDGSFACTCAPGYRPGPRGASCLDVDECSEEDLCQSGICTNTDGSFECICPPGHRAGPDLASCLDVDECRERGPALCGSQRCENSPGSYRCVRDCDPGYHAGPEGTCDDVDECQEYGPEICGAQRCENTPGSYRCTPACDPGYQPTPGGGCQDVDECRNRSFCGAHAVCQNLPGSFQCLCDQGYEGARDGRHCVDVNECETLQGVCGAALCENVEGSFLCVCPNSPEEFDPMTGRCVPPRTSAGTFPGSQPQAPASPVLPARPPPPPLPRRPSTPRQGPVGSGRRECYFDTAAPDACDNILARNVTWQECCCTVGEGWGSGCRIQQCPGTETAEYQSLCPHGRGYLAPSGDLSLRRDVDECQLFRDQVCKSGVCVNTAPGYSCYCSNGYYYHTQRLECIDNDECADEEPACEGGRCVNTVGSYHCTCEPPLVLDGSQRRCVSNESQSLDDNLGVCWQEVGADLVCSHPRLDRQATYTECCCLYGEAWGMDCALCPAQDSDDFEALCNVLRPPAYSPPRPGGFGLPYEYGPDLGPPYQGLPYGPELYPPPALPYDPYPPPPGPFARREAPYGAPRFDMPDFEDDGGPYGESEAPAPPGPGTRWPYRSRDTRRSFPEPEEPPEGGSYAGSLAEPYEELEAEECGILDGCTNGRCVRVPEGFTCRCFDGYRLDMTRMACVDINECDEAEAASPLCVNARCLNTDGSFRCICRPGFAPTHQPHHCAPARPRA

SEQ ID NO: 50236 - protein, 47 aa, Homo sapiens
MNKLRQSLRRRKPAYVPEASRPHQWQADEDAVRKGTCSFPVRMLSGH

SEQ ID NO: 50237 - protein, 16 aa, Homo sapiens
MKFNGKKGAVDAASMN

SEQ ID NO: 50238 - protein, 591 aa, Homo sapiens
MFKEAVTFKDVAVVFTEEELGLLDVSQRKLYRDVMLENFRNLLSVGHQLSHRDTFHFQREEKFWIMETATQREGNSGGKIQTELESVPETGPHEEWSCQQIWEQTASELTRPQDSISSSQFSTQGDVPSQVDAGLSIIHIGETPSEHGKCKKFFSDVSILDLHQQLHSGKISHTCNEYRKRFCYSSALCLHQKVHMGEKRYKCDVCSKAFSQNSQLQTHQRIHTGEKPFKCEQCGKSFSRRSGMYVHCKLHTGEKPHICEECGKAFIHNSQLREHQRIHTGEKPFKCYICGKSFHSRSNLNRHSMVHMQEKSFRCDTCSNSFGQRSALNSHCMDHTKEKLYKCEECGRSFTCRQDLCKHQMDHTGDKPYNCNVCGKGFRWSSCLSRHQRVHNGETTFKCDGCGKRFYMNSQGHSHQRAYREEELYKCQKCGKGYISKFNLDLHQRVHTGERPYNCKECGKSFRWASGILRHKRLHTGEKPFKCEECGKRFTENSKLRFHQRIHTGEKPYKCEECGKGFRWASTHLTHQRLHSREKLFQCEDCGKSSEHSSCLQDQQSDHSGEKTSKCEDCGKRYERRLNLDMILSLFLNDI

SEQ ID NO: 50239 - protein, 92 aa, Homo sapiens
MFKEAVTFKDVAVAFTEEELGLLGPAQRKLYRDVMVENFRNLLSVGHPPFKQDVSPIERNEQLWIMTTATRRQGNLDTLLVKALLLYDLAQT

SEQ ID NO: 50240 - protein, 698 aa, Homo sapiens
MLENFRNLVSVGHQSFKPDMISQLEREEKLWMKELQTQRGDRNQNEMATLHKAGLRCFSLGELSCWQIKRHIASKLARSQDSMINIEGKSSQFPKHHDSPCQVGAGESIQASVDDNCLVNHIGDHSSIIENQEFPTGKVPNSWSKIYLNETQNYQRSCKQTQMKNKLCIFAPYVDIFSCISHHHDDNIVHKRDKVHSNSDCGKDTLKVSPLTQRSIHTGQKTYQGNECEEAFNDSSSLELHKQVHLGKKSPACSTHEKDTSYSSGIPVQQSVRTGKKRYWCHECGKGFSQSSNLQTHQRVHTGEKPYTCHECGKSFNQSSHLYAHLPIHTGEKPYRCDSCGKGFSRSTDLNIHCRVHTGEKPYKCEVCGKGFTQRSHLQAHERIHTGEKPYKCGDCGKRFSCSSNLHTHQRVHTEEKPYKCDECGKCFSLSFNLHSHQRVHTGEKPYKCEECGKGFSSASSFQSHQRVHTGEKPFRCNVCGKGFSQSSYFQAHQRVHTGEKPYKCEVCGKRFNWSLNLHNHQRVHTGEKPYKCEECGKGFSQASNLQAHQSVHTGEKPFKCDACQKRFSQASHLQAHQRVHTGEKPYKCDTCGKAFSQRSNLQVHQIIHTGEKPFKCEECGKEFSWSAGLSAHQRVHTGEKPYTCQQCGKGFSQASHFHTHQRVHTGERPYICDVCCKGFSQRSHLIYHQRVHTGGNL

SEQ ID NO: 50241 - protein, 621 aa, Homo sapiens
MWGSPWEADSPRVKLRGREKGRQTEGGAFPLVSSALSGDPRFFSPTTPPAEPIVVRLKEVRLQRDDFEILKVIGRGAFSEVAVVKMKQTGQVYAMKIMNKWDMLKRGEVSCFREERDVLVNGDRRWITQLHFAFQDENYLYLVMEYYVGGDLLTLLSKFGERIPAEMARFYLAEIVMAIDSVHRLGYVHRDIKPDNILLDRCGHIRLADFGSCLKLRADGTVRSLVAVGTPDYLSPEILQAVGGGPGTGSYGPECDWWALGVFAYEMFYGQTPFYADSTAETYGKIVHYKEHLSLPLVDEGVPEEARDFIQRLLCPPETRLGRGGAGDFRTHPFFFGLDWDGLRDSVPPFTPDFEGATDTCNFDLVEDGLTAMETLSDIREGAPLGVHLPFVGYSYSCMALRDSEVPGPTPMELEAEQLLEPHVQAPSLEPSVSPQDETAEVAVPAAVPAAEAEAEVTLRELQEALEEEVLTRQSLSREMEAIRTDNQNFASQLREAEARNRDLEAHVRQLQERMELLQAEGATAVTGVPSPRATDPPSHMAPRPWLWASARWWGQAPCTAATCCSLPGSLGLAYRRRFPCSCSPLFCLVPPPWAALGWWPTPANSPQSGAAQEPPALPEP

SEQ ID NO: 50242 - protein, 88 aa, Homo sapiens
MVDHGAAQGKVPGCGPQPAQPGDRGAVPAGSHAALRPRRQRPPGQGLYHAPHHQLPAHAPPLRRSWSSLDTASLISSTPVTKRSFRTP

SEQ ID NO: 50243 - protein, 502 aa, Homo sapiens
MKSTLTSRGRTLNLKAATWKVLNCSGHMRAYKPPAQTSPAGSPDSEPPLQCLVLICEAIPHPGSLEPPLGRGAFLSRHSLDMKFTYCDDRIAEVAGYSPDDLIGCSAYEYIHALDSDAVSKSIHTLLSKGQAVTGQYRFLARSGGYLWTQTQATVVSGGRGPQSESIVCVHFLISQVEETGVVLSLEQTEQHSRRPIQRGAPSQKDTPNPGDSLDTPGPRILAFLHPPSLSEAALAADPRRFCSPDLRRLLGPILDGASVAATPSTPLATRHPQSPLSADLPDELPVGTENVHRLFTSGKDTEAVETDLDIAQDADALDLEMLAPYISMDDDFQLNASEQLPRAYHRPLGAVPRPRARSFHGLSPPALEPSLLPRWGSDPRLSCSSPSRGDPSASSPMAGARKRTLAQSSEDEDEGVELLGVRPPKRSPSPEHENFLLFPLSLSFLLTGGPAPGSLQDPSTPLLNLNEPLGLGPSLLSPYSDEDTTQPGGPFQPRAGSAQAD

SEQ ID NO: 50244 - protein, 235 aa, Homo sapiens
MLDHEQVTPEDPGAQFLIRTGSVGRNRAEASLERAQNLNPMVDVKVDTEDIEKKPESFFTQFDAVCLTCCSRDVIVKVDQICHKNSIKFFTGDVFGYHGYTFANLGEHEFVEEKTKVAKVSQGVEDGPDTKRAKLDSSETTMVKKKVVFCPVKEALEVDWSSEKAKAALKRTTSDYFLLQGPVSAGPSSQQLLLLRWHEGEWDCGVPWPQVNSRFGSPRDANCSMPTCIPCPLPS

SEQ ID NO: 50245 - protein, 242 aa, Homo sapiens [sequence omitted]

SEQ ID NO: 50246 - protein, 216 aa, Homo sapiens [sequence omitted]

SEQ ID NO: 50247 - protein, 1064 aa, Homo sapiens
MEAEHRLQEQEEEELQSVLEGVADGQVPPSAIDPRWLRPTPPALDPQTEPLIFQQLEIDHYVGPAQPVPGGPPPSRGSVPVLRAFGVTDEGFSVCCHIHGFAPYFYTPAPPGFGPEHMGDLQRELNLAISRDSRGGRELTGPAVLAVELCSRESMFGYHGHGPSPFLRITVALPRLVAPARRLLEQGIRVAGLGTPSFAPYEANVDFEIRFMVDTDIVGCNWLELPAGKYALRLKEKATQCQLEADVLWSDVVSHPPEGPWQRIAPLRVLSFDIECAGRKGIFPEPERDPVIQICSLGLRWGEPEPFLRLALTLRPCAPILGAKVQSYEKEEDLLQAWSTFIRIMDPDVITGYNIQNFDLPYLISRAQTLKVQTFPFLGRVAGLCSNIRDSSFQSKQTGRRDTKVVSMVGRVQMDMLQVLLREYKLRSYTLNAVSFHFLGEQKEDVQHSIITDLQNGNDQTRRRLAVYCLKDAYLPLRLLERLMVLVNAVEMARVTGVPLSYLLSRGQQVKVVSQLLRQAMHEGLLMPVVKSEGGEDYTGATVIEPLKGYYDVPIATLDFSSLYPSIMMAHNLCYTTLLRPGTAQKLGLTEDQFIRTPTGDEFVKTSVRKGLLPQILENLLSARKRAKAELAKETDPLRRQVLDGRQLALKVSANSVYGFTGAQVGKLPCLEISQSVTGFGRQMIEKTKQLVESKYTVENGYSTSAKVVYGDTDSVMCRFGVSSVAEAMALGREAADWVSGHFPSPIRLEFEKVYFPYLLISKKRYAGLLFSSRPDAHDRMDCKGLEAVRRDNCPLVANLVTASLRRLLIDRDPEGAVAHAQDVISDLLCNRIDISQLVITKELTRAASDYAGKQAHVELAERMRKRDPGSAPSLGDRVPYVIISAAKGVAAYMKSEDPLFVLEHSLPIDTQYYLEQQLAKPLLRIFEPILGEGRAEAVLLRGDHTRCKTVLTGKVGGLLAFAKRRNCCIGCRTVLSHQGAVCEFCQPRESELYQKEVSHLNALEERFSRLWTQCQRCQGSLHEDVICTSRDCPIFYMRKKVRKDLEDQEQLLRRFGPPGPEAW

SEQ ID NO: 50248 - protein, 222 aa, Homo sapiens [sequence omitted]

SEQ ID NO: 50249 - protein, 429 aa, Homo sapiens
MLENYRNLVSLDTSSKCMMKMFSSTGQGNTEVVHTGTLQIHASHHIGDTCFQEIEKDIHDFVFQWQENETNGHEALMTKTKKLMSSTERHDQRHAGNKPIKNELGSSFHSHLPEVHIFHPEGKIGNQVEKAINDAFSVSASQRISCRPKTRISNKYRNNFLQSSLLTQKREVHTREKSFQRNESGKAFNGSSLLKKHQIIHLGDKQYKCDVCGKDFHQKRYLACHRCHTGENPYTCNECGKTFSHNSALLVHKAIHTGEKPYKCNECGKVFNQQSNLARHHRVHTGEKPYKCEECDKVFSRKSHLERHRRIHTGEKPYKCKVCDKAFRRDSHLAQHTVIHTGEKPYKCNECGKTFVQNSSLVMHKVIHTGEKRYKCNECGKVFNHKSNLACHRRLHTGEKPYKCNECGKVFNRKSNLERHHRLHTGKKS

SEQ ID NO: 50250 - protein, 133 aa, Homo sapiens
MRVLDSYGDDYRASQFTIVLEDEGSQGTDAPTPGNAENEPPEKETLSPPRRTPAPPEPGSPAPGEGPSGRKRRRVPRDGRRAGNALTPELAPVQIKVEEDFGFEADEALDSSWVSRGPDKLLPYPTLASPASD

SEQ ID NO: 50251 - protein, 175 aa, Homo sapiens
MVTEPGLQAEVTKAQEYLVHVAPHCANFLVPSQNLHLTLALLRLAGAGEEAAAIGALRRALLAPGLNAPPRLSFRKLVLLGPHVLCAPPSPTLESMAQVLSQRLEAEGLSTLQSPGQLHPHLTVAKVPHGSQVHLPKLEFTLSQEVGCQPLQTLWLCRIGRTGGPFQPLAEIPLE

SEQ ID NO: 50252 - protein, 113 aa, Homo sapiens
MRDHERVHTGERPYHCGICGKGFTQSSVLSGHARIHTGERPFRCTLCDRTFNNSSNFRKHQRTHFHGPGPGLGDSGGQLGSSAAEGSGSGCGVGDPAEEGRGETAKVKVEADQ

SEQ ID NO: 50253 - protein, 170 aa, Homo sapiens
MLENYQNLVWLGLSISKSVISLLEKRKLPWIMAKEEIRGPLPGYFKVSEMTISQEPKAKTRTLFGKDVPGAEIKELSAKRAINEVLSQFDTVIKCTRNVCKECGNLYCHNMQLTLHKRNHTQKKCNQCLDCGKYFTRQSTLIQHQRIHTGERPYKCNECIKTFNQRAHLT

SEQ ID NO: 50254 - protein, 568 aa, Homo sapiens
MLENYRNLVSLGLSFRRPNVITLLEKGKAPWMVEPVRRRRAPDSGSKCETKKLPPNQCNKSGQSICQKLVSAQQKAPTRKSGCNKNSVLVKPKKGHSGKKPLKCNDCGKTFSRSFSLKLHQNIHTGEKPFECSNCRKAFRQISSILLHQRIHSGKKSHECNKCGESFNQRTTLILHMRIHDGKEILDCGKALSQCQSFNIHQKIHVVGNVCQCRKCGKAFNQMSSLLLHKKIHNGKKTHKYNKCGRGFKKKSVFVVHKRIHAGEKIPENAKALSQSLQQRSHHLENPFKCRKCGKLFNRISPLMLHQRIHTSEKPYKCDKCDKFFRRLSTLILHLRIHNGEKLYRCNKCEKVCNRHSSLIQHQKVHTKKKKLFECKECGKMFSGTANLKIHQNIHSEEKPFKCNKCSKVFGRQSFLIEHQRIHTGEKPYQCEECGKAFSHRISLTRHKRIHTEDRPYECDQCGKAFSQSAHLAQHERIHTGEKPYTCKTCGKAFSQRTSLILHERSHTGEKPYECNECGKAFSSGSDLIRHQRSHSSEKPYECSKCGKAYSRSSSLIRHQNTHSEEKA

SEQ ID NO: 50255 - protein, 32 aa, Homo sapiens
MRLTPAGRRDEEGRTAEGPGVSAIKSFEVTVA

SEQ ID NO: 50256 - protein, 474 aa, Homo sapiens
MSPECDGLGTADGVCSRIGQEQVSPGDRVRSHNSCESGKDPMIQEEENNFKCSECGKVFNKKHLLAGHEKIHSGVKPYECTECGKTFIKSTHLLQHHMIHTGERPYECMECGKAFNRKSYLTQHQRIHSGEKPYKCNECGKAFTHRSNFVLHNRRHTGEKSFVCTECGQVFRHRPGFLRHYVVHSGENPYECLECGKVFKHRSYLMWHQQTHTGEKPYECSECGKVFLESAALIHHYVIHTGEKPFECLECGKAFNHRSYLKRHQRIHTGEKPFVCSECGKAFTHCSTFILHKRAHTGEKPFECKECGKAFSNRKDLIRHFSIHTGEKPYECVECGKAFTRMSGLTRHKRIHSGEKPYECVECGKSFCWSTNLIRHAIIHTGEKPYKCSECGKAFSRSSSLTQHQRMHTGKNPISVTDVGRPFTSGQTSVTLRELLLGKDFLNVTTEANILPEETSSSASDQPYQRETPQVSSL

SEQ ID NO: 50257 - protein, 625 aa, Homo sapiens
MALTDPAQVSVTFDDVAVTFTQEEWGQLDLAQRTLYQEVMLENCGLLVSLGCPVPRPELIYHLEHGQEPWTRKEDLSQGTCPGDKGKPKSTEPTTCELALSEGISFWGQLTQGASGDSQLGQPKDQDGFSEMQGERLRPGLDSQKEKLPGKMSPKHDGLGTADSVCSRIIQDRVSLGDDVHDCDSHGSGKNPVIQEEENIFKCNECEKVFNKKRLLARHERIHSGVKPYECTECGKTFSKSTYLLQHHMVHTGEKPYKCMECGKAFNRKSHLTQHQRIHSGEKPYKCSECGKAFTHRSTFVLHNRSHTGEKPFVCKECGKAFRDRPGFIRHYIIHSGENPYECFECGKVFKHRSYLMWHQQTHTGEKPYECSECGKAFCESAALIHHYVIHTGEKPFECLECGKAFNHRSYLKRHQRIHTGEKPYVCSECGKAFTHCSTFILHKRAHTGEKPFECKECGKAFSNRADLIRHFSIHTGEKPYECMECGKAFNRRSGLTRHQRIHSGEKPYECIECGKTFCWSTNLIRHSIIHTGEKPYECSECGKAFSRSSSLTQHQRMHTGRNPISVTDVGRPFTSGQTSVNIQELLLGKNFLNVTTEENLLQEEASYMASDRTYQRETPQVSSL

SEQ ID NO: 50258 - protein, 133 aa, Homo sapiens
MKFLRNKAIIRHRPALVKVILISSVAFSIALICGMAISYMIYRLAQAEERQQLESLYKNLRIPLLGDEEEGSEDEGESTHLLPENENELEKFIHSVIISKRSKNIKKKLKEEQNSVTENKTKNASHNGKMEDL

SEQ ID NO: 50259 - protein, 80 aa, Homo sapiens
MGSVTRNPEGRQCFRGAAVERTDRLRKRGVWAREAIPSDARDRGGSVSSRGGENWSYPVLWESYDSLWAFSSLGGLVISR

SEQ ID NO: 50260 - protein, 412 aa, Homo sapiens
MSEEEVLPAGQPAEGTTCCLEVTAQQEEKQEDAAICPVTVLPEEPVTFQDVAVDFSREEWGLLGPTQRTEYRDVMLETFGHLVSVGWETTLENKELAPNSDIPEEEPAPSLKVQESSRDCALSSTLEDTLQGGVQEVQDTVLKQMESAQEKDLPQKKHFDNRESQANSGALDTNQVSLQKIDNPESQANSGALDTNQVLLHKIPPRKRLRKRDSQVKSMKHNSRVKIHQKSCERQKAKEGNGCRKTFSRSTKQITFIRIHKGSQVCRCSECGKIFRNPRYFSVHKKIHTGERPYVCQDCGKGFVQSSSLTQHQRVHSGERPFECQECGRTFNDRSAISQHLRTHTGAKPYKCQDCGKAFRQSSHLIRHQRTHTGERPYACNKCGKAFTQSSHLIGHQRTHNRTKRKKKQPTS

SEQ ID NO: 50261 - protein, 210 aa, Homo sapiens
MDAVRIMAKDLVRTRRYVRKFVLMRANIQAVSLKIQTLKSNNSMAQAMKGVTKAMGTMNRQLKLPQIQKIMMEFERQAEIMDMKEEMMNDAIDDAMGDEEDEEESDAVVSQVLDELGLSLTDELSSECSKSWTPFPTQGPATAPSPPFPCITPLRCLTPPAQTPTFSADLPSTGGSLSVAAGGKKAEAAASALADADADLEERLKNLRRD

SEQ ID NO: 50262 - protein, 1651 aa, Homo sapiens [sequence omitted]

SEQ ID NO: 50263 - protein, 60 aa, Homo sapiens
MVCYDDGLGAGKSLLALKTTDASNEEYSLWVYQCNSLEQAQAICKVLSTAFDSVLTSEKP

SEQ ID NO: 50264 - protein, 326 aa, Homo sapiens
MSGLAIQTAMDEAFTVEAGAREPSSNIPKVAIIVTDGRPQDQVNEVAARAQASGIELYAVGVDRADMASLKMMASEPLEEHVFYVETYGVIEKLSSRFQETFCALDPCVLGTHQCQHVCISDGEGKHHCECSQGYTLNADKKTCSALDRCALNTHGCEHICVNDRSGSYHCECYEGYTLNEDRKTCSAQDKCALGTHGCQHICVNDRTGSHHCECYEGYTLNADKKTCSVRDKCALGSHGCQHICVSDGAASYHCDCYPGYTLNEDKKTCSATEEARRLVSTEDACGCEATLAFQDKVSSYLQRLNTKLDDILEKLKINEYGQIHR

SEQ ID NO: 50265 - protein, 115 aa, Homo sapiens
MCFSVDSPDSLENIPEKWVPEVKHFCPNVPIILVANKKDLRSDEHVRTELARMKQEPVRTDDGRAMAVRIQAYDYLECSAKTKEGVREVFETATRAALQKRYGSQNGCINCCKVL

SEQ ID NO: 50266 - protein, 179 aa, Homo sapiens
MSGHVEYQILVVTRLAAFKSAKHRPEDVVQFLVSKKYSEIEEFYQKLSSRYAAASLPPLPRKVLFVGESDIRERRAVFNEILRCVSKDAELAGSPELLEFLGTRSPGAAGLTSRDSSVLDGTDSQTGNDEEAFDFFEEQDQVAEEGPPVQSLKGEDAEESLEEEEALDPLGIMRLVSCC

SEQ ID NO: 50267 - protein, 740 aa, Homo sapiens
MRESDNPGTGPWVTTVAAGNQPTLIAHSYGVAQPPTFSPAVNVQAPVIGVTPSLPPHVGPQLPLMPGHYSLPQPPSQPLSSVVVNMPAQALYASPQPLAVSTLPGVGQVARPGPTAVGNGHMAGPLLPPPPPAQPSATLPSGAPATNGPPTTDSAHGLQMLRTIGVGKYEFTDPGHPREMLKELNQQRRAKAFTDLKIVVEGREFEVHQNVLASCSLYFKDLIQRSVQDSGQGGREKLELVLSNLQADVLELLLEFVYTGSLVIDSANAKTLLEAASKFQFHTFCKVCVSFLEKQLTASNCLGVLAMAEAMQCSELYHMAKAFALQIFPEVAAQEEILSISKDDFIAYVSNDSLNTKAEELVYETVIKWIKKDPATRTQYAAELLAVVRLPFIHPSYLLNVVDNEELIKSSEACRDLVNEAKRYHMLPHARQEMQTPRTRPRLSAGVAEVIVLVGGRQMVGMTQRSLVAVTCWNPQNNKWYPLASLPFYDREFFSVVSAGDNIYLSGGMESGVTLADVWCYMSLLDNWNLVSRMTVPRCRHNSLVYDGKIYTLGGLGVAGNVDHVERYDTITNQWEAVAPLPKAVHSAAATVCGGKIYVFGGVNEAGRAAGVLQSYVPQTNTWSFIESPMIDNKYAPAVTLNGFVFILGGAYARATTIYDPEKGNIKAGPNMNHSRQFCSAVVLDGKIYATGGIVSSEGPALGNMEAYEPTTNTWTLLPHMPCPVFRHGCVVIKKYIQSG

SEQ ID NO: 50268 - protein, 625 aa, Homo sapiens
MDKIVPSLLFNLQHVEEAESRSPSPLQAPEKEKESPAELAERCLRELLGRAAFGNIKNAIKPVLIHLDNHSLWEPKVFAIRCFKIIMYSIQPQHSHLVIQQLLGHLDANSRSAATVRAGIVEVLSEAAVIAATGSVGPTVLEMFNTLLRQLRLSIDYALTGSYDGAVSLGTKIIKEHEERMFQEAVIKTVGSFASTLPTYQRSEVILFIMSKVPRPSLHQAVDTGRTGENRNRLTQIMLLKSLLQVSTGFQCNNMMSALPSNFLDRLLSTALMEDAEIRLFVLEILISFIDRHGNRHKFSTISTLSDISVLKLKVDKCSRQDTVFMKKHSQQLYRHIYLSCKEETNVQKHYEALYGLLALISIELANEEVVVDLIRLVLAVQDVAQVNEENLPVYNRCALYALGAAYLNLISQLTTVPAFCQHIHEVIETRKKEAPYMLPEDVFVERPRLSQNLDGVVIELLFRQSKISEVLGGSGYNSDRLCLPYIPQLTDEDRLSKRRSIGETISLQVEVESRNSPEKEERVPAEEITYETLKKAIVDSVAVEEQERERRRQVVEKFQKAPFEEIAAHCGARASLLQSKLNQIFEITIRPPPSPSGTITAAYGQPQNHSIPVYEMKFPDLCVY

SEQ ID NO: 50269 - protein, 234 aa, Homo sapiens [sequence omitted]

SEQ ID NO: 50270 - protein, 219 aa, Homo sapiens
MDMLFPGCVHLRKVKFQAKLEHEYIHNFKVLQAAFKKMGVDKIIPVEKLVKGKFQDNFEFIQWFKKFFDANYDGKDYNPLLARQGQDVAPPPNPVPQRTSPTGPKNMQTSGRLSNVAPPCILRKNPPSARNGGHETDAQILELNQQLVDLKLTVDGLEKERDFYFSKLRDIELICQEHESENSPVISGIIGILYATEEGFAPPEDDEIEEHQQEDQDEY

SEQ ID NO: 50271 - protein, 861 aa, Homo sapiens
MSLPTPLPGFEDSPDQRRLPPEQESLSRLEQPDLSSEMSKVSKPRASKPGRKRGGRTRKGPKRPQQPNPPSAPLVPGLLDQSNPLSTPMPKKRGRKSKAELLLLKLSKDLDRPESQSPKRPPEDFETPSGERPRRRAAQVALLYLQELAEELSTALPAPVSCPEGPKVSSPTKPKKIRQPAACPGGEEVDGAPRDEDFFLQVEAEDVEESEGPSESSSEPEPVVPRSTPRGSTSGKQKPHCRGMAPNGLPNHIMAPVWKCLHLTKDFREQKHSYWEFAEWIPLAWKWHLLSELEAAPYLPQEEKSPLFSVQREGLPEDGTLYRINRFSSITAHPERWDVSFFTGGPLWALDWCPVPEGAGASQYVALFSSPDMNETHPLSQLHSGPGLLQLWGLGTLQQESCPGNRAHFVYGIACDNGCIWDLKFCPSGAWELPGTPRKAPLLPRLGLLALACSDGKVLLFSLPHPEALLAQQPPDAVKPAIYKVQCVATLQVGSMQATDPSECGQCLSLAWMPTRPHQHLAAGYYNGMVVFWNLPTNSPLQRIRLSDGSLKLYPFQCFLAHDQAVRTLQWCKANSHFLVSAGSDRKIKFWDLRRPYEPINSIKRFLSTELAWLLPYNGVTVAQDNCYASYGLCGIHYIDAGYLGFKAYFTAPRKGTVWSLSGSDWLGTIAAGDISGELIAAILPDMALNPINVKRPVERRFPIYKADLIPYQDSPEGPDHSSASSGVPNPPKARTYTETVNHHYLLFQDTDLGSFHDLLRREPMLRMQEGEGHSQLCLDRLQLEAIHKVRFSPNLDSYGWLVSGGQSGLVRIHFVRGLASPLGHRMQLESRAHFNAMFQPSSPTRRPGFSPTSHRLLPTP

SEQ ID NO: 50272 - protein, 37 aa, Homo sapiens
MDNESAKILGRDTNIIKPDQQKFLRFAPTGVPSGGSP

SEQ ID NO: 50273 - protein, 151 aa, Homo sapiens
MCLVRDISNCWAPKVETAITKVRTPVMNSEAKVLVPGIPGHHAAIKPAPPQTEQVESKRKSGGNEVSIEERLGAMDIDTHKKGKEDLQTNSFPVLLTQGLESNDFEMLNKVLQTRNVNLIKKTVLRMPLHTIIPLLQEVTDCFFHFSILMP

SEQ ID NO: 50274 - protein, 316 aa, Homo sapiens
MFGVKVIITGDAFVPGERSVIIMNHRTRMDWMFLWNCLMRYSYLRLEKICLKASLKGVPGFGWAMQAAAYIFIHRKWKDDKSHFEDMIDYFCDIHEPLQLLIFPEGTDLTENSKSRSNAFAEKNGLQKYEYVLHPRTTGFTFVVDRLREGKNLDAVHDITVAYPHNIPQSEKHLLQGDFPREIHFHVHRYPIDTLPTSKEDLQLWCHKRWEEKEERLRSFYQGEKNFYFTGQSVIPPCKSELRVLVVKLLSILYWTLFSPAMCLLIYLYSLVKWYFIITIVIFVLQERIFGGLEIIELACYRLLHKQPHLNSKKNE

SEQ ID NO: 50275 - protein, 435 aa, Homo sapiens
MTNLVMAKDRLQLLEKMQPVLPFSKSQTDVYNDSTNLACRNGHLQSESGAVPKRKDPLTHTSNSLPRSKTVMKTGSAGLSGHHRAPSYSGLSMVSGVKQGSGPAPTTHKGTPKTNRTNKPSTPTTATRKKKDLKNFRNVDSNLANLIMNEIVDNGTAVKFDDIAGQDLAKQALQEIVILPSLRPELFTGLRAPARGLLLFGPPGNGKTMLAKAVAAESNATFFNISAASLTSKYVGEGEKLVRALFAVARELQPSIIFIDEVDSLLCERREGEHDASRRLKTEFLIEFDGVQSAGDDRVLVMGATNRPQELDEAVLRRFIKRVYVSLPNEETRLLLLKNLLCKQGSPLTQKELAQLARMTDGYSGSDLTALAKDAALGPIRELKPEQVKNMSASEMRNIRLSDFTESLKKIKRSVSPQTLEAYIRWNKDFGDTTV

SEQ ID NO: 50276 - protein, 338 aa, Homo sapiens
MTNLVMAKDRLQLLESGAVPKRKDPLTHTSNSLPRSKTVMKTGSAGLSGHHRAPSYSGLSMVSGVKQGSGPAPTTHKGTPKTNRTNKPSTPTTATRKKKDLKNFRNVDSNLANLIMNEIVDNGTAVKFDDIAGQDLAKQALQEIVILPSLRPELFTGLRAPARGLLLFGPPGNGKTMLAKAVAAESNATFFNISAASLTSKYVGEGEKLVRALFAVARELQPSIIFIDEVDSLLCERREGEHDASRRLKTEFLIEFDGVQSAGDDRVLVMGATNRPQELDEAVLRRFIKRVYVSLPNEETRLLLLKNLLCKQGSPLTQKELAQLARTKTRTGEEYVCQ

SEQ ID NO: 50277 - protein, 403 aa, Homo sapiens
MTNLVMAKDRLQLLESGAVPKRKDPLTHTSNSLPRSKTVMKTGSAGLSGHHRAPSYSGLSMVSGVKQGSGPAPTTHKGTPKTNRTNKPSTPTTATRKKKDLKNFRNVDSNLANLIMNEIVDNGTAVKFDDIAGQDLAKQALQEIVILPSLRPELFTGLRAPARGLLLFGPPGNGKTMLAKAVAAESNATFFNISAASLTSKYVGEGEKLVRALFAVARELQPSIIFIDEVDSLLCERREGEHDASRRLKTEFLIEFDGVQSAGDDRVLVMGATNRPQELDEAVLRRFIKRVYVSLPNEETRLLLLKNLLCKQGSPLTQKELAQLARMTDGYSGSDLTALAKDAALGPIRELKPEQVKNMSASEMRNIRLSDFTESLKKIKRSVSPQTLEAYIRWNKDFGDTTV

SEQ ID NO: 50278 - protein, 1943 aa, Homo sapiens
MLGSAFPETVNNLLKSLKSAESQGRSEILMSLQKVLSGLGGAAASSHRDIYKNARSLLTDRSMAVRCAVAKCLLELQNEAVFMWTAELENIATLCFKALENSNYGVRVAVSKLLGTVMATALMPKQATVMRQNVKRATFDEVLELMATGFLRGGSGFLKSGGEMLKVGGSVNREVRVGVTQAYVVFVTTLGGQWLERSFATFLSHVLDLVSHPRATQTHVEAVYSRRCVSFILRATVGSLLGEKAQIAAAKEICQAIGKQMKAVEAVVNDTSGENKSGAADIAASQHVMVCALQELGSLVQSLNATASPLIQEASIGLLEIVTSVLLHPSMAARLAAAWCLRCVAVALPFQLTPFLDRCAERLNNLKTSPEAVSGYSFAMAALLGGVHQCPLGIPHAKGKMVVSIAEDLLRTAAQNSRLSLQRTQAGWLLLGALMTLGPSVVRYHLPKMLLLWRNVFPRSLKELEAEKARGDSFTWQVTLEGRAGALCAMRSFVAHCPELLTEDVIRKLMTPIECAMTMMSHIPSVMKAHGAHLKASAAMVRLRLYDILALLPPKTYEGSFNALLRELVAEFTLTDNSANTTTSLLRSLCHYDDSVLLGSWLQETDHKSIEDQLQPNSASGSGALEHDPSSIYLRIPAGEAVPGPLPLGVSVIDASVALFGVVFPHVSYKHRLQMLDHFAECVKQAKGVRQQAVQLNIFTAVLSALKGLAENKSTLGPEEVRKSALTLVMGPLDNPNPILRCAAGEALGRMAQVVGEATFIARMAQYSFDKLKSARDVVSRTGHSLALGCLHRYVGGIGSGQHLKTSVSILLALAQDGTSPEVQTWSLHSLALIVDSSGPMYRGYVEPTLSLVLTLLLTVPPSHTEVHQCLGRCLGAIITTVGPELQGNGATTSTIRSSCLVGCAITQDHSDSLVQAAAISCLQQLHMFAPRHVNLSSLVPSLCVHLCSSHLLLRRAAVACLRQLAQREAAEVCEYAMSLAKNTGDKESSSANVSPFAPGVSSRTDIHCRHQGVNITETGLEGLLFGMLDRETDRKLCSDIHDTLGHMLSSLAVEKLSHWLMLCKDVLAASSDMSTATLLSSGKDEEAEKKDEMDDDTMFTTLGEEDKSKPFVAPRWATRVFAADCLCRIINLCENADQAHFDLALARSAKLRNPTNDLLVLHLSDLIRMAFMAATDHSNQLRMAGLQALEDIIKKFASVPEPEFPGHVILEQYQANVGAALRPAFSQDTPSDIIAKACQVCSTWIGSGVVSDLNDLRRVHNLLVSSLDKVQAGKGSSSQLYRESATTMEKLAVLKAWAEVYVVAMNIKKEAESKPKRAIKNTDDDDDDCGTIDELPPDSLITLVQPELPTLSRLWLAALKDYALLTLPAEFSSQLPPDGGAFYTPETIDTARLHYRNSWAPILHAVALWLNSTGFTCSESTEAAAISGLQKRSTSVNLNQASGAVGSAKSLPEINKDRMHLILGVSIQFLCSPRPEEPIEHVTACLQALHTLLDSPYARVHIAEDQLIGVELLSVLHRLLLTWNPSSVQLLVTGVVQQIVRAAQDYLQEKRNTLNEDDMEKEACTVLGEGGDSGGLIPGKSLVFATMELLMFILVRHMPHLSTKVSDSPSHIATKTRLSEESARLVAATVTILSDLPSLCSPAGCMTILPTILFLIARILKDTAIKSADNQVPPPVSAALQGIKSIVTLSMAKTEAGVQKQWTALIRSTLACILEYSQPEDSVPTPDEVSMLTAIALFLWSASNEIIGVQSLQNGCMNRFKNALNSCDPWVQAKCYQLLLSVFQHSNRALSTPYIHSLAPIVVEKLKAVERNRPASNIELLAVQEGIKVLETLVALGEEQNRVQLLALLVPTLISYLLDENSFASASSASKDLHEFALQNLMHIGPLYPHAFKTVMGAAPELKVRLETAVRASQASKAKAAARQPAPAIHSAPTIKLKTSFF

SEQ ID NO: 50279 - protein, 47 aa, Homo sapiens
MHTSQDFRQTMSKKYPFILEVYYKSTEKSGMYGIRELDQKTWLNSKN

SEQ ID NO: 50280 - protein, 399 aa, Homo sapiens
MLRHLMYKIKSTGPITVAEYMKEVLTNPAKGYYVYRDMLGEKGDFITSPEISQIFGELLGIWFISEWMATGKSTAFQLVELGPGRGTLVGDILRVFTQLGSVLKNCDISVHLVEVSQKLSEIQALTLTKEKVPLERNAGSPVYMKGVTKSGIPISWYRDLHDVPKGYSFYLAHEFFDVLPVHKFQKTPQGWREVFVDIDPQVSDKLRFVLAPSATPAEAFIQHDETRDHVEVCPDAGVIIEELSQRIALTGGAALVADYGHDGTKTDTFRGFCDHKLHDVLIAPGTADLTADVDFSYLRRMAQGKVASLGPIKQHTFLKNMGIDVRLKVLLDKSNEPSVRQQLLQGYDMLMNPKKMGERFNFFALLPHQRLQGGRYQRNARQSKPFASVVAGFSELAWQ

SEQ ID NO: 50281 - protein, 5 aa, Homo sapiens
MDPFI

SEQ ID NO: 50282 - protein, 374 aa, Homo sapiens [sequence omitted]

SEQ ID NO: 50283 - protein, 451 aa, Homo sapiens
MQGWRVEMEDAHTAVVGIPHGLEDWSFFAVYDGHAGSRVANYCSTHLLEHITTNEDFRAAGKSGSALELSVENVKNGIRTGFLKIDEYMRNFSDLRNGMDRSGSTAVGVMISPKHIYFINCGDSRAVLYRNGQVCFSTQDHKPCNPREKERIQNAGGSVMIQRVNGSLAVSRALGDYDYKCVDGKGPTEQLVSPEPEVYEILRAEEDEFIILACDGIWDVMSNEELCEYVKSRLEVSDDLENVCNWVVDTCLHKGSRDNMSIVLVCFSNAPKVSDEAVKKDSELDKHLESRVEEIMEKSGEEGMPDLAHVMRILSAENIPNLPPGGGLAGKRNVIEAVYSRLNPHRESDGASDEAEESGSQGKLVEALRQMRINHRGNYRQLLEEMLTSYRLAKVEGEESPAEPAATATSSNSDAGNPVTMQESHTESESGLAELDSSNEDAGTKMSGEKI

SEQ ID NO: 50284 - protein, 359 aa, Homo sapiens
MQGWRVEMEDAHTAVVGIPHGLEDWSFFAVYDGHAGSRVANYCSTHLLEHITTNEDFRAAGKSGSALELSVENVKNGIRTGFLKIDEYMRNFSDLRNGMDRSGSTAVGVMISPKHIYFINCGDSRAVLYRNGQVCFSTQDHKPCNPREKERIQNAGGSVMIQRVNGSLAVSRALGDYDYKCVDGKGPTEQLVSPEPEVYEILRAEEDEFIILACDGIWDVMSNEELCEYVKSRLEVSDDLENVCNWVVDTCLHKGSRDNMSIVLVCFSNAPKVSDEAVKKDSELDKHLESRVEEIMEKSGEEGMPDLAHVMRILSAENIPNLPPGGGLAGKRNVIEAVYSRLNPHRESDGGAGDLEDPW

SEQ ID NO: 50285 - protein, 458 aa, Homo sapiens [sequence omitted]

SEQ ID NO: 50286 - skipped

SEQ ID NO: 50287 - protein, 505 aa, Homo sapiens
MNSNRCLSVKEKNISIGDSTPQQQSSPLRENIALQLGLSPSKNSSRRNQNCATEIPQIVEISIEKDNDSCVTPGTRLARRDSYSRHAPWGGKKKHSCSTKTQSSLDADKKFGRTRSGLQRRERRYGVSSVHDMDSVSSRTVGSRSLRQRLQDTVGLCFPMRTYSKQSKPLFSNKRKIHLSELMLEKCPFPAGSDLAQKWHLIKQHTAPVSPHSTFFDTFDPSLVSTEDEEDRLRERRRLSIEEGVDPPPNAQIHTFEATAQVNPLYKLGPKLAPGMTEISGDSSAIPQANCDSEEDTTTLCLQSRRQKQRQISGDSHTHVSRQGAWKVHTQIDYIHCLVPDLLQITGNPCYWGVMDRYEAEALLEGKPEGTFLLRDSAQEDYLFSVSFRRYNRSLHARIEQWNHNFSFDAHDPCVFHSSTVTGLLEHYKDPSSCMFFEPLLTISLNRTFPFSLQYICRAVICRCTTYDGIDGLPLPSMLQDFLKEYHYKQKVRVRWLEREPVKAK

SEQ ID NO: 50288 - protein, 818 aa, Homo sapiens
MPGGGGNRRGSPSAAFTFPDTDDFGKLLLAEALLEQCLKENHAKIKDSMPLLEKNEPKMSEAKNYLSSILNHGRLSPQYMCEAMLILGKLHYVEGSYRDAISMYARAGIDDMSMENKPLYQMRLLSEAFVIKGLSLERLPNSIASRFRLTEREEEVITCFERASWIAQVFLQELEKTTNNSTSRHLKGCHPLDYELTYFLEAALQSAYVKNLKKGNIVKGMRELREVLRTVETKATQNFKVMAAKHLAGVLLHSLSEECYWSPLSHPLPEFMGKEESSFATQALRKPHLYEGDNLYCPKDNIEEALLLLLISESMATRDVVLSRVPEQEEDRTVSLQNAAAIYDLLSITLGRRGQYVMLSECLERAMKFAFGEFHLWYQVALSMVACGKSAYAVSLLRECVKLRPSDPTVPLMAAKVCIGSLRWLEEAEHFAMMVISLGEEAGEFLPKGYLALGLTYSLQATDATLKSKQDELHRKALQTLERAQQLAPSDPQVILYVSLQLALVRQISSAMEQLQEALKVRKDDAHALHLLALLFSAQKHHQHALDVVNMAITEHPENFNLMFTKVKLEQVLKGPEEALVTCRQVLRLWQTLYSFSQLGGLEKDGSFGEGLTMKKQSGMHLTLPDAHDADSGSRRASSIAASRLEEAMSELTMPSSVLKQGPMQLWTTLEQIWLQAAELFMEQQHLKEAGFCIQEAAGLFPTSHSVLYMRGRLAEVKGNLEEAKQLYKEALTVNPDGVRIMHSLGLMLSRLGHKSLAQKVLRDAVERQSTCHEAWQGLGEVLQAQGQNEAAVDCFLTALELEASSPVLPFSIIPREL

SEQ ID NO: 50289 - protein, 727 aa, Homo sapiens
MEVFEYTRPMMHPEPGKFYQINPEEYEHPNPWKESFQQLYKGAHVKPGFAEHFYSNPARYKGRENMLYYDTIEDALGGVQEAHFDGLIFVHSGIYTDEWIYIESPITMIGAAPGKVADKVIIENTRDSTFVFMEGSEDAYVGYMTIRFNPDDKSAQHHNAHHCLEITVNCSPIIDHCIIRSTCTVGSAVCVSGQGACPTIKHCNISDCENVGLYITDHAQGIYEDNEISNNALAGIWVKNHGNPIIRRNHIHHGRDVGVFTFDHGMGYFESCNIHRNRIAGFEVKAYANPTVVRCEIHHGQTGGIYVHEKGRGQFIENKIYANNFAGVWITSNSDPTIRGNSIFNGNQGGVYIFGDGRGLIEGNDIYGNALAGIQIRTNSCPIVRHNKIHDGQHGGIYVHEKGQGVIEENEVYSNTLAGVWVTTGSTPVLRRNRIHSGKQVGVYFYDNGHGVLEDNDIYNHMYSGVQIRTGSNPKIRRNKIWGGQNGGILVYNSGLGCIEDNEIFDNAMAGVWIKTDSNPTLRRNKIHDGRDGGICIFNGGRGLLEENDIFRNAQAGVLISTNSHPILRKNRIFDGFAAGIEITNHATATLEGNQIFNNRFGGLFLASGVNVTMKDNKIMNNQDAIEKAVSRGQCLYKISSYTSYPMHDFYRCHTCNTTDRNAICVNCIKKCHQGHDVEFIRHDRFFCDCGAGTLSNPCTLAGEPTHDTDTLYDSAPPIESNTLQHN

SEQ ID NO: 50290 - protein, 402 aa, Homo sapiens [sequence omitted]

SEQ ID NO: 50291 - protein, 302 aa, Homo sapiens
MQHSPDLMSFMMELKMLLEVALKNRQELYALPPPPQFYSSLIEEIGTLGWDKLVYADTCFSTIKLKAEDASGREHLITLKLKAKYPAESPDYFVDFPVPFCASWTPQSSLISIYSQFLAAIESLKAFWDVMDEIDEKTWVLEPEKPPRSATARRIALGNNVSINIEVDPRHPTMLPECFFLGADHVVKPLGIKLSRNIHLWDPENSVLQNLKDVLEIDFPARAILEKSDFTMDCGICYAYQLDGTIPDQVCDNSQCGQPFHQICLYEWLRGLLTSRQSFNIIFGECPYCSKPITLKMSGRKH

SEQ ID NO: 50292 - protein, 307 aa, Homo sapiens
MQHSPDLMSFMMELKMLLEVALKNRQELYALPPPPQFYSSLIEEIGTLGWDKLVYADTCFSTIKLKAEDASGREHLITLKLKAKYPAESPDYFVDFPVPFCASWTPQVNSPQSSLISIYSQFLAAIESLKAFWDVMDEIDEKTWVLEPEKPPRSATARRIALGNNVSINIEVDPRHPTMLPECFFLGADHVVKPLGIKLSRNIHLWDPENSVLQNLKDVLEIDFPARAILEKSDFTMDCGICYAYQLDGTIPDQVCDNSQCGQPFHQICLYEWLRGLLTSRQSFNIIFGECPYCSKPITLKMSGRKH

SEQ ID NO: 50293 - protein, 78 aa, Homo sapiens
MTMLADHAARQLLDFSQKLDINLLDNVVNCLYHGEGAQQRMAQEVLTHLKEHPDAWTRVDTILEFSQNMNTKVSKWWF

SEQ ID NO: 50294 - protein, 459 aa, Homo sapiens
MQVLHPAARMLVELSKAQDIEAGDGTTSVVIIAGSLLDSCTKLLQKGIHPTIISESFQKALEKGIEILTDMSRPVELSDRETLLNSATTSLNSKVVSQYSSLLSPMSVNAVMKVIDPATATSVDLRDIKIVKKLGGTIDDCELVEGLVLTQKVSNSGITRVEKAKIGLIQFCLSAPKTDMDNQIVVSDYAQMDRVLREERAYILNLVKQIKKTGCNVLLIQKSILRDALSDLALHFLNKMKIMVIKDIEREDIEFICKTIGTKPVAHIDQFTADMLGSAELAEEVNLNGSGKLLKITGCASPGKTVTIVVRGSNKLVIEEAERSIHDALCVIRCLVKKRALIAGGGAPEIELALRLTEYSRTLSGMESYCVRAFADAMEVIPSTLAENAGLNPISTVTELRNRHAQGEKTAGINVRKGGISNILEELVVQPLLVSVSALTLATETVRSILKIDDVVNTR

SEQ ID NO: 50295 - protein, 450 aa, Homo sapiens [sequence omitted]

SEQ ID NO: 50296 - protein, 136 aa, Homo sapiens
MRGILKSIASADMDFNQLEAFLTAQTKKQGGITSDQAAVISKFWKSHKTKIRESLMNQSRWNSGLRGLSWRVDGKSQSRHSAQIHTPVAIIELELGKYGQESEFLCLEFDEVKVNQILKTLSEVEESISTLISQPN

SEQ ID NO: 50297 - protein, 357 aa, Homo sapiens
MDGVGIPSTMYGDPHAARSMQPVHHLNHGPPLHSHQYPHTAHTNAMAPSMGSSVNDALKRDKDAIYGHPLFPLLALIFEKCELATCTPREPGVAGGDVCSSESFNEDIAVFAKQIRAEKPLFSSNPELDNLMIQAIQVLRFHLLELEKVHELCDNFCHRYISCLKGKMPIDLVIDDREGGSKSDSEDITRSANLTDQPSWNRDHDDTASTRSGGTPGPSSGGHTSHSGDNSSEQGDGLDNSVASPSTGDDDDPDKDKKRHKKRGIFPKVATNIMRAWLFQHLTHPYPSEEQKKQLAQDTGLTILQVNNWFINARRRIVQPMIDQSNRAGKSPIVTVFKSRKRKPSSSHSPGGPLPGK

SEQ ID NO: 50298 - protein, 621 aa, Homo sapiens
MDLDIEFDVHLGIAHTRWATHGEPSPVNSHPQRSDKNNEFIVIHNGIITNYKDLKKFLESKGYDFESETDTETIAKLVKYMYDNRESQDTSFTTLVERVIQQLEGAFALVFKSVHFPGQAVGTRRGSPLLIGVRSEHKLSTDHIPILYRTARTQIGSKFTRWGSQGERGKDKKGSCNLSRVDSTTCLFPVEEKAVEYYFASDASAVIEHTNRVIFLEDDDVAAVVDGRLSIHRIKRTAGDHPGRAVQTLQMELQQIMKGNFSSFMQKEIFEQPESVVNTMRGRVNFDDYTVNLGGLKDHIKEIQRCRRLILIACGTSYHAGVATRQVLEELTELPVMVELASDFLDRNTPVFRDDVCFFLSQSGETADTLMGLRYCKERGALTVGITNTVGSSISRETDCGVHINAGPEIGVASTKAYTSQFVSLVMFALMMCDDRISMQERRKEIMLGLKRLPDLIKEVLSMDDEIQKLATELYHQKSVLIMGRGYHYATCLEGALKIKEITYMHSEGILAGELKHGPLALVDKLMPVIMIIMRDHTYAKCQNALQQVVARQGRPVVICDKEDTETIKNTKRTIKVPHSVDCLQGILSVIPLQLLAFHLAVLRGYDVDFPRNLAKSVTVE

SEQ ID NO: 50299 - protein, 196 aa, Homo sapiens
MFIQTQDTPNPNSLKFIPGKPVLETRTMDFPTPAAAFRSPLARQLFRIEGVKSVFFGPDFITVTKENEELDWNLLKPDIYATIMDFFASGLPLVTEETPSGEAGSEEDDEVVAMIKELLDTRIRPTVQEDGGDVIYKGFEDGIVQLKLQGSCTSCPSSIITLKNGIQNMLQFYIPEVEGVEQVMDDESDEKEANSP

SEQ ID NO: 50300 - protein, 52 aa, Homo sapiens
MKLMGFASFDSTKGKKVDGSVNAYAINVSQKRKYRQYMNRKGGFNRPLDFIA

SEQ ID NO: 50301 - protein, 416 aa, Homo sapiens
MQASPETKQTIWQLATEPTGPLVQRITKNILVVKCKASQKHSLGYLHTSFVQKVSGKSLPERRFFCSCQTLKSHKSNASKDETAQRCIHFFACICAFASDETLAQEFSDFLNFDSSGLKEIIVPQLGCHSESTVSACESTASKSKKRRKDEVSGAQMNSSLLPQDAVSSNLRKSGLKKPVVASSLKRQACGQLLDEAQVTLSFQDWLASVTERIHQTMHYQFDGKPEPLVFHIPQSFFDALQQRISIGSAKKRLPNSTTAFVRKDALPLGTFSKYTWHITNILQVKQILDTPEMPLEITRSFIQNRDGTYELFKCPKVEVESIAETYGRIEKQPVLRPLELKTFLKVGNTSPDQKEPTPFIIEWIPDILPQSKIGELRIKFEYGHHRNGHVAEYQDQRPPLDQPLELAPLTTITFP

SEQ ID NO: 50302 - protein, 8 aa, Homo sapiens
MIVFSPDH

SEQ ID NO: 50303 - protein, 371 aa, Homo sapiens [sequence omitted]

SEQ ID NO: 50304 - protein, 236 aa, Homo sapiens
MPFRMSGYIPFGTPIVVGLLLPNQTLASTVFWQWLNQSHNACVNYANRNATKPSPASKFIQGYLGAVISAVSIAVGLNVLVQKANKFTPATRLLIQRFVPFPAVASANICNVVLMRYGELEEGIDVLDSDGNLVGSSKIAARHALLETALTRVVLPMPILVLPPIVMSMLEKTALLQARPRLLLPVQSLVCLAAFGLALPLAISLFPQMSEIETSQLEPEIAQATSSRTVVYNKGL

SEQ ID NO: 50305 - protein, 573 aa, Homo sapiens
MFWIVSQLHLKPGSPGRWVRAGAFGERLSVALRARRGLGSAWYRAGARLPGPVTEFCLLPSSHRWYKLHSKPGKKEKERGEIEVTIQFTRNNLSASMFDLSMKDKPRSPFSKIRDKMKGKKKYDLESASAILPSSAIEDPDLGSLGKMGKAKGFFLRNKLRKSSLTQSNTSLGSDSTLSSASGSLAYQGPGAELLTRSPSRSSWLSTEGGRDSAQSPKLFTHKRTYSDEANQMRVAPPRALLDLQGHLDAASRSSLCVNGSHIYNEEPQGPVRHRSSISGSLPSSGSLQAVSSRFSEEGPRSTDDTWPRGSRSNSSSEAVLGQEELSAQAKVLAPGASHPGEEEGARLPEGKPVQVATPIVASSEAVAEKEGARKEERKPRMGLFHHHHQGLSRSELGRRSSLGEKGGPILGASPHHSSSGEEKAKSSWFGLREAKDPTQKPSPHPVKPLSAAPVEGSPDRKQSRSSLSIALSSGLEKLKTVTSGSIQPVTQAPQAGQMVDTKRLKDSAVLDQSAKYYHLTHDELISLLLQRERELSQRDEHVQELESYIDRLLVRIMETSPTLLQIPPGPPK

SEQ ID NO: 50306 - protein, 3698 aa, Homo sapiens
MDSSQTLDTSQTRFNVRTEDTEVTDFPSLEEGILTQSENQVKEPNRDLFCSPLLVIQDSFASPDLPLLTCLTQDQEFAPDSLFHQSELSFAPLRGIPDKSEDTEWSSRPSEVSEALFQATAEVASDLASSRFSVSQHPLIGSTAVGSQCPFLPSEQGNNEETISSVDELKIPKDCDRYDDLCSYMSWKTRKDTQWPENNLADKDQVSVATSFDITDENIATKRSDHFDAARSYGQYWTQEDSSKQAETYLTKGLQGKVESDVITLDGLNENAVVCSERVAELQRKPTRESEYHSSDLRMLRMSPDTVPKAPKHLKAGDTSKGGIAKVTQSNLKSGITTTPVDSDIGSHLSLSLEDLSQLAVSSPLETTTGQHTDTLNQKTLADTHLTEETLKVTAIPEPADQKTATPTVLSSSHSHRGKPSIFYQQGLPDSHLTEEALKVSAAPGLADQTTGMSTLTSTSYSHREKPGTFYQQELPESNLTEEPLEVSAAPGPVEQKTGIPTVSSTSHSHVEDLLFFYRQTLPDGHLTDQALKVSAVSGPADQKTGTATVLSTPHSHREKPGIFYQQEFADSHQTEETLTKVSATPGPADQKTEIPAVQSSSYSQREKPSILYPQDLADSHLPEEGLKVSAVAGPADQKTGLPTVPSSAYSHREKLLVFYQQALLDSHLPEEALKVSAVSGPADGKTGTPAVTSTSSASSSLGEKPSAFYQQTLPNSHLTEEALKVSIVPGPGDQKTGIPSAPSSFYSHREKPIIFSQQTLPDFLFPEEALKVSAVSVLAAQKTGTPTVSSNSHSHSEKSSVFYQQELPDSDLPRESLKMSAIPGLTDQKTVPTPTVPSGSFSHREKPSIFYQQEWPDSYATEKALKVSTGPGPADQKTEIPAVQSSSYPQREKPSVLYPQVLSDSHLPEESLKVSAFPGPADQMTDTPAVPSTFYSQREKPGIFYQQTLPESHLPKEALKISVAPGLADQKTGTPTVTSTSYSQHREKPSIFHQQALPGTHIPEEAQKVSAVTGPGNQKTWIPRVLSTFYSQREKPGIFYQQTLPGSHIPEEAQKVSPVLGPADQKTGTPTPTSASYSHTEKPGIFYQQVLPDNHPTEEALKISVASEPVDQTTGTPAVTSTSYSQYREKPSIFYQQSLPSSHLTEEAKNVSAVPGPADQKTVIPILPSTFYSHTEKPGVFYQQVLPHSHPTEEALKISVASEPVDQTTGTPTVTSTSYSQHTEKPSIFYQQSLPGSHLTEEAKNVSAVPGPGDRKTGIPTLPSTFYSHTEKPGSFYQQVLPHSHLPEEALEVSVAPGPVDQTIGTPTVTSPSSSFGEKPIVIYKQAFPEGHLPEESLKVSVAPGPVGQTTGAPTITSPSYSQHRAKSGSFYQLALLGSQIPEEALRVSSAPGPADQTTGIPTITSTSYSFGEKPIVNYKQAFPDGHLPEEALKVSIVSGPTEKKTDIPAGPLGSSALGEKPITFYRQALLDSPLNKEVVKVSAAPGPADQKTETLPVHSTSYSNRGKPVIFYQQTLSDSHLPEEALKVPPVPGPDAQKTETPSVSSSLYSYREKPIVFYQQALPDSELTQEALKVSAVPQPADQKTGLSTVTSSFYSHTEKPNISYQQELPDSHLTEEALKVSNVPGPADQKTGVSTVTSTSYSHREKPIVSYQRELPHFTEAGLKILRVPGPADQKTGINILPSNSYPQREHSVISYEQELPDLTEVTLKAIGVPGPADQKTGIQIASSSSYSNREKASIFHQQELPDVTEEALNVFVVPGQGDRKTEIPTVPLSYYSRREKPSVISQQELPDSHLTEEALKVSPVSIPAEQKTGIPIGLSSSYSHSHKEKLKISTVHIPDDQKTEFPAATLSSYSQIEKPKISTVIGPNDQKTPSQTAFHSSYSQTVKPNILFQQQLPDRDQSKGILKISAVPELTDVNTGKPVSLSSSYFHREKSNIFSPQELPGSHVTEDVLKVSTIPGPAGQKTVLPTALPSSFSHREKPDIFYQKDLPDRHLTEDALKISSALGQADQITGLQTVPSGTYSHGENHKLVSEHVQRLIDNLNSSDSSVSSNNVLLNSQADDRVVINKPESAGFRDVGSEEIQDAENSAKTLKEIRTLLMEAENMALKRCNFPAPLARFRDISDISFIQSKKVVCFKEPSSTGVSNGDLLHRQPFTEESPSSRCIQKDIGTQTNLKCRRGIENWEFISSTTVRSPLQEAESKVSMALEETLRQYQAAKSVMRSEPEGCSGTIGNKIIIPMMTVIKSDSSSDASDGNGSCSWDSNLPESLESVSDVLLNFFPYVSPKTSITDSREEEGVSESEDGGGSSVDSLAAHVKNLLQCESSLNHAKEILRNAEEEESRVRAHAWNMKFNLAHDCGYSISELNEDDRRKVEEIKAELFGHGRTTDLSKGLQSPRGMGCKPEAVCSHIIIESHEKGCFRTLTSEHPQLDRHPCAFRSAGPSEMTRGRQNPSSCRAKHVNLSASLDQNNSHFKVWNSLQLKSHSPFQNFIPDEFKISKGLRMPFDEKMDPWLSELVEPAFVPPKEVDFHSSSQMPSPEPMKKFTTSITFSSHRHSKCISNSSVVKVGVTEGSQCTGASVGVFNSHFTEEQNPPRDLKQKTSSPSSFKMHSNSQDKEVTILAEGRRQSQKLPVDFERSFQEEKPLERSDFTGSHSEPSTRANCSNFKEIQISDNHTLISMGRPSSTLGVNRSSSRLGVKEKNVTITPDLPSCIFLEQRELFEQSKAPRADDHVRKHHSPSPQHQDYVAPDLPSCIFLEQRELFEQCKAPYVDHQMRENHSPLPQGQDSIASDLPSPISLEQCQSKAPGVDDQMNKHHFPLPQGQDCVVEKNNQHKPKSHISNINVEAKFNTVVSQSAPNHCTLAASASTPPSNRKALSCVHITLCPKTSSKLDSGTLDERFHSLDAASKARMNSEFNFDLHTVSSRSLEPTSKLLTSKPVAQDQESLGFLGPKSSLDFQVVQPSLPDSNTITQDLKTIPSQNSQIVTSRQIQVNISDFEGHSNPEGTPVFADRLPEKMKTPLSAFSEKLSSDAVTQITTESPEKTLFSSEIFINAEDRGHEIIEPGNQKLRKAPVKFASSSSVQQVTFSRGTDGQPLLLPYKPSGSTKMYYVPQLRQIPPSPDSKSDTTVESSHSGSNDAIAPDFPAQVLGTRDDDLSATVNIKHKEGIYSKRVVTKASLPVGEKPLQNENADASVQVLITGDENLSDKKQQEIHSTRAVTEAAQAKEKESLQKDTADSSAAAAAEHSAQVGDPEMKNLPDTKAITQKEEIHRKKTVPEEAWPNNKESLQINIEESECHSEFENTTRSVFRSAKFYIHHPVHLPSDQDICHESLGKSVFMRHSWKDFFQHHPDKHREHMCLPLPYQNMDKTKTDYTRIKSLSINVNLGNKEVMDTTKSQVRDYPKHNGQISDPQRDQKVTPEQTTQHTVSLNELWNKYRERQRQQRQPELGDRKELSLVDRLDRLAKILQNPITHSLQVSESTHDDSRGERSVKEWSGRQQQRNKLQKKKRFKSLEKSHKNTGELKKSKVLSHHRAGRSNQIKIEQIKFDKYILSKQPGFNYISNTSSDCRPSEESELLTDTTTNILSGTTSTVESDILTQTDREVALHERSSSVSTIDTARLIQAFGHERVCLSPRRIKLYSSITNQQRRYLEKRSKHSKKVLNTGHPLVTSEHTRRRHIQVHGYRFHLAM

SEQ ID NO: 50307 - protein, 92 aa, Homo sapiens [sequence omitted]

SEQ ID NO: 50308 - protein, 180 aa, Homo sapiens
MMYREPARWSYTFQTFSFLSRLKVQLEPFPEKLLQARKPVQIFERSVYSDRYIFAKNLFENGSLSDIEWHIYQDWHSFLLWEFASRITLHGFIYLQASPQVCLKRLYQRAREEEKGIELAYLEQLHGQHEAWLIHKTTKLHFEALMNIPVLVLDVNDDFSEEVTKQEDLMREVNTFVKNL

SEQ ID NO: 50309 - protein, 482 aa, Homo sapiens
MLGFPSEKRVNAAFYRLLAQRQQHSFGLHGVACVGTEAHLSLCSLEFYRANDTARCPGGGPAVVSCVPGPVYAASSGQKKQQQSKPQGEARVRLKGGAHPGEGRVEVLKASTWGTVCDRKWDLHAASVVCRELGFGSAREALSGARMGQGMGAIHLSEVRCSGQELSLWKCPHKNITAEDCSHSQDAGVRCNLPYTGAETRETWYWDSGNITEVVMSGVRCTGTELSLDQCAHHGTHITCKRTGTRFTAGVICSETASDLLLHSALVQETAYIEDRPLHMLYCAAEENCLASSARSANWPYGHRRLLRFSSQIHNLGRADFRPKAGRHSWVWHECHGHYHSMDIFTHYDILTPNGTKVAEGHKASFCLEDTECQEDVSKRYECANFGEQGITVGCWDLYRHDIDCQWIDITDVKPGNYILQVVINPNFEVAESDFTNNAMKCNCKYDGHRIWVHNCHIGDAFSEEANRRFERYPGQTSNQII

SEQ ID NO: 50310 - protein, 161 aa, Homo sapiens [sequence omitted]

SEQ ID NO: 50311 - protein, 230 aa, Homo sapiens
MLPQGENLQDVLPRDIYCRLKRHLEYVKLMMPLWMTPDQRGKGLYADYLFNAIAGNWERKRPVWVMLMVNSLTEVDIKSRGVPVLDLFLAQEAERLRKQTGAVEKVEEQCHPLNGLNFSQVIFALNQTLLQQESLRAGSLQIPYTTEDLIKHYNCGDLSSVILSHDSSQVPNFINATLPPQERITAQEIDSYLRRELIYKRNERIGKRVKALLEEFPDKGFFFAFGAASQ

SEQ ID NO: 50312 - protein, 82 aa, Homo sapiens
MRRPSLLLKDILKCTLLVFGVWILYILKLNYTTEECDMKKMHYVDPDHVKTYTVPLKEAGPSLLKHSVSPGTSIFKPSLFSP

SEQ ID NO: 50313 - protein, 629 aa, Homo sapiens
MKESKQPASQLQKQKGDTPASATAGDTLSVPAPAVQPEESLKTDHPEIGEGKPTPALSEASSSSIRERPPEEVAARLAQQEKQEQVKIESLAKSLEDALRQTASVTLQAIAAQNAAVQAVNAHSNILKAAMDNSEIAGEKKSAQWRTVEGALKERRKAVDEAADALLKAKEELEKMKSVIENAKKKEVAGAKPHITAAEGKLHNMIVDLDNVVKKVQAAQSEAKVVSQYHELVVQARDDFKRELDSITPEVLPGWKGMSVSDLADKLSTDDLNSLIAHAHRRIDQLNRELAEQKATEKQHITLALEKQKLEEKRAFDSAVAKALEHHRSEIQAEQDRKIEEVRDAMENEMRTQLRRQAAAHTDHLRDVLRVQEQELKSEFEQNLSEKLSEQELQFRRLSQEQVDNFTLDINTAYARLRGIEQAVQSHAVAEEEARKAHQLWLSVEALKYSMKTSSAETPTIPLGSAVEAIKANCSDNEFTQALTAAIPPESLTRGVYSEETLRARFYAVQKLARRVAMIDETRNSLYQYFLSYLQSLLLFPPQQLKPPPELCPEDINTFKLLSYASYCIEHGDLELAAKFVNQLKGESRRVAQDWLKEARMTLETKQIVEILTAYASAVGIGTTQVQPE

SEQ ID NO: 50314 - protein, 640 aa, Homo sapiens
MKESKQPASQLQKQKGDTPASATAPTEAAQIISAAGDTLSVPAPAVQPEESLKTDHPEIGEGKPTPALSEASSSSIRERPPEEVAARLAQQEKQEQVKIESLAKSLEDALRQTASVTLQAIAAQNAAVQAVNAHSNILKAAMDNSEIAGEKKSAQWRTVEGALKERRKAVDEAADALLKAKEELEKMKSVIENAKKKEVAGAKPHITAAEGKLHNMIVDLDNVVKKVQAAQSEAKVVSQYHELVVQARDDFKRELDSITPEVLPGWKGMSVSDLADKLSTDDLNSLIAHAHRRIDQLNRELAEQKATEKQHITLALEKQKLEEKRAFDSAVAKALEHHRSEIQAEQDRKIEEVRDAMENEMRTQLRRQAAAHTDHLRDVLRVQEQELKSEFEQNLSEKLSEQELQFRRLSQEQVDNFTLDINTAYARLRGIEQAVQSHAVAEEEARKAHQLWLSVEALKYSMKTSSAETPTIPLGSAVEAIKANCSDNEFTQALTAAIPPESLTRGVYSEETLRARFYAVQKLARRVAMIDETRNSLYQYFLSYLQSLLLFPPQQLKPPPELCPEDINTFKLLSYASYCIEHGDLELAAKFVNQLKGESRRVAQDWLKEARMTLETKQIVEILTAYASAVGIGTTQVQPE

SEQ ID NO: 50315 - protein, 4 aa, Homo sapiens
MDHC

SEQ ID NO: 50316 - protein, 26 aa, Homo sapiens
MWESLQPEFISHSTLQISHWRETLQM

SEQ ID NO: 50317 - protein, 820 aa, Homo sapiens
MLFVTPRRQHESTIESDVPIDVETVTSTPMPLYDNQKARSVMNECERHVIFARTDADAPPPPEDWEEHVNRTGWTMAQNKLFNKILKALQSDRLARLANEGACNEPVLRRVAVDKCARRVRQALASVSWDTKLIQWLHTTLVETLSLPMLAAYLDALQTLKGKIPTLIDRMLVSSNTKTGAAGAEALSLLLKRPWDPAVGVLSHNKPSKLPGSPLILIASSGPSSSVFPTSRRHRFWQSQLSCLGKVIPVATHLLNNGSGVGVLQCLEHMIGAVRSKVLEIHSHFPHKPIILIGWNTGALVACHVSVMEYVTAVVCLGFPLLTVDGPRGDVDDPLLDMKTPVLFVIGQNSLQCHPEAMEDFREKIRAENSLVVVGGADDNLRISKAKKKSEGLTQSMVDRCIQDEIVDFLTGVLTRAEGHMGSEPRDQDAEKKKKPRDVARRDLAFEVPERGSRPASPAAKLPASPSGSEDLSSVSSSPTSSPKTKVTTVTSAQKSSQIGSSQLLKRHVQRTEAVLTHKQAQVPISSEPPEEGEKEDLRVQLKRHHPSSPLPGSKTSKRPKIKVSLISQGDTAGGPCAPSQGSAPEAAGGKPITMTLGQASAGAKELTGLLTTAKSSSSEGGVSASPVPSVVSSSTAPSALHTLQSRLVATSPGSSLPGATSASSLLQGLSFSLQDISSKTSGLPANPSPGPAPQATSVKLPTPMQSLGAITTGTSTIVRTIPVATTLSSLGATPGGKPTAIHQLLTNGGLAKLASSLPGLAQISNQASGLKVPTTITLTLRGQPSRITTLSPMGSGAAPSEESSSQVLPSSSQRLPPAP

SEQ ID NO: 50318 - protein, 374 aa, Homo sapiens
MKYRSCADCVLARDPYCAWSVNTSRCVAVGGHSGSLLIQHVMTSDTSGICNLRGSKKGELFHSRRIGLSPGPELEFLFSSSPALLSCTNMHSVFSATTVRPTPKNITVVAGTDLVLPCHLSSNLAHARWTFGGRDLPAEQPGSFLYDARLQALVVMAAQPRHAGAYHCFSEEQGARLAAEGYLVAVVAGPSVTLEARAPLENLGLVWLAVVALGAVCLVLLLLVLSLRRRLREELEKGAKATERTLVYPLELPKEPTSPPFRPCPEPDEKLWDPVGYYYSDGSLKIVPGHARCQPGGGPPSPPPGIPGQPLPSPTRLHLGGGRNSNANGYVRLQLGGEDRGGLGHPLPELADELRRKLQQRQPLPDSNPEESSV

SEQ ID NO: 50319 - protein, 866 aa, Homo sapiens
MTQVKLSVYDVKDRSQGTMYLLGSGTFIVKDLLQDRHHRLHLTLRSAESDRVGNITVIGWQMEEKSDQRPPVTRSVDTVNGRMVLPVDESLTEALGIRSKYASLRKDTLLKSVFGGAICRMYRFPTTDGNHLRILEQMAESVLSLHVPRQFVKLLLEEDAARVCELEELGELSPCWESLRRQIVTQYQTIILTYQENLTDLHQYRGPSFKASSLKADKKLEFVPTNLHIQRMRVQDDGGSDQNYDIVTIGAPAAHCQGFKSGGLRKKLHKFEETKKHFEECCTSSGCQSIIYIPQDVVRAKEIIAQINTLKTQVSYYAERLSRAAKDRSATGLERTLAILADKTRQLVTVCDCKLLANSIHGLNAARPDYIASKASPTSTEEEQVMLRNDQDTLMARWTGRNSRSSLQVDWHEEEWEKVWLNVDKSLECIIQRVDKLLQKERLHGEGCEDVFPCAGSCTSKKGNPDSHAYWIRPEDPFCDVPSSPCPSTMPSTACHPHLTTHCSPPPEESSPGEWSEALYPLLTTLTDCVAMMSDKAKKAMVFLLMQDSAPTIATYLSLQYRRDVVFCQTLTALICGFIIKLRNCLHDDGFLRQLYTIGLLAQFESLLSTYGEELAMLEDMSLGIMDLRNVTFKVTQATSSASADMLPVITGNRDGFNVRVPLPGPLFDALPREIQSGMLLRVQPVLFNVGINEQQTLAERFGDTSLQEVINVESLVRLNSYFEQFKEVLPEDCLPRSRSQTCLPELLRFLGQNVHARKNKNVDILWQAAEICRRLNGVRFTSCKSAKDRTAMSVTLEQCLILQHEHGMAPQVFTQALECMRSEGCRRENTMKNVGSRKYAFNSLQLKAFPKHYRPPEGTYGKVET

SEQ ID NO: 50320 - protein, 827 aa, Homo sapiens
MTQVKLSVYDVKDRSQGTMYLLGSGTFIVKDLLQDRHHRLHLTLRSAESDRVGNITVIGWQMEEKSDQRPPVTRSVDTVNGRMVLPVDESLTEALGIRSKYASLRKDTLLKSVFGGAICRMYRFPTTDGNHLRILEQMAESVLSLHVPRQFVKLLLEEDAARVCELEELGELSPCWESLRRQIVTQYQTIILTYQENLTDLHQYRGPSFKASSLKADKKLEFVPTNLHIQRMRVQDDGGSDQNYDIVTIGAPAAHCQGFKSGGLRKKLHKFEETKKHFEECCTSSGCQSIIYIPQDVVRAKEIIAQINTLKTQVSYYAERLSRAAKDRSATGLERTLAILADKTRQLVTVCDCKLLANSIHGLNAARPDYIASKASPTSTEEEQVMLRNDQDTLMARWTGRNSRSSLQVDWHEEEWEKVWLNVDKSLECIIQRVDKLLQKERLHGEGCEDVFPCAGSCTSKKDCSPPPEESSPGEWSEALYPLLTTLTDCVAMMSDKAKKAMVFLLMQDSAPTIATYLSLQYRRDVVFCQTLTALICGFIIKLRNCLHDDGFLRQLYTIGLLAQFESLLSTYGEELAMLEDMSLGIMDLRNVTFKVTQATSSASADMLPVITGNRDGFNVRVPLPGPLFDALPREIQSGMLLRVQPVLFNVGINEQQTLAERFGDTSLQEVINVESLVRLNSYFEQFKEVLPEDCLPRSRSQTCLPELLRFLGQNVHARKNKNVDILWQAAEICRRLNGVRFTSCKSAKDRTAMSVTLEQCLILQHEHGMAPQVFTQALECMRSEGCRRENTMKNVGSRKYAFNSLQLKAFPKHYRPPEGTYGKVET

SEQ ID NO: 50321 - protein, 861 aa, Homo sapiens
MTQVKLSVYDVKDRSQGTMYLLGSGTFIVKDLLQDRHHRLHLTLRSAESDRVGNITVIGWQMEEKSDQRPPVTRSVDTVNGRMVLPVDESLTEALGIRSKYASLRKDTLLKSVFGGAICRMYRFPTTDGNHLRILEQMAESVLSLHVPRQFVKLLLEEDAARVCELEELGELSPCWESLRRQIVTQYQTIILTYQENLTDLHQYRGPSFKASSLKADKKLEFVPTNLHIQRMRVQDDGGSDQNYDIVTIGAPAAHCQGFKSGGLRKKLHKFEETKKHTSSGCQSIIYIPQDVVRAKEIIAQINTLKTQVSYYAERLSRAAKDRSATGLERTLAILADKTRQLVTVCDCKLLANSIHGLNAARPDYIASKASPTSTEEEQVMLRNDQDTLMARWTGRNSRSSLQVDWHEEEWEKVWLNVDKSLECIIQRVDKLLQKERLHGEGCEDVFPCAGSCTSKKGNPDSHAYWIRPEDPFCDVPSSPCPSTMPSTACHPHLTTHCSPPPEESSPGEWSEALYPLLTTLTDCVAMMSDKAKKAMVFLLMQDSAPTIATYLSLQYRRDVVFCQTLTALICGFIIKLRNCLHDDGFLRQLYTIGLLAQFESLLSTYGEELAMLEDMSLGIMDLRNVTFKVTQATSSASADMLPVITGNRDGFNVRVPLPGPLFDALPREIQSGMLLRVQPVLFNVGINEQQTLAERFGDTSLQEVINVESLVRLNSYFEQFKEVLPEDCLPRSRSQTCLPELLRFLGQNVHARKNKNVDILWQAAEICRRLNGVRFTSCKSAKDRTAMSVTLEQCLILQHEHGMAPQVFTQALECMRSEGCRRENTMKNVGSRKYAFNSLQLKAFPKHYRPPEGTYGKVET

SEQ ID NO: 50322 - protein, 660 aa, Homo sapiens
MLEKYERHLAEIQGNVKVLKSERDKIFLLYEQAQEEITRLRREMMKSCKSPKSTTAHAILRRVETERDVAFTDLRRMTTERDSLRERLKIAQETAFNEKAHLEQRIEELECTVHNLDDERMEQMSNMTLMKETISTVEKEMKSLARKAMDTESELGRQKAENNSLRLLYENTEKDLSDTQRHLAKKKYELQLTQEKIMCLDEKIDNFTRQNIAQREEISILGGTLNDLAKEKECLQACLDKKSENIASLGESLAMKEKTISGMKNIIAEMEQASRQCTEALIVCEQDVSRMRRQLDETNDELAQIARERDILAHDNDNLQEQFAKAKQENQALSKKLNDTHNELNDIKQKVQDTNLEVNKLKNILKSEESENRQMMEQLRKANEDAENWENKARQSEADNNTLKLELITAEAEGNRLKEKVDSLNREVEQHLNAERSYKSQISTLHKSVVKMEEELQKVQFEKVSALADLSSTRELCIKLDSSKELLNRQLVAKDQEIEMRENELDSAHSEIELLRSQMANERISMQNLEALLVANRDKEYQSQIALQEKESEIQLLKEHLCLAENKMAIQSRDVAQFRNVVTQLEADLDITKRQLGTERFERERAVQELRRQNYSSNAYHMSSTMKPNTKCHSPERAHHRSPDRGLDRSLEENLCYRDF

SEQ ID NO: 50323 - protein, 1148 aa, Homo sapiens
MKDFLTDRSNQSHLVGVPKPGVPQTPVNKIDEHFVADSRAQNQPSSICSTTTSTPAAVPVQQSKRGTMGWQKAGHPPSDGQQRATQQGSLRTLLGDGVGRQQPRAKQVCNVEVGLQTQERPPAMAAKHSSSGHCVQNFPPSLASKPSLVQQKPTAYVRPMDGQDQAPDESPKLKSSSETSVHCTSYRGVPASKPEPARAKAKLSKFSIPKQGEESRSGETNSCVEEIIREMTWLPPLSAIQAPGKVEPTKFPFPNKDSQLVSSGHNNPKKGDAEPESPDNGTSNTSMLEDDLKLSSDEEENEQQAAQRTALRALSDSAVVQQPNCRTSVPSSKGSSSSSSSGSSSSSSDSESSSGSDSETESSSSESEGSKPPHFSSPEAEPASSNKWQLDKWLNKVNPHKPPILIQNESHGSESNQYYNPVKEDVQDCGKVPDVCQPSLREKEIKSTCKEEQRPRTANKAPGSKGVKQKSPPAAVAVAVSAAAPPPAVPCAPAENAPAPARRSAGKKPTRRTERTSAGDGANCHRPEEPAAADALGTSVVVPPEPTKTRPCGNNRASHRKELRSSVTCEKRRTRGLSRIVPKSKEFIETESSSSSSSSDSDLESEQEEYPLSKAQTVAASASSGNDQRLKEAAANGGSGPRAPVGSINARTTSDIAKELEEQFYTLVPFGRNELLSPLKDSDEIRSLWVKIDLTLLSRIPEHLPQEPGVLSAPATKDSESAPPSHTSDTPAEKALPKSKRKRKCDNEDDYREIKKSQGEKDSSSRLATSTSNTLSANHCNMNINSVAIPINKNEKMLRSPISPLSDASKHKYTSEDLTSSSRPNGNSLFTSASSSKKPKADSQLQPHGGDLTKAAHNNSENIPLHKSRPQTKPWSPGSNGHRDCKRQKLVFDDMPRSADYFMQEAKRMKHKADAMVEKFGKALNYAEAALSFIECGNAMEQGPMESKSPYTMYSETVELIRYAMRLKTHSGPNATPEDKQLAALCYRCLALLYWRMFRLKRDHAVKYSKALIDYFKNSSKAAQAPSPWGASGKSTGTPSPMSPNPSPASSVGSQGSLSNASALSPSTIVSIPQRIHQMAANHVSITNSILHSYDYWEMADNLAKENREFFNDLDLLMGPVTLHSSMEHLVQYSQQGLHWLRNSAHLS

SEQ ID NO: 50324 - protein, 189 aa, Homo sapiens
MTLEELEDHEDEFNEEDERAIEMYRRRRLAEWKATKLKNKFGEVLEISGKDYVQEVTKAGEGLWVILHLYKQGIPLCALINQHLSGLARKFPDVKFIKAISTTCIPNYPDRNLPTIFVYLEGDIKAQFIGPLVFGGMNLTRDELEWKLSESGAIMTDLEENPKKPIEDVLLSSVRRSVLMKRDSDSEGD

SEQ ID NO: 50325 - protein, 790 aa, Homo sapiens
MLPGNTRKMDKTTVLEKVIGFLQKHNEVSAQTEICDIQQDWKPSFLSNEEFTQLMLEALDGFIIAVTTDGSIIYVSDSITPLLGHLPSDVMDQNLLNFLPEQEHSEVYKILSSHMLVTDSPSPEYLKSDSDLEFYCHLLRGSLNPKEFPTYEYIKFVGNFRSYNNVPSPSCNGFDNTLSRPCRVPLGKEVCFIATVRLATPQFLKEMCIVDEPLEEFTSRHSLEWKFLFLDHRAPPIIGYLPFEVLGTSGYDYYHIDDLELLARCHQHLMQFGKGKSCCYRFLTKGQQWIWLQTHYYITYHQWNSKPEFIVCTHSVVSYADVRVERRQELALEDPPSEALHSSALKDKGSSLEPRQHFNTLDVGASGLNTSHSPSASSRSSHKSSHTAMSEPTSTPTKLMAEASTPALPRSATLPQELPVPGLSQAATMPAPLPSPSSCDLTQQLLPQTVLQSTPAPMAQFSAQFSMFQTIKDQLEQRTRILQANIRWQQEELHKIQEQLCLVQDSNVQMFLQQPAVSLSFSSTQRPEAQQQLQQRSAAVTQPQLGAGPQLPGQISSAQVTSQHLLRESSVISTQGPKPMRSSQLMQSSGRSGSSLVSPFSSATAALPPSLNLTTPASTSQDASQCQPSPDFSHDRQLRLLLSQPIQPMMPGSCDARQPSEVSRTGRQVKYAQSQTVFQNPDAHPANSSSAPMPVLLMGQAVLHPSFPASQPSPLQPAQARQQPPQHYLQVQAPTSLHSEQQDSLLLSTYSQQPGTLGYPQPPPAQPQPLRPPRRVSSLSESSGLQQPPR

SEQ ID NO: 50326 - protein, 151 aa, Homo sapiens
MQSSGRSGSSLVSPFSSATAALPPSLNLTTPASTSQDASQCQPSPDFSHDRQLRLLLSQPIQPMMPGSCDARQPSEVSRTGRQVKYAQSQTVFQNPDAHPANSSSAPMPVLLMGQAVLHPSFPASQPSPLQPAQARQQPPQHYLQVLGHTL

SEQ ID NO: 50327 - protein, 355 aa, Homo sapiens
MNVAEKHRGNYTCHASYTYLGKQYPITRVIEFITLEENKPTRPVIVSPANETMEVDLGSQIQLICNVTGQLSDIAYWKWNGSVIDEDDPVLGEDYYSVENPANKRRSTLITVLNISEIESRFYKHPFTCFAKNTHGIDAAYIQLIYPVTNFQKHMIGICVTLTVIIVCSVFIYKIFKIDIVLWYRDSCYDFLPIKVLPEVLEKQCGYKLFIYGRDDYVGEDIVEVINENVKKSRRLIIILVRETSGFSWLGGSSEEQIAMYNALVQDGIKVVLLELEKIQDYEKMPESIKFIKQKHGAIRWSGDFTQGPQSAKTRFWKNVRYHMPVQRRSPSSKHQLLSPATKEKLQREAHVPLG

SEQ ID NO: 50328 - protein, 264 aa, Homo sapiens
MNVAEKHRGNYTCHASYTYLGKQYPITRVIEFITLEENKPTRPVIVSPANETMEVDLGSQIQLICNVTGQLSDIAYWKWNGSVIDEDDPVLGEDYYSVENPANKRRSTLITVLNISEIESRFYKHPFTCFAKNTHGIDAAYIQLIYPVTNFQKHMIGICVTLTVIIVCSVFIYKIFKIDIVLWYRDSCYDFLPIKASDGKTYDAYILYPKTVGEGSTSDCDIFVFKVLPEVLEKQCGYKLFIYGRDDYVGEGMCVMEQSKGLLL

SEQ ID NO: 50329 - protein, 272 aa, Homo sapiens
MKHPEQIFPRQRAIQWGEDGRPFHYLFYTGKQSYYSLMHDVYGMLLNLEKHQSHLQAKSLLPEKTVTRDVIGSRWLIKEELEEMLVEKLSDLDYMQFIRLLEKLLTSQCGAAEEEFVQRFRRSVTLESKKQLIEPVQYDEQGMAFSKSEGKRKTAKAEAIVYKHGSGRIKVNGIDYQLYFPITQDREQLMFPFHFVDRLGKHDVTCTVSGGGRSAQAGAIRLAMAKALCSFVTEDEVEWMRQAGLLTTDPRVRERKKPGQEGARRKFTWKKR

SEQ ID NO: 50330 - protein, 784 aa, Homo sapiens
MFFSNPLFLASPCSENSASGECFSWGASDSHAGVRTGPESPATLEPPLPEDTVLWELESEPDLGDGAAISGHCTPPFPVPIYKPHSICWASVAAAEGAPAAPPGHGESEGDRLGPAPSAAPCVDEALTWESGCVGSDLGPAAHPVQPWASLSPEGWQRGGPFWPQVTLNSQDREPSSPESESRGPGPRPSPASSQEGSPQLQHHSSGILPKWTLDASQSSLLETDGEQPSSLKKKEAGEAPKPGEEVKSEGTARPAETGDVQPDIHLTSAEHENLRTPMNSSWLPGSPMPQAQSPEEGQRPPAGDKLANGVRNNKVAWNLASRLYRLEGFRKSEVAAYLQKNNDFSRAVAEEYLSFFQFGGQSLDRALRSFLQALVLSGETQERERILYQFSRRFHHCNPGIFPSVDSVHTLTCAIMLLNTDLHGQNIGKSMSCQEFITNLNGLRDGGNFPKELLKALYWSIRSEKLEWAVDEEDTARPEKAQPSLPAGKMSKPFLQLAQDPTVPTYKQGILARKMHQDADGKKTPWGKRGWKMFHTLLRGMVLYFLKGEDHCLEGESLVGQMVDEPVGVHHSLATPATHYTKKPHVFQLRTADWRLYLFQAPTAKEMSSWIARINLAAATHSAPPFPAAVGSQRRFVRPILPVGPAQSSLEEQHRSHENCLDAAADDLLDLQRNLPERRGRGRELEEHRLRKEYLEYEKTRYETYVQLLVARLHCPSDALDLWEEQLGREAGGTREPKLSLKKSHSSPSLHQDEAPTTAKVKRNISERRTYRKIIPKRNRNQL

SEQ ID NO: 50331 - protein, 289 aa, Homo sapiens
MFESFNVPGLYIAVQAVLALAASWTSRQVGERTLTGTVIDSGDGVTHVIPVAEGYVIGSCIKHIPIAGRDITYFIQQLLRDREVGIPPEQSLETAKAVKERYSYVCPDLVKEFNKYDTDGSKWIKQYTGINAISKKEFSIDVGYERFLGPEIFFHPEFANPDFTQPISEVVDEVIQNCPIDVRRPLYKNIVLSGGSTMFRDFGRRLQRDLKRTVDARLKLSEELSGGRLKPKPIDVQVITHHMQRYAVWFGGSMLASTPEFYQVCHTKKDYEEIGPSICRHNPVFGVMS

SEQ ID NO: 50332 - protein, 465 aa, Homo sapiens
MDRKKFHSSDSEEEEHKKQKMDSDEDEKEGEEEKVAKRKAAVLSDSEDEEKASAKKSRVVSDADDSDSDAVSDKSGKREKTIASDSEEEAGKELSDKKNEEKDLFGSDSESGNEEENLIADIFGESGDEEEEEFTGFNQEDLEEEKGETQVKEAEDSDSDDNIKRGKHMDFLSDFEMMLQRKKSMSGKRRRNRDGGTFISDADDVVSAMIVKMNEAAEEDRQLNNQKKPALKKLTLLPAVVMHLKKQDLKETFIDSGVMSAIKEWLSPLPDRSLPALKIREELLKILQELPSVSQETLKHSGIGRAVMYLYKHPKESRSNKDMAGKLINEWSRPIFGLTSNYKGMTREEREQRDLEQMPQRRRMNSTGGQTPRRDLEKVLTGEEKALRPGDPGFCARARVPMPSNKDYVVRPKWNVEMESSRFQATSKKGISRLDKQMRKFTDIRKKSRSAHAVKISIEGNKMPL

SEQ ID NO: 50333 - protein, 744 aa, Homo sapiens
MEFLDPGGPMMKLVYKLQAEDYKFDFPVSYLPGPVKASIQECILPDSPLYHNKVQFTPTGGLGLNLALNPFEYYIFFFALSLITQKPLPVSLHVRTSDCAYFILVDRYLSWFLPTEGSVPPPLSSSPGGTSPSPPPRTPAIPFASYGLHHTSLLKRHISHQTSVNADPASHEIWRSETLLQVFVEMWLHHYSLEMYQKMQSPHAKLEVLHYRLSVSSALYSPAQPSLQALHAYQESFTPTEEHVLVVRLLLKHLHAFANSLKPEQASPSAHSHATSPLEEFKRAAVPRFVQQKLYLFLQHCFGHWPLDASFRAVLEMWLSYLQPWRYAPDKQAPGSDSQPRCVSEKWAPFVQENLLMYTKLFVGFLNRALRTDLVSPKHALMVFRVAKVFAQPNLAEMIQKGEQLFLEPELVIPHRQHRLFTAPTFTGSFLSPWPPAVTDASFKVKSHVYSLEGQDCKYTPMFGPEARTLVLRLAQLITQAKHTAKSISDQCAESPAGHSFLSWLGFSSMDTNGSYTANDLDEMGQDSVRKTDEYLEKALEYLRQIFRLSEAQLRQFTLALGTTQDENGKKQLPDCIVGEDGLILTPLGRYQIINGLRRFEIEYQGDPELQPIRSYEIASLVRTLFRLSSAINHRFAGQMAALCSRDDFLGSFCRYHLTEPGLASRHLLSPVGRRQVAGHTRGPRLSLRFLGSYRTLVSLLLAFFVASLFCVGPLPCTLLLTLGYVLYASAMTLLTERGKLHQP

SEQ ID NO: 50334 - protein, 155 aa, Homo sapiens
MYPGANPTFQTGYTPGTPYKVSCSPTSGAVPPYSSSPNPYQTAVYPVRSAYPQQSPYAQQGTYYTQPLYAAPPHVIHHTTVVQPNGMPATVYPAPIPPPRGNGVTMGMVAGTTMAMSAGTLLTAHSPTPVAPHPVTVPTYRAPGTPTYSYVPPQW

SEQ ID NO: 50335 - protein, 831 aa, Homo sapiens
MEQFGQQQYDIYERMVPPRPDSLTGLRSSYASQHSQLGQDLRSAVSPDLHITPIYEGRTYYSPVYRSPNHGTVELQGSQTALYRTGSGIGNLQRTSSQRSTLTYQRNNYALNTTATYAEPYRPIQYRVQECNYNRLQHAVPADDGTTRSPSIDSIQKDPREFAWRDPELPEVIHMLQHQFPSVQANAAAYLQHLCFGDNKVKMEVCRLGGIKHLVDLLDHRVLEVQKNACGALRNLVFGKSTDENKIAMKNVGGIPALLRLLRKSIDAEVRELVTGVLWNLSSCDAVKMTIIRDALSTLTNTVIVPHSGWNNSSFDDDHKIKFQTSLVLRNTTGCLRNLSSAGEEARKQMRSCEGLVDSLLYVIHTCVNTSDYDSKTVENCVCTLRNLSYRLELEVPQARLLGLNELDDLLGKESPSKDSEPSCWGKKKKKKKRTPQEDQWDGVGPIPGLSKSPKGVEMLWHPSVVKPYLTLLAESSNPATLEGSAGSLQNLSAGNWKFAAYIRAAVRKEKGLPILVELLRMDNDRVVSSVATALRNMALDVRNKELIGKYAMRDLVNRLPGGNGPSVLSDETMAAICCALHEVTSKNMENAKALADSGGIEKLVNITKGRGDRSSLKVVKAAAQVLNTLWQYRDLRSIYKKDGWNQNHFITPVSTLERDRFKSHPSLSTTNQQMSPIIQSVGSTSSSPALLGIRDPRSEYDRTQPPMQYYNSQGDATHKGLYPGSSKPSPIYISSYSSPAREQNRRLQHQQLYYSQDDSNRKNFDAYRLYLQSPHSYEDPYFDDRVHFPASTDYSTQYGLKSTTNYVDFYSTKRPSYRAEQYPGSPDSWV

SEQ ID NO: 50336 - protein, 1755 aa, Homo sapiens
MPFREVAKPTEPDEHEAKADNEPSCSPAAQELLTRLGFLLGEGIPSATHITIEDKNETMCTALSQGISPCSTLTSSTASPSTDSPCSTLNSCVSKTAANKSPCETISSPSSTLESKDSGIIATITSSSENDDRSGSSLEWNKDGNLRLGVQKGVLHDRRADNCSPVAEEETTGSAESTLPKAESSAGDGPVPYSQGSSSLIMPRPNSVAATSSTKLEDLSYLDGQRNAPLRTSIRLPWHNTAGGRAQEVKARFAPYKPQDILLKPLLFEVPSITTDSVFVGRDWLFHQIEENLRNTELAENRGAVVVGNVGFGKTAIISKLVALSCHGSRMRQIASNSPGSSPKTSDPTQDLHFTPLLSPSSSTSASSTAKTPLGSISAENQRPREDAVKYLASKVVAYHYCQADNTYTCLVPEFVHSIAALLCRSHQLAAYRDLLIKEPQLQSMLSLRSCVQDPVAAFKRGVLEPLTNLRNEQKIPEEEYIILIDGLNEAEFHKPDYGDTLSSFITKIISKFPAWLKLIVTVRANFQEIISALPFVKLSLDDFPDNKDIHSDLHAYVQHRVHSSQDILSNISLNGKADATLIGKVSSHLVLRSLGSYLYLKLTLDLFQRGHLVIKSASYKVVPVSLSELYLLQCNMKFMTQSAFERALPILNVALASLHPMTDEQIFQAINAGHIQGEQGWEDFQQRMDALSCFLIKRRDKTRMFCHPSFREWLVWRADGENTAFLCEPRNGHALLAFMFSRQEGKLNRQQTMELGHHILKAHIFKGLSKKTGISSSHLQALWIGYSTEGLSAALASLRNLYTPNVKVSRLLILGGANVNYRTEVLNNAPILCVQSHLGHEEVVTLLLEFGACLDGTSENGMTALCYAAAAGHMKLVCLLTKKGVRVDHLDKKGQCALVHSALRGHGDILQYLLTCEWSPGPPQPGTLRKSHALQQALTAAASMGHSSVVQCLLGMEKEHEVEVNGTDTLWGETALTAAAGRGKLEVCELLLGHGAAVSRTNRRGVPPLFCAARQGHWQIVRLLLERGCDVNLSDKQGRTPLMVAACEGHLSTVEFLLSKGAALSSLDKEGLSALSWACLKGHRAVVQYLVEEGAAIDQTDKNGRTPLDLAAFYGDAETVLYLVEKGAVIEHVDHSGMRPLDRAIGCRNTSVVVALLRKGAKLGNAAWAMATSKPDILIILLQKLMEEGNVMYKKGKMKEAAQRYQYALRKFPREGFGEDMRPFNELRVSLYLNLSRCRRKTNDFGMAEEFASKALELKPKSYEAFYARARAKRNSRQFVAALADLQEAVKLCPTNQEVKRLLARVEEECKQLQRSQQQKQQGPLPAPLNDSENEEDTPTPGLSDHFHSEETEEEETSPQEESVSPTPRSQPSSSVPSSYIRNLQEGLQSKGRPVSPQSRAGIGKSLREPVAQPGLLLQPSKQAQIVKTSQHLGSGQSAVRNGSMKVQISSQNPPPSPMPGRIAATPAGSRTQHLEGTGTFTTRAGCGHFGDRLGPSQNVRLQCGENGPAHPLPSKTKTTERLLSHSSVAVDAAPPNQGGLATCSDVRHPASLTSSGSSGSPSSSIKMSSSTSSLTSSSSFSDGFKVQGPDTRIKDKVVTHVQSGTAEHRPRNTPFMGIMDKTARFQQQSNPPSRSWHCPAPEGLLTNTSSAAGLQSANTEKPSLMQVGGYNNQAKTCSVSTLSASVHNGAQVKELEESKCQIPVHSQENRITKTVSHLYQESISKQQPHISNEAHRSHLTAAKPKRSFIESNV

SEQ ID NO: 50337 - protein, 252 aa, Homo sapiens
MDEQELENMLKPFGQVISTRILRDSSGTSRGVGFARMESTEKCEAVIGHFNGKFIKTPPGVSAPTEPLLCKFADGGQKKRQNPNKYIPNGRPWHREGEAGMTLTYDPTTAAIQNGFYPSPYSIATNRMITQTSITPYIASPVSAYQVQSPSWMQPQPYILQHPGAVLTPSMEHTMSLQPASMISPLAQQMSHLSLGSTGTYMPATSAMQGAYLPQYAHMQTTAVPVEEASGQQQVAVETSNDHSPYTFQPNK

SEQ ID NO: 50338 - protein, 271 aa, Homo sapiens
MDEQELENMLKPFGQVISTRILRDSSGTSRGVGFARMESTEKCEAVIGHFNGKFIKTPPGVSAPTEPLLCKFADGGQKKRQNPNKYIPNGRPWHREGEVRLAGMTLTYDPTTAAIQNGFYPSPYSIATNRMITQTSITPYIASPVSAYQVAKETRENKYRGSAIKVQSPSWMQPQPYILQHPGAVLTPSMEHTMSLQPASMISPLAQQMSHLSLGSTGTYMPATSAMQGAYLPQYAHMQTTAVPVEEASGQQQVAVETSNDHSPYTFQPNK

SEQ ID NO: 50339 - protein, 399 aa, Homo sapiens [sequence omitted]

SEQ ID NO: 50340 - protein, 127 aa, Homo sapiens
MAAPSGVHLLVRRGSHRIFSSPLNHIYLHKQSSSQQRRNFFFRRQRDISHSIVLPAAVSSAHPVPKHIKKPDYVTTGIVPDWGDSIEVKNEDQIQGLHQACQLARHVLLLAGKSLKVASHQASERLT

SEQ ID NO: 50341 - protein, 172 aa, Homo sapiens
MVYLVNLSEKDYIRKKNKWLIKIKEWVDKYDPGALVIPFSGALELKLQELSAEERQKYLEANMTQSALPKIIKAGFAALQLEYFFTAGPDEVRAWTIRKGTKAPQAAGKIHTDFEKGFIMAEVMKYEDFKEEGSENAVKAAGKYRQQGRNYIVEDGDIIFFKFNTPQQPKKK

SEQ ID NO: 50342 - protein, 105 aa, Homo sapiens
MFPWMRPQAPGRRRGRQTYSRFQTLELEKEFLFNPYLTRKRRIEVSHALALTERQVKIWFQNRRMKWKKENNKDKFPVSRQEVKDGETKKEAQELEEDRAEGLTN

SEQ ID NO: 50343 - protein, 15 aa, Homo sapiens
MGPYIVFALSNLPSF

SEQ ID NO: 50344 - skipped

SEQ ID NO: 50345 - protein, 270 aa, Homo sapiens [sequence omitted]

SEQ ID NO: 50346 - protein, 54 aa, Homo sapiens
MINLYLQREFEKDEKPRDKSYQDAVLEDIFKKNDHDGDGFISPKEYNVYQHDEL

SEQ ID NO: 50347 - protein, 133 aa, Homo sapiens
MPKTMHFLFRFIVFFYLWGLFTAQRQKKEESTEEVKIEVLHRPENCSKTSKKGDLLNAHYDGYLAKDGSKFYCSRTQNEGHPKWFVLGVGQVIKGLDIAMTDMCPGEKRKVVIPPSFAYGKEGYDKPLLAKGI

SEQ ID NO: 50348 - protein, 172 aa, Homo sapiens
MVPSKDSAKANPSCSITPITGNNSDKSEDKGKLKASSSSQPSSSESGSFLLKSGTTPLPPGAATSPSKSTNGAPGTVVESEEEKAKKLLYCSLCKVAVNSLSQLEAHNTGSKHKTMVEARNGAGPIKSYPRPGSRLKMQNGSKGSGLQNKTFHCEICDVHVNSEIQLKQPKA

SEQ ID NO: 50349 - protein, 583 aa, Homo sapiens
MAPVKYHGDRSKESLVSFAMQHVRSTVTELWTGNFVNSIQTAFAAGIGWLITFCSKGGDCLTSQTRLRLSGMLDGLVNVGWMDCATQDNLCKSLDITTSTTAYFPPGATLNNKEKNSILFLNSLDAKEIYLEVIHNLPDFELLSANTLEDRLAHHRWLLFFHFGKNENSNDPELKKLKTLLKNDHIQVGRFDCSSAPDICSNLYVFQPSLAVFKGQGTKEYEIHHGKKILYDILAFAKESVNSHVTTLGPQNFPANDKEPWLVDFFAPWCPPCRALLPELRRASNLLYGQLKFGTLDCTVHEGLCNMYNIQAYPTTVVFNQSNIHEYEGHHSAEQILEFIEDLMNPSVVSLTPTTFNELVTQRKHNEVWMVDFYSPWCHPCQVLMPEWKRMARTLTGLINVGSIDCQQYHSFCAQENVQRYPEIRFFPPKSNKAYHYHSYNGWNRDAYSLRIWGLGFLPQVSTDLTPQTFSEKVLQGKNHWVIDFYAPWCGPCQNFAPEFELLARMIKGKVKAGKVDCQAYAQTCQKAGIRAYPTVKFYFYERAKRNFQEEQINTRDAKAIAALISEKLETLRNQGKRNKDEL

SEQ ID NO: 50350 - protein, 537 aa, Homo sapiens
MAPVKYHGDRSKESLVSFAMQHVRSTVTELWTGNFVNSIQTAFAAGIGWLITFCSKGGDCLTSQTRLRLSGMLFLNSLDAKEIYLEVIHNLPDFELLSANTLEDRLAHHRWLLFFHFGKNENSNDPELKKLKTLLKNDHIQVGRFDCSSAPDICSNLYVFQPSLAVFKGQGTKEYEIHHGKKILYDILAFAKESVNSHVTTLGPQNFPANDKEPWLVDFFAPWCPPCRALLPELRRASNLLYGQLKFGTLDCTVHEGLCNMYNIQAYPTTVVFNQSNIHEYEGHHSAEQILEFIEDLMNPSVVSLTPTTFNELVTQRKHNEVWMVDFYSPWCHPCQVLMPEWKRMARTLTGLINVGSIDCQQYHSFCAQENVQRYPEIRFFPPKSNKAYHYHSYNGWNRDAYSLRIWGLGFLPQVSTDLTPQTFSEKVLQGKNHWVIDFYAPWCGPCQNFAPEFELLARMIKGKVKAGKVDCQAYAQTCQKAGIRAYPTVKFYFYERAKRNFQEEQINTRDAKAIAALISEKLETLRNQGKRNKDEL

SEQ ID NO: 50351 - protein, 308 aa, Homo sapiens
MLGSPTSPKPGVNAQFLPGFLMGDLPAPVTPQPRSISGPSVGVMEMRSPLLAGGSPPQPVVPAHKDKSGAPPVRSIYDDISSPGLGSTPLTSRRQPNISVMQSPLVGVTSTPGTGQSMFSPASIGQPRKTTLSPAQLDPFYTQGDSLTSEDHLDDSWVTVFGFPQASASYILLQFAQYGNILKHVMSNTGNWMHIRYQSKLQARKALSKDGRIFGESIMIGVKPCIDKSVMESSDRCALSSPSLAFTPPIKTLGTPTQPGSTPRISTMRPLATAYKASTSDYQVISDRQTPKKDESLVSKAMEYMFGW

SEQ ID NO: 50352 - protein, 767 aa, Homo sapiens
MVYIYDGKNMSSLYNFTGEQMAAYFGFSVAATDINGDDYADVFIGAPLFMDRGSDGKLQEVGQVSVSLQRASGDFQTTKLNGFEVFARFGSAIAPLGDLDQDGFNDIAIAAPYGGEDKKGIVYIFNGRSTGLNAVPSQILEGQWAARSMPPSFGYSMKGATDIDKNGYPDLIVGAFGVDRAILYRARPVITVNAGLEVYPSILNQDNKTCSLPGTALKVSCFNVRFCLKADGKGVLPRKLNFQVELLLDKLKQKGAIRRALFLYSRSPSHSKNMTISRGGLMQCEELIAYLRDESEFRDKLTPITIFMEYRLDYRTAADTTGLQPILNQFTPANISRQAHILLDCGEDNVCKPKLEVSVDSDQKKIYIGDDNPLTLIVKAQNQGEGAYEAELIVSIPLQADFIGVVRNNEALARLSCAFKTENQTRQVVCDLGNPMKAGTQLLAGLRFSVHQQSEMDTSVKFDLQIQSSNLFDKVSPVVSHKVDLAVLAAVEIRGVSSPDHVFLPIPNWEHKENPETEEDVGPVVQHIYELRNNGPSSFSKAMLHLQWPYKYNNNTLLYILHYDIDGPMNCTSDMEINPLRIKISSLQTTEKNDTVAGQGERDHLITKRDLALSEGDIHTLGCGVAQCLKIVCQVGRLDRGKSAILYVKSLLWTETFMNKENQNHSYSLKSSASFNVIEFPYKNLPIEDITNSTLVTTNVTWGIQPAPMPVPVWVIILAVLAGLLLLAVLVFVMYRMGFFKRVRPPQEEQEREQLQPHENGEGNSET

SEQ ID NO: 50353 - protein, 531 aa, Homo sapiens
MNTGAWVNHGRGMVKEHNNHLIWTYDAPHLGYWIAAPLPGTRGSGINEDSKDITAYHTVFLTAILGGTIVIVIGFFAVLLCYCRDKCGTPQKRERNITKLEVLKRDQTTSTTHINHISTVKVALKAEDKSQLFNAKNSSYSPQKKEPSKAETEERVSMVKTRDDFKIYNEDVSFLSVNQNNYSRNPTQSLEPNVGSKQPKHINNNLSSSLGDAQDEKRYLTGNEEAYGRSHIPEQLMHIYSQPIAILQTSDLFSTPEQLHTAKSATLPRKGQLVYGQLMEPVNRENFTQTLPKMPIHSHAQPPDAREEDIILEGQQSLPSQASDWSRYSSSLLESVSVPGTLNEAVVMTPFSSELQGISEQTLLELSKGKPSPHPRAWFVSLDGKPVAQVRHSFIDLKKGKRTQSNDTSLDSGVDMNELHSSRKLEREKTFIKSMHQPKILYLEDLDLSSSESGTTVCSPEDPALRHILDGGSGVIMEHPGEESPGRKSTVEDFEANTSPTKRRGRPPLAKRDSKTNIWKKREERPLIPIN

SEQ ID NO: 50354 - protein, 472 aa, Homo sapiens
MLYSIFHFGLMMEKKCTLYFLVLLPFFMILVTAELEESPEDSIQLGVTRNKIMTAQYECYQKIMQDPIQQAEGVYCNRTWDGWLCWNDVAAGTESMQLCPDYFQDFDPSEKVTKICDQDGNWFRHPASNRTWTNYTQCNVNTHEKVKTALNLFYLTIIGHGLSIASLLISLGIFFYFKSLSCQRITLHKNLFFSFVCNSVVTIIHLTAVANNQALVATNPVSCKVSQFIHLYLMGCNYFWMLCEGIYLHTLIVVAVFAEKQHLMWYYFLGWGFPLIPACIHAIARSLYYNDNCWISSDTHLLYIIHGPICAALLVNLFFLLNIVRVLITKLKVTHQAESNLYMKAVRATLILVPLLGIEFVLIPWRPEGKIAEEVYDYIMHILMHFQGLLVSTIFCFFNGEVQAILRRNWNQYKIQFGNSFSNSEALRSASYTVSTISDGPGYSHDCPSEHLNGKSIHDIENVLLKPENLYN

SEQ ID NO: 50355 - protein, 21 aa, Homo sapiens
MIHQPLVLPSVKTLDGPTFRS

SEQ ID NO: 50356 - protein, 1305 aa, Homo sapiens
MAGLDEKSGLGSQVGLMPGSVGPVGPRGPQGLQGQQGGAGPTGPPGEPGDPGPMGPIGSRGPEGPPGKPGEDGEPGRNGNPGEVGFAGSPGARGFPGAPGLPGLKGHRGHKGLEGPKGEVGAPGSKGEAGPTGPMGAMGPLGPRGMPGERGRLGPQGAPGQRGAHGMPGKPGPMGPLGIPGSSGFPGNPGMKGEAGPTGARGPEGPQGQRGETGPPGPVGSPGLPGAIGTDGTPGAKGPTGSPGTSGPPGSAGPPGSPGPQGSTGPQGIRGQPGDPGVPGFKGEAGPKGEPGPHGIQGPIGPPGEEGKRGPRGDPGTVGPPGPVGERGAPGNRGFPGSDGLPGPKGAQGERGPVGSSGPKGSQGDPGRPGEPGLPGARGLTGNPGVQGPEGKLGPLGAPGEDGRPGPPGSIGIRGQPGSMGLPGPKGSSGDPGKPGEAGNAGVPGQRGAPGKDGEVGPSGPVGPPGLAGERGEQGPPGPTGFQGLPGPPGPPGEGGKPGDQGVPGDPGAVGPLGPRGERGNPGERGEPGITGLPGEKGMAGGHGPDGPKGSPGPSGTPGDTGPPGLQGMPGERGIAGTPGPKGDRGGIGEKGAEGTAGNDGARGLPGPLGPPGPAGPTGEKGEPGPRGLVGPPGSRGNPGSRGENGPTGAVGFAGPQGPDGQPGVKGEPGEPGQKGDAGSPGPQGLAGSPGPHGPNGVPGLKGGRGTQGPPGATGFPGSAGRVGPPGPAGAPGPAGPLGEPGKEGPPGLRGDPGSHGRVGDRGPAGPPGGPGDKGDPGEDGQPGPDGPPGPAGTTGQRGIVGMPGQRGERGMPGLPGPAGTPGKVGPTGATGDKGPPGPVGPPGSNGPVGEPGPEGPAGNDGTPGRDGAVGERGDRGDPGPAGLPGSQGAPGTPGPVGAPGDAGQRGDPGSRGPIGPPGRAGKRGLPGPQGPRGDKGDHGDRGDRGQKGHRGFTGLQGLPGPPGPNGEQGSAGIPGPFGPRGPPGPVGPSGKEGNPGPLGPIGPPGVRGSVGEAGPEGPPGEPGPPGPPGPPGHLTAALGDIMGHYDESMPDPLPEFTEDQAAPDDKNKTDPGVHATLKSLSSQIETMRSPDGSKKHPARTCDDLKLCHSAKQSGEYWIDPNQGSVEDAIKVYCNMETGETCISANPSSVPRKTWWASKSPDNKPVWYGLDMNRGSQFAYGDHQSPNTAITQMTFLRLLSKEASQNITYICKNSVGYMDDQAKNLKKAVVLKGANDLDIKAEGNIRFRYIVLQDTCSKRNGNVGKTVFEYRTQNVARLPIIDLAPVDVGGTDQEFGVEIGPVCFV

SEQ ID NO: 50357 - protein, 397 aa, Homo sapiens
MLPQAALETHCSNISNVPPTREILQVFLTDVHMKEVIQQFIDVLSVAVKKRVLCLPRDENLTANEVLKTCDRKANVAILFSGGIDSMVIATLADRHIPLDEPIDLLNVAFIAEEKTMPTTFNREGNKQKNKCEIPSEEFSKDVAAAAADSPNKHVSVPDRITGRAGLKELQAVSPSRIWNFVEINVSMEELQKLRRTRICHLIRPLDTVLDDSIGCAVWFASRGIGWLVAQEGVKSYQSNAKVVLTGIGADEQLAGYSRHRVRFQSHGLEGLNKEIMMELGRISSRNLGRDDRVIGDHGKEARFPFLDENVVSFLNSLPIWEKANLTLPRGIGEKLLLRLAAVELGLTASALLPKRAMQFGSRIAKMEKINEKASDKCGRLQIMSLENLSIEKETKL

SEQ ID NO: 50358 - protein, 53 aa, Homo sapiens
MKQVILFFIMLPCTTEFLLYVNCAMLTSRSTRGALLRSAKVQHLYTLLHRLAH

SEQ ID NO: 50359 - protein, 685 aa, Homo sapiens
MEIRQYLAQWLEKQDWEHAANDVSFATIRFHDLLSQLDDQYSRFSLENNFLLQHNIRKSKRNLQDNFQEDPIQMSMIIYSCLKEERKILENAQRFNQAQSGNIQSTVMLDKQKELDSKVRNVKDKVMCIEHEIKSLEDLQDEYDFKCKTLQNREHETNGVAKSDQKQEQLLLKKMYLMLDNKRKEVVHKIIELLNVTELTQNALINDELVEWKRRQQSACIGGPPNACLDQLQNWFTIVAESLQQVRQQLKKLEELEQKYTYEHDPITKNKQVLWDRTFSLFQQLIQSSFVVERQPCMPTHPQRPLVLKTGVQFTVKLRLLVKLQELNYNLKVKVLFDKDVNERNTVKGFRKFNILGTHTKVMNMEESTNGSLAAEFRHLQLKEQKNAGTRTNEGPLIVTEELHSLSFETQLCQPGLVIDLETTSLPVVVISNVSQLPSGWASILWYNMLVAEPRNLSFFLTPPCARWAQLSEVLSWQFSSVTKRGLNVDQLNMLGEKLLGPNASPDGLIPWTRFCKENINDKNFPFWLWIESILELIKKHLLPLWNDGCIMGFISKERERALLKDQQPGTFLLRFSESSREGAITFTWVERSQNGGEPDFHAVEPYTKKELSAVTFPDIIRNYKVMAAENIPENPLKYLYPNIDKDHAFGKYYSRPKEAPEPMELDGPKGTGYIKTELISVSEV

SEQ ID NO: 50360 - protein, 244 aa, Homo sapiens
MVSENDVIRLIKQILEGVYYLHQNNIVHLDLKPQNILLSSIYPLGDIKIVDFGMSRKIGHACELREIMGTPEYLAPEILNYDPITTATDMWNIGIIAYMLLTHTSPFVGEDNQETYLNISQVNVDYSEETFSSVSQLATDFIQSLLVKNPEKRPTAEICLSHSWLQQWDFENLFHPEETSSSSQTQDHSVRSSEDKTSKSSCNGTCGDREDKENIPEDSSMVSKRFRFDDSLPNPHELVSDLLC

SEQ ID NO: 50361 - protein, 854 aa, Homo sapiens
MASSAREHLLFVRRRNPQMRYTLSPENLQSLAAQSSMPENMTLQRANSDTDLVTSESRSSLTASMYEYTLGQAQNLIIFWDIKEEVDPSDWIGLYHIDENSPANFWDSKNRGVTGTQKGQIVWRIEPGPYFMEPEIKICFKYYHGISGALRATTPCITVKNPAVMMGAEGMEGGASGNLHSRKLVSFTLSDLRAVGLKKGMFFNPDPYLKMSIQPGKKSSFPTCAHHGQERRSTIISNTTNPIWHREKYSFFALLTDVLEIEIKDKFAKSRPIIKRFLGKLTIPVQRLLERQAIGDQMLSYNLGRRLPADHVSGYLQFKVEVTSSVHEDASPEAVGTILGVNSVNGDLGSPSDDEDMPGSHHDSQVCSNGPVSEDSAADGTPKHSFRTSSTLEIDTEELTSTSSRTSPPRGRQDSLNDYLDAIEHNGHSRPGTATCSERSMGASPKLRSSFPTDTRLNAMLHIDSDEEDHEFQQDLGYPSSLEEEGGLIMFSRASRADDGSLTSQTKLEDNPVENEEASTHEAASFEDKPENLPELAESSLPAGPAPEEGEGGPEPQPSADQGSAELCGSQEVDQPTSGADTGTSDASGGSRRAVSETESLDQGSEPSQVSSETEPSDPARTESVSEASTRPEGESDLECADSSCNESVTTQLSSVDTRCSSLESARFPETPAFSSQEEEDGACAAEPTSSGPAEGSQESVCTAGSLPVVQVPSGEDEGPGAESATVPDQEELGEVWQRRGSLEGAAAAAESPPQEEGSAGEAQGTCEGATAQEEGATGGSQANGHQPLRSLPSVRQDVSRYQRVDEALPPSEDLLVKRAHLNQTVKGDRQTHSHESQKMDTWSSSGRNLGVAT

SEQ ID NO: 50362 - protein, 881 aa, Homo sapiens
MFEYPEYQKIELPKKLAKRYPAYELYLYGEGSYAEEHKILPLTGIPVLFLPGNAGSYKQVRSIGSIALRKAEDIDFKYHFDFFSVNFNEELVALYGGSLQKQTKFVHECIKTILKLYKGQEFAPKSVAIIGHSMGGLVARALLTLKNFKHDLINLLITQATPHVAPVMPLDRFITDFYTTVNNYWILNARHINLTTLSVAGGFRDYQVRSGLTFLPKLSHHTSALSVVSSAVPKTWVSTDHLSIVWCKQLQLTTVRAFFDLIDADTKQITQNSKKKLSVLYHHFIRHPSKHFEENPAIISDLTGTSMWVLVKVSKWTYVAYNESEKIYFTFPLENHRKIYTHVYCQSTMLDTNSWIFACINSTSMCLQGVDLSWKAELLPTIKYLTLRLQDYPSLSHLVVYVPSVRGSKFVVDCEFFKKEKRYIQLPVTHLFSFGLSSRKVVLNTNGLYYNLELLNFGQIYQAFKINVVSKCSAVKEEITSIYRLHIPWSYEDSLTIAQAPSSTEISLKLHIAQPENNTHVALFKMYTSSDCRYEVTVKTSFSQILGQVVRFHGGALPAYVVSNILLAYRGQLYSLFSTGCCLEYATMLDKEAKPYKVDPFVIIIKFLLGYKWFKELWDVLLLPELDAVILTCQSMCFPLISLILFLFGTCTAYWSGLLSSASVRLLSSLWLALKRPSELPKDIKMISPDLPFLTIVLIIVSWTTCGALAILLSYLYYVFKVVHLQASLTTFKNSQPVNPKHSRRSEKKSNHHKDSSIHHLRLSANDAEDSLRMHSTVINLLTWIVLLSMPSLIYWLKNLRYYFKLNPDPCKPLAFILIPTMAILGNTYTVSIKSSKLLKTTSQFPLPLAVGVIAFGSAHLYRLPCFVFIPLLLHALCNFM

SEQ ID NO: 50363 - protein, 1152 aa, Homo sapiens
MDVMREQHLTKEEREIRQQLAEKAKAGELKVVNGAAASQPPSKRKRRWDQTADQTPGATPKKLSSWDQAETPGHTPSLRWDETPGRAKGSETPGATPGSKIWDPTPSHTPAGAATPGRGDTPGHATPGHGGATSSARKNRWDETPKTERDTPGHGSGWAETPRTDRGGDSIGETPTPGASKRKSRWDETPASQMGGSTPVLTPGKTPIGTPAMNMATPTPGHIMSMTPEQLQAWRWEREIDERNRPLSDEELDAMFPEGYKVLPPPAGYVPIRTPARKLTATPTPLGGMTGFHMQTEDRTMKSVNDQPSGNLPFLKPDDIQYFDKLLVDVDESTLSPEEQKERKIMKLLLKIKNGTPPMRKAALRQITDKAREFGAGPLFNQILPLLMSPTLEDQERHLLVKVIDRILYKLDDLVRPYVHKILVVIEPLLIDEDYYARVEGREIISNLAKAAGLATMISTMRPDIDNMDEYVRNTTARAFAVVASALGIPSLLPFLKAVCKSKKSWQARHTGIKIVQQIAILMGCAILPHLRSLVEIIEHGLVDEQQKVRTISALAIAALAEAATPYGIESFDSVLKPLWKGIRQHRGKGLAAFLKAIGYLIPLMDAEYANYYTREVMLILIREFQSPDEEMKKIVLKVVKQCCGTDGVEANYIKTEILPPFFKHFWQHRMALDRRNYRQLVDTTVELANKVGAAEIISRIVDDLKDEAEQYRKMVMETIEKIMGNLGAADIDHKLEEQLIDGILYAFQEQTTEDSVMLNGFGTVVNALGKRVKPYLPQICGTVLWRLNNKSAKVRQQAADLISRTAVVMKTCQEEKLMGHLGVVLYEYLGEEYPEVLGSILGALKAIVNVIGMHKMTPPIKDLLPRLTPILKNRHEKVQENCIDLVGRIADRGAEYVSAREWMRICFELLELLKAHKKAIRRATVNTFGYIAKAIGPHDVLATLLNNLKVQERQNRVCTTVAIAIVAETCSPFTVLPALMNEYRVPELNVQNGVLKSLSFLFEYIGEMGKDYIYAVTPLLEDALMDRDLVHRQTASAVVQHMSLGVYGFGCEDSLNHLLNYVWPNVFETSPHVIQAVMGALEGLRVAIGPCRMLQYCLQGLFHPARKVRDVYWKIYNSIYIGSQDALIAHYPRIYNDDKNTYIRYELDYIL

SEQ ID NO: 50364 - protein, 864 aa, Homo sapiens [sequence omitted]

SEQ ID NO: 50365 - protein, 675 aa, Homo sapiens
MIPVFCVVEQLDGSLEYDNREEHAEFVLVRKDVLFSQLVETALLALGYSHSSAAQAQGIIKLGRWNPLPLSYVTDAPDATVADMLQDVYHVVTLKIQLQSCSKLEDLPAEQWNHATVRNALKELLKEMNQSTLAKECPLSQSMISSIVNSTYYANVSATKCQEFGRWYKKYKKIKVERVERENLSDYCVLGQRPMHLPNMNQLASLGKTNEQSPHSQIHHSTPIRNQVPALQPIMSPGLLSPQLSPQLVRQQIAMAHLINQQIAVSRLLAHQHPQAINQQFLNHPPIPRAVKPEPTNSSVEVSPDIYQQVRDELKRASVSQAVFARVAFNRTQGLLSEILRKEEDPRTASQSLLVNLRAMQNFLNLPEVERDRIYQDERERSMNPNVSMVSSASSSPSSSRTPQAKTSTPTTDLPIKVDGANINITAAIYDEIQQEMKRAKVSQALFAKVAANKSQGWLCELLRWKENPSPENRTLWENLCTIRRFLNLPQHERDVIYEEESRHHHSERMQHVVQLPPEPVQVLHRQQSQPAKESSPPREEAPPPPPPTEDSCAKKPRSRTKISLEALGILQSFIHDVGLYPDQEAIHTLSAQLDLPKHTIIKFFQNQRYHVKHHGKLKEHLGSAVDVAEYKDEELLTESEENDSEEGSEEMYKVEAEEENADKSKAAPAEIDQR

SEQ ID NO: 50366 - protein, 336 aa, Homo sapiens
MPASSYQSLCRMGSRVCVSGFPRQHEKHWKELCGRIVLDPEFMVQLLTGVYYAMYNGQWDLGQEVLDDIIYRAQLELFSQPLLVANAMKNSLPFDAPDSTQEGQKVLKVEVTPTVPRISRTAITTASIRRHRWRREGAEGVNGGEESVNLNDADEGFSSGASLSSQPIGTKPSSSSQRGSLRKVATGRSAKDKETASAIKSSESPRDSVVRKQYVQQPTDLSVDSVELTPMKKHLSLPAGQVVPKINSLSLIRTASASSSKSFDYVNGSQASTSIGVGTEGGTNLAANNANRYSTVSLQEDRLGQAGEGKELLSPGAPLTKQSRSPSFNMQLISQV

SEQ ID NO: 50367 - protein, 85 aa, Homo sapiens [sequence omitted]

SEQ ID NO: 50368 - protein, 555 aa, Homo sapiens
MRATVPFQLKQQQQQQHGSPTRSGGGGGGNNNGGCCGGASGPAGGGGGGGPRTASRSTSPTRGGGNAAARTSPTVATQTGASATSTRGTSPTRSAAPGARGSPPRPPPPPPLLGTVSSPSSSPTHLWTGEVSAAPPPARVRHRRRSPEQSRSSPEKRSPSAPVCKAGDKTRQPSSSPSSIIRRTSSLDTLAAPYLAGHWPRDSHGQAAPCMRDKATQTESAWAEEYSEKKKGSHKRSASWGSTDQLKEIAKLRQQLQRSKHSSRHHRDKERQSPFHGNHAAINQCQAPVPKSALIPVIPITKSTGSRFRNSVEGLNQEIEIIIKETGEKEEQLIPQDIPDGHRAPPPLVQRSSSTRSIDTQTPGGADRGSNNSSRSQSVSPTSFLTISNEGSEESPCSADDLLVDPRDKENGNNSPLPKYATSPKPNNSYMFKREPPEGCERVKVFEECSPKQLHEIPAFYCPDKNKVNFIPKSGSAFCLVSILKPLLPTPDLTLKGSGHSLTVTTGMTTTLLQPIAVASLSTNTEQDRVSRGTSTVMPSASLLPPPEPIEEAEG

SEQ ID NO: 50369 - protein, 1189 aa, Homo sapiens
MANFSYRFSIYNLNEALNQGETVDLDALMADLCSIEQELSSIGSGNSKRQITETKATQKLPVSRHTLKHGTLKGLSSSSNRIAKPSHASYSLDDVTAQLEQASLSMDEAAQQSVLEDTKPLVTNQHRRTASAGTVSDAEVHSISNSSHSSITSAASSMDSLDIDKVTRPQELDLTHQGQPITEEEQAAKLKAEKIRVALEKIKEAQVKKLVIRVHMSDDSSKTMMVDERQTVRQVLDNLMDKSHCGYSLDWSLVETVSELQMERIFEDHENLVENLLNWTRDSQNKLIFMERIEKYALFKNPQNYLLGKKETAEMADRNKEVLLEECFCGSSVTVPEIEGVLWLKDDGKKSWKKRYFLLRASGIYYVPKGKAKVSRDLVCFLQLDHVNVYYGQDYRNKYKAPTDYCLVLKHPQIQKKSQYIKYLCCDDVRTLHQWVNGIRIAKYGKQLYMNYQEALKRTESAYDWTSLSSSSIKSGSSSSSIPESQSNHSNQSDSGVSDTQPAGHVRSQSIVSSVFSEAWKRGTQLEESSKARMESMNRPYTSLVPPLSPQPKIVTPYTASQPSPPLPPPPPPPPPPPPPPPPPPPPLPSQSAPSAGSAAPMFVKYSTITRLQNASQHSGALFKPPTPPVMQSQSVKPQILVPPNGVVPPPPPPPPPPTPGSAMAQLKPAPCAPSLPQFSAPPPPLKIHQVQHITQVAPPTPPPPPPIPAPLPPQAPPKPLVTIPAPTSTKTVAPVVTQAAPPTPTPPVPPAKKQPAFPASYIPPSPPTPPVPVPPPTLPKQQSFCAKPPPSPLSPVPSVVKQIASQFPPPPTPPAMESQPLKPVPANVAPQSPPAVKAKPKWQPSSIPVPSPDFPPPPPESSLVFPPPPPSPVPAPPPPPPPTASPTPDKSGSPGKKTSKTSSPGGKKPPPTPQRNSSIKSSSGAEHPEPKRPSVDSLVSKFTPPAESGSPSKETLPPPAAPPKPGKLNLSGVNLPGVLQQGCVSAKAPVLSGRGKDSVVEFPSPPSDSDFPPPPPETELPLPPIEIPAVFSGNTSPKVAVVNPQPQQWSKMSVKKAPPPTRPKRNDSTRLTQAEISEQPTMATVVPQVPTSPKSSLSVQPGFLADLNRTLQRKSITRHGSLSSRMSRAEPTATMDDMALPPPPPELLSDQQKAGYGGSHISGYATLRRGPPPAPPKRDQNTKLSRDW

SEQ ID NO: 50370 - protein, 1241 aa, Homo sapiens
MANFSYRFSIYNLNEALNQGETVDLDALMADLCSIEQELSSIGSGNSKRQITETKATQKLPVSRHTLKHGTLKGLSSSSNRIAKPSHASYSLDDVTAQLEQASLSMDEAAQQSVLEDTKPLVTNQHRRTASAGTVSDAEVHSISNSSHSSITSAASSMDSLDIDKVTRPQELDLTHQGQPITEHAISLRCSSKQAKRHIDFTEEQAELTPHSYLDRETSLLLRNIAGKPSHLLTKEEQAAKLKAEKIRVALEKIKEAQVKKLVIRVHMSDDSSKTMMVDERQTVRQVLDNLMDKSHCGYSLDWSLVETVSELQMERIFEDHENLVENLLNWTRDSQNKLIFMERIEKYALFKNPQNYLLGKKETAEMADRNKEVLLEECFCGSSVTVPEIEGVLWLKDDGKKSWKKRYFLLRASGIYYVPKGKAKVSRDLVCFLQLDHVNVYYGQDYRNKYKAPTDYCLVLKHPQIQKKSQYIKYLCCDDVRTLHQWVNGIRIAKYGKQLYMNYQEALKRTESAYDWTSLSSSSIKSGSSSSSIPESQSNHSNQSDSGVSDTQPAGHVRSQSIVSSVFSEAWKRGTQLEESSKARMESMNRPYTSLVPPLSPQPKIVTPYTASQPSPPLPPPPPPPPPPPPPPPPPPPPLPSQSAPSAGSAAPMFVKYSTITRLQNASQHSGALFKPPTPPVMQSQSVKPQILVPPNGVVPPPPPPPPPPTPGSAMAQLKPAPCAPSLPQFSAPPPPLKIHQVQHITQVAPPTPPPPPPIPAPLPPQAPPKPLVTIPAPTSTKTVAPVVTQAAPPTPTPPVPPAKKQPAFPASYIPPSPPTPPVPVPPPTLPKQQSFCAKPPPSPLSPVPSVVKQIASQFPPPPTPPAMESQPLKPVPANVAPQSPPAVKAKPKWQPSSIPVPSPDFPPPPPESSLVFPPPPPSPVPAPPPPPPPTASPTPDKSGSPGKKTSKTSSPGGKKPPPTPQRNSSIKSSSGAEHPEPKRPSVDSLVSKFTPPAESGSPSKETLPPPAAPPKPGKLNLSGVNLPGVLQQGCVSAKAPVLSGRGKDSVVEFPSPPSDSDFPPPPPETELPLPPIEIPAVFSGNTSPKVAVVNPQPQQWSKMSVKKAPPPTRPKRNDSTRLTQAEISEQPTMATVVPQVPTSPKSSLSVQPGFLADLNRTLQRKSITRHGSLSSRMSRAEPTATMDDMALPPPPPELLSDQQKAGYGGSHISGYATLRRGPPPAPPKRDQNTKLSRDW

SEQ ID NO: 50371 - protein, 556 aa, Homo sapiens
MANFSYRFSIYNLNEALNQGETVDLDALMADLCSIEQELSSIGSGNSKRQITETKATQKLPVSRHTLKHGTLKGLSSSSNRIAKPSHASYSLDDVTAQLEQASLSMDEAAQQSVLEDTKPLVTNQHRRTASAGTVSDAEVHSISNSSHSSITSAASSMDSLDIDKVTRPQELDLTHQGQPITEHSYLDRETSLLLRNIAGKPSHLLTKEEQAAKLKAEKIRVALEKIKEAQVKKLVIRVHMSDDSSKTMMVDERQTVRQVLDNLMDKSHCGYSLDWSLVETVSELQMERIFEDHENLVENLLNWTRDSQNKLIFMERIEKYALFKNPQNYLLGKKETAEMADRNKEVLLEECFCGSSVTVPEIEGVLWLKDDGKKSWKKRYFLLRASGIYYVPKGKAKVSRDLVCFLQLDHVNVYYGQDYRNKYKAPTDYCLVLKHPQIQKKSQYIKYLCCDDVRTLHQWVNGIRIAKYGKQLYMNYQEALKRTESAYDWTSLSSSSIKSGSSSSSIPESQSNHSNQSDSGVSDTQPAGHVRSQSIVSSVFSEAWKRGTQLEESSK

SEQ ID NO: 50372 - protein, 904 aa, Homo sapiens
MFPLTWVFLALYFSRHQVRGQPDPPCGGRLNSKDAGYITSPGYPQDYPSHQNCEWIVYAPEPNQKIVLNFNPHFEIEKHDCKYDFIEIRDGDSESADLLGKHCGNIAPPTIISSGSMLYIKFTSDYARQGAGFSLRYEIFKTGSEDCSKNFTSPNGTIESPGFPEKYPHNLDCTFTILAKPKMEIILQFLIFDLEHDPLQVGEGDCKYDWLDIWDGIPHVGPLIGKYCGTKTPSELRSSTGILSLTFHTDMAVAKDGFSARYYLVHQEPLENFQCNVPLGMESGRIANEQISASSTYSDGRWTPQQSRLHGDDNGWTPNLDSNKEYLQVDLRFLTMLTAIATQGAISRETQNGYYVKSYKLEVSTNGEDWMVYRHGKNHKVFQANNDATEVVLNKLHAPLLTRFVRIRPQTWHSGIALRLELFGCRVTDAPCSNMLGMLSGLIADSQISASSTQEYLWSPSAARLVSSRSGWFPRIPQAQPGEEWLQVDLGTPKTVKGVIIQGARGGDSITAVEARAFVRKFKVSYSLNGKDWEYIQDPRTQQPKLFEGNMHYDTPDIRRFDPIPAQYVRVYPERWSPAGIGMRLEVLGCDWTDSKPTVETLGPTVKSEETTTPYPTEEEATECGENCSFEDDKDLQLPSGFNCNFDFLEEPCGWMYDHAKWLRTTWASSSSPNDRTFPDDRNFLRLQSDSQREGQYARLISPPVHLPRSPVCMEFQYQATGGRGVALQVVREASQESKLLWVIREDQGGEWKHGRIILPSYDMEYQIVFEGVIGKGRSGEIAIDDIRISTDVPLENCMEPISAFAGENFKGGTLLPGTEPTVDTVPMQPIPAYWYYVMAAGGAVLVLVSVALALVLHYHRFRYAAKKTDHSITYKTSHYTNGAPLAVEPTLTIKLEQDRGSHC

SEQ ID NO: 50373 - protein, 899 aa, Homo sapiens
MFPLTWVFLALYFSRHQVRGQPDPPCGGRLNSKDAGYITSPGYPQDYPSHQNCEWIVYAPEPNQKIVLNFNPHFEIEKHDCKYDFIEIRDGDSESADLLGKHCGNIAPPTIISSGSMLYIKFTSDYARQGAGFSLRYEIFKTGSEDCSKNFTSPNGTIESPGFPEKYPHNLDCTFTILAKPKMEIILQFLIFDLEHDPLQVGEGDCKYDWLDIWDGIPHVGPLIGKYCGTKTPSELRSSTGILSLTFHTDMAVAKDGFSARYYLVHQEPLENFQCNVPLGMESGRIANEQISASSTYSDGRWTPQQSRLHGDDNGWTPNLDSNKEYLQVDLRFLTMLTAIATQGAISRETQNGYYVKSYKLEVSTNGEDWMVYRHGKNHKVFQANNDATEVVLNKLHAPLLTRFVRIRPQTWHSGIALRLELFGCRVTDAPCSNMLGMLSGLIADSQISASSTQEYLWSPSAARLVSSRSGWFPRIPQAQPGEEWLQVDLGTPKTVKGVIIQGARGGDSITAVEARAFVRKFKVSYSLNGKDWEYIQDPRTQQPKLFEGNMHYDTPDIRRFDPIPAQYVRVYPERWSPAGIGMRLEVLGCDWTDSKPTVETLGPTVKSEETTTPYPTEEEATECGENCSFEDDKDLQLPSGFNCNFDFLEEPCGWMYDHAKWLRTTWASSSSPNDRTFPDDRNFLRLQSDSQREGQYARLISPPVHLPRSPVCMEFQYQATGGRGVALQVVREASQESKLLWVIREDQGGEWKHGRIILPSYDMEYQIVFEGVIGKGRSGEIAIDDIRISTDVPLENCMEPISAFAGGTLLPGTEPTVDTVPMQPIPAYWYYVMAAGGAVLVLVSVALALVLHYHRFRYAAKKTDHSITYKTSHYTNGAPLAVEPTLTIKLEQDRGSHC

SEQ ID NO: 50374 - protein, 924 aa, Homo sapiens
MFPLTWVFLALYFSRHQVRGQPDPPCGGRLNSKDAGYITSPGYPQDYPSHQNCEWIVYAPEPNQKIVLNFNPHFEIEKHDCKYDFIEIRDGDSESADLLGKHCGNIAPPTIISSGSMLYIKFTSDYARQGAGFSLRYEIFKTGSEDCSKNFTSPNGTIESPGFPEKYPHNLDCTFTILAKPKMEIILQFLIFDLEHDPLQVGEGDCKYDWLDIWDGIPHVGPLIGKYCGTKTPSELRSSTGILSLTFHTDMAVAKDGFSARYYLVHQEPLENFQCNVPLGMESGRIANEQISASSTYSDGRWTPQQSRLHGDDNGWTPNLDSNKEYLQVDLRFLTMLTAIATQGAISRETQNGYYVKSYKLEVSTNGEDWMVYRHGKNHKVFQANNDATEVVLNKLHAPLLTRFVRIRPQTWHSGIALRLELFGCRVTDAPCSNMLGMLSGLIADSQISASSTQEYLWSPSAARLVSSRSGWFPRIPQAQPGEEWLQVDLGTPKTVKGVIIQGARGGDSITAVEARAFVRKFKVSYSLNGKDWEYIQDPRTQQPKLFEGNMHYDTPDIRRFDPIPAQYVRVYPERWSPAGIGMRLEVLGCDWTDSKPTVETLGPTVKSEETTTPYPTEEEATECGENCSFEDDKDLQLPSGFNCNFDFLEEPCGWMYDHAKWLRTTWASSSSPNDRTFPDDRNFLRLQSDSQREGQYARLISPPVHLPRSPVCMEFQYQATGGRGVALQVVREASQESKLLWVIREDQGGEWKHGRIILPSYDMEYQIVFEGVIGKGRSGEIAIDDIRISTDVPLENCMEPISAFAVDIPEIHEREGYEDEIDDEYEVDWSNSSSATSGSGAPSTDKEKSWLYTLDPILITIIAMSSLGVLLGATCAGLLLYCTCSYSGLSSRSCTTLENYNFELYDGLKHKVKMNHQKCCSEA

SEQ ID NO: 50375 - protein, 2311 aa, Homo sapiens
MERFLQDVLQHHPYHCQESSSTQDETHVNTGSSSEVVHLDDAFSEEEEEDEDKVEDEDATEERPSEVSEPIEELHSRPHKSQEGTQEVSVRPSVIQKLEKGQQQPLEFVHKIGASVRKCNLVDIGQATNNRSNLVRPPVICNAPASCLPESSNDRPVTANTTSLPPAAHLDSVSKCDPNKVEKYLEQPDGASRNPVPSSHVETTSFSYQKHKESNRKSLRMNSDKLVLWKDVKSQGKTLSAGLKFHERMGTKGSLRVKSPSKLAVNPNKTDMPSNKGIFEDTIAKNHEEFFSNMDCTQEEKHLVFNKTAFWEQKCSVSSEMKFDCISLQSASDQPQETAQDLSLWKEEQIDQEDNYESRGSEMSFDCSSSFHSLTDQSKVSAKEVNLSKEVRTDVQYKNNKSYVSKISSDCDDILHLVTNQSQMIVKEISLQNARHISLVDQSYESSSSETNFDCDASPQSTSDYPQQSVTEVNLPKEVHIGLVDKNYGSSSSEVSADSVFPLQSVVDRPPVAVTETKLRKKAHTSLVDNYGSSCSETSFDCDVSLESVVDHPQLTVKGRNLKGRQVHLKHKKRKPSSAKAHLDCDVSLGTVADESQRAVEKINLLKEKNADLMDMNCESHGPEMGFQADAQLADQSQVAEIERQKVDVDLENKSVQSSRSSLSSDSPASLYHSAHDEPQEALDEVNLKELNIDMEVRSYDCSSSELTFDSDPPLLSVTEQSHLDAEGKERHIDLEDESCESDSSEITFDSDIPLYSVIDQPEVAVYEEETVDLESKSNESCVSEITFDSDIPLHSGNDHPEVAVKEVIQKEEYIHLERKNDEPSGSEISSDSHAPLHSVTNSPEVAVKKLNPQKEEQVHLENKENEPIDSEVSLDYNIIFHSVTGRSEDPIKEISLHTKEHMYLENKSVFETSLDSDVPLQAATHKPEVIVKETWLQREKHAEFQGRSTEFSGSKTSLDSGVPHYSVTEPQVAVNKINRKKQYVLENKNDKCSGSEIILDSNVPPQSMTDQPQLAFLKEKHVNLKDKNSKSGDSKITFDSEQLQEAVKKIDQWKEEVIGLKNKINEPSTYKLIHHPDVSVQSVADQPKVAIKHVNLGNENHMYLEVKNSQYSCSEMNLDSGFLGQSIVNRPQITILEQEHIELEGKHNQCCGSEVSFDSDDPLQSVADRLRETVKEISLWKDEEVDTEDRRNEAKGFEIMYDSDVLQPVAGQPEEVVKEVSLWKEHVDLENKIVKPTDSRINFDSHEPLQSVTNKIPGANKEINLLREEHVCLDDKGYVPSDSEIIYVSNIPLQSVIKQPHILEEEHASLEDKSSNSYSPEESSDSNDSFQAAADELQKPVKEINLWKEDHIYLEDKSYKLGDFDVSYASHIPVQFVTDQSSVPVKEINLQKKDHNDLENKNCEVCGSEIKCHSCVHLQSEVDQPQVSYKEADLQKEEHVVMEEKTDQPSDSEMMYDSDVPFQIVVNQFPGSVKETHLPKVVLVDLVPGDSDYEVISDDIPLQLVTDPPQLTVKDISCINTECIDIEDKSCDFFGSEVRCNCKASTPSMTNQCKETFKIINRKKDYIILGEPSCQSCGSEMNFNVDASDQSMTYESQGPDEKMVKYIDSEDKSCGYNGSKGKFNLEDTSHRTTHRLQKAHKEASLRKDPRNAGLKGKSCQSSASAVDFGASSKSALHRRADKKKRSKLKHRDLEVSCEPDGFEMNFQCAPPLPSDTDQPQETVKKRHPCKKVSSDLKEKNHDSQSSSVLKVDSVRNLKKAKDVIEDNPDEPVLEALPHVPPSFVGKTWSQIMREDDIKINALVKEFREGRFHCYFDDDCETKKVSSKGKKKVTWADLQGKEDTAPTQAVSESDDIVCGISDIDDLSVALDKPCHRHPPAERPPKQKGRVASQCQTAKISHSTQTSCKNYPVMKRKIIRQEEDPPKSKCSRLQDDRKTKKKVKIGTVEFPASCTKVLKPMQPKALVCVLSSLNIKLKEGEGLPFPKMRHHSWDNDIRFICKYKRNIFDYYEPLIKQIVISPPLSVIVPEFERRNWVKIHFNRSNQNSSAGDNDADGQGSASAPLMAVPARYGFNSHQGTSDSSLFLEESKVLHARELPKKRNFQLTFLNHDVVKISPKSVRNKLLESQSKKKIHGKRVTTSSNKLGFPKKVYKPIILQQKPRKASEKQSIWIRTKPSDIIRKYISKYSVFLRHRYQSRSAFLGRYLKKKKSVVSRLKKAKRTAKVLLNSSVPPAGAEELSSAMANPPPKRPVRASCRVARRRKKTDESYHGRQKGPSTPVRAYDLRSSSCLQQRERMMTRLANKLRGNEVK

SEQ ID NO: 50376 - protein, 141 aa, Homo sapiens
MAQEQATDTEILERKTVLPSKHAVPEVIEDFLCNFLIKMGMTRTLDCFQSEWYELIQKGVTELRTVGNVPDVYTQIMLLENENKNLKKDLKHYKQAADKAREDLLKIQKERDFHRMHHKRIVQEKNKLINDLKGFLDFKKH

SEQ ID NO: 50377 - protein, 36 aa, Homo sapiens
MVSTTTITFSMSRYLGSRCFICILGAQELSSTNFSS

SEQ ID NO: 50378 - protein, 408 aa, Homo sapiens
MPLCGLLWWWWCCCSGWYCYGLCAPAPQMLRHQGLLKCRCRMLFNDLKVFLLRRPPQAPLPMHGDPQPPGLAANNTLPALGAGGWAGWRGPREVVGREPPPVPPPPPLPPSSVEDDWGGPATEPPASLLSSASSDDFCKEKTEDRYSLGSSLDSGMRTPLCRICFQGPEQGELLSPCRCDGSVKCTHQPCLIKWISERGCWSCELCYYKYHVIAISTKNPLQWQAISLTVIEKVQVAAAILGSLFLIASISWLIWSTFSPSARWQRQDLLFQICYGMYGFMDVVCIGLIIHEGPSVYRIFKRWQAVNQQWKVLNYDKTKDLEDQKAGGRTNPRTSSSTQANIPSSEEETAGTPAPEQGPAQAAGHPSGPLSHHHCAYTILHILSHLRPHEQRSPPGSSRELVMRVTTV

SEQ ID NO: 50379 - protein, 72 aa, Homo sapiens
MAKRTKKVGIVGKYGTRYGASLRKMVKKIEISQHAKYTCSFCGKTKMKRRAVGIWHCGSCMKTVAGGAWTYK

SEQ ID NO: 50380 - protein, 1715 aa, Homo sapiens
MEDSCELDLVYVTERIIAVSFPSTANEENFRSNLREVAQMLKSKHGGNYLLFNLSERRPDITKLHAKVLEFGWPDLHTPALEKICSICKAMDTWLNADPHNVVVLHNKGNRGRIGVVIAAYMHYSNISASADQALDRFAMKRFYEDKIVPIGQPSQRRYVHYFSGLLSGSIKMNNKPLFLHHVIMHGIPNFESKGGCRPFLRIYQAMQPVYTSGIYNIPGDSQTSVCITIEPGLLLKGDILLKCYHKKFRSPARDVIFRVQFHTCAIHDLGVVFGKEDLDDAFKDDRFPEYGKVEFVFSYGPEKIQGMEHLENGPSVSVDYNTSDPLIRWDSYDNFSGHRDDGMEEVVGHTQGPLDGSLYAKVKKKDSLHGSTGAVNATRPTLSATPNHVEHTLSVSSDSGNSTASTKTDKTDEPVPGASSATAALSPQEKRELDRLLSGFGLEREKQGAMYHTQHLRSRPAGGSAVPSSGRHVVPAQVHVNGGALASERETDILDDELPNQDGHSAGSMGTLSSLDGVTNTSEGGYPEALSPLTNGLDKSYPMEPMVNGGGYPYESASRAGPAHAGHTAPMRPSYSAQEGLAGYQREGPHPAWPQPVTTSHYAHDPSGMFRSQSFSEAEPQLPPAPVRGGSSREAVQRGLNSWQQQQQQQQQPRPPPRQQERAHLESLVASRPSPQPLAETPIPSLPEFPRAASQQEIEQSIETLNMLMLDLEPASAAAPLHKSQSVPGAWPGASPLSSQPLSGSSRQSHPLTQSRSGYIPSGHSLGTPEPAPRASLESVPPGRSYSPYDYQPCLAGPNQDFHSKSPASSSLPAFLPTTHSPPGPQQPPASLPGLTAQPLLSPKEATSDPSRTPEEEPLNLEGLVAHRVAGVQAREKQPAEPPAPLRRRAASDGQYENQSPEATSPRSPGVRSPVQCVSPELALTIALNPGGRPKEPHLHSYKEAFEEMEGTSPSSPPPSGVRSPPGLAKTPLSALGLKPHNPADILLHPTGVTRRRIQPEPRSYVESVARTAVAGPRAQDSEPKSFSAPATQAYGHEIPLRNGTLGGSFVSPSPLSTSSPILSADSTSVGSFPSGESSDQGPRTPTQPLLESGFRSGSLGQPSPSAQRNYQSSSPLPTVGSSYSSPDYSLQHFSSSPESQARAQFSVAGVHTVPGSPQARHRTVGTNTPPSPGFGWRAINPSMAAPSSPSLSHHQMMGPPGTGFHGSTVSSPQSSAATTPGSPSLCRHPAGVYQVSGLHNKVATTPGSPSLGRHPGAHQGNLASGLHSNAIASPGSPSLGRHLGGSGSVVPGSPCLDRHVAYGGYSTPEDRRPTLSRQSSASGYQAPSTPSFPVSPAYYPGLSSPATSPSPDSAAFRQGSPTPALPEKRRMSVGDRAGSLPNYATINGKVSSPVASGMSSPSGGSTVSFSHTLPDFSKYSMPDNSPETRAKVKFVQDTSKYWYKPEISREQAIALLKDQEPGAFIIRDSHSFRGAYGLAMKVSSPPPTIMQQNKKDMTHELVRHFLIETGPRGVKLKGCPNEPNFGSLSALVYQHSIIPLALPCKLVIPNRDPTDESKDSSGPANSTADLLKQGAACNVLFVNSVDMESLTGPQAISKATSETLAADPTPAATIVHFKVSAQGITLTDNQRKLFFRRHYPLNTVTFCDLDPQERKWMKTEGGAPAKLFGFVARKQGSTTDNACHLFAELDPNQPASAIVNFVSKVMLNAGQKR

SEQ ID NO: 50381 - protein, 358 aa, Homo sapiens [sequence omitted]

SEQ ID NO: 50382 - protein, 847 aa, Homo sapiens
MKPSQGSGSFGAILGSRTSQKETSRQLSYSDNQASAKRGSLETKDDIPFRKVLGNPGRGSIKTVAGSGIARTIPSLTSTSTPLRSGLLENRTEKRKRMISTGSELNEDYPKENDSSSNNKAMTDPSRKYLTSSREKQLSLKQSEENRTSGLLPLQSSSFYGSRAGSKEHSSGGTNLDRTNVSSQTPSAKRSLGFLPQPVPLSVKKLRCNQDYTGWNKPRVPLSSHQQQQLQGFSNLGNTCYMNAILQSLFSLQSFANDLLKQGIPWKKIPLNALIRRFAHLLVKKDICNSETKKDLLKKVKNAISATAERFSGYMQNDAHEFLSQCLDQLKEDMEKLNKTWKTEPVSGEENSPDISATRAYTCPVITNLEFEVQHSIICKACGEIIPKREQFNDLSIDLPRRKKPLPPRSIQDSLDLFFRAEELEYSCEKCGGKCALVRHKFNRLPRVLILHLKRYSFNVALSLNNKIGQQVIIPRYLTLSSHCTENTKPPFTLGWSAHMAMKFTFKSKSSLALCLDSDSEDELKRSVALSQRLCEMLGNEQQQEDLEKDSKLCPIEPDKSELENSGFDRMSEEELLAAVLEISKRDASPSLSHEDDDKPTSSPDTGFAEDDIQEMPENPDTMETEKPKTITELDPASFTEITKDCDENKENKTPEGSQGEVDWLQQYDMEREREEQELQQALAQSLQEQEAWEQKEDDDLKRATELSLQEFNNSFVDALGSDEDSGNEDVFDMEYTEAEAEELKRNAETGNLPHSYRLISVVSHIGSTSSSGHYISDVYDIKKQAWFTYNDLEVSKIQEAAVQSDRDRSGYIFFYMHKEIFDELLETEKNSQSLSTEVGKTTRQAL

SEQ ID NO: 50383 - protein, 290 aa, Homo sapiens
MQPWAWLQLAENSLLAKVFITKQGYALLVSDLQQVWHEQVDTSVVSQRAKELNKRLTAPPAAFLCHLDNLLRPLLKDAAHPSEATFSCDCVADALILRVRSELSGLPFYWNFHCMLASPSLVSQHLIRPLMGMSLALQCQVRELATLLHMKDLEIQDYQESGATLIRDRLKTEPFEENSFLEQFMIEKLPEACSIGDGKPFVMNLQDLYMAVTTQEVQVGQKHQGAGDPHTSNSASLQGIDSQCVNQPEQLVSSAPTLSAPEKESTGTSGPLQRPQLSKVKRKKPRGLFS

SEQ ID NO: 50384 - protein, 336 aa, Homo sapiens
MISYIVLLSILLWPLVVYHELIQRMYTRLEPLLMQLDYSMKAEANALHHKHDKRKRQGKNAPPGGDEPLAETESESEAELAGFSPVVDVKKTALALAITDSELSDEEASILESGGFSVSRATTPQLTDVSEDLDQQSLPSEPEETLSRDLGEGEEGELAPPEDLLGRPQALSRQALDSEEEEEDVAAKETLLRLSSPLHFVNTHFNGAGSPPDGVKCSPGGPVETLSPETVSGGLTALPGTLSPPLCLVGSDPAPSPSILPPVPQDSPQPLPAPEEEEALTTEDFELLDQGELEQLNAELGLEPETPPKPPDAPPLGPDIHSLVQSDQEAQAVAEP

SEQ ID NO: 50385 - protein, 442 aa, Homo sapiens
MCELSREDAPVRWYKDGLEVEESEALVLERDGPRCRLVLPAAQPEDGGEFVCDAGDDSAFFTVTVTAPPERIVHPAARSLDLHFGAPGRVELRCEVAPAGSQVRWYKDGLEVEASDALQLGAEGPTRTLTLPHAQPEDAGEYVCETRHEAITFNVILAEPPVQFLALETTPSPLCVAPGEPVVLSCELSRAGAPVVWSHNGRPVQEGEGLELHAEGPRRVLCIQAAGPAHAGLYTCQSGAAPGAPSLSFTVQVAEPLLVKLVSELTPLTVHEGDDATFRCEVSPPDADVTWLRNGAVVTPGPQVEMAQNGSSRILTLRGCQLGDAGTVTLRAGSTATSARLHVRETELLFLRRLQDVRAEEGQDVCLEVETGRVGAAGAVRWVRGGQPLPHDSRLSMAQDGHIHRLFIHGVILADQGTYGCESHHDRTLARLSVRRECPVLS

SEQ ID NO: 50386 - protein, 350 aa, Homo sapiens
MCELSREDAPVRWYKDGLEVEESEALVLERDGPRCRLVLPAAQPEDGGEFVCDAGDDSAFFTVTVTEPPVQFLALETTPSPLCVAPGEPVVLSCELSRAGAPVVWSHNGRPVQEGEGLELHAEGPRRVLCIQAAGPAHAGLYTCQSGAAPGAPSLSFTVQVAEPLLVKLVSELTPLTVHEGDDATFRCEVSPPDADVTWLRNGAVVTPGPQVEMAQNGSSRILTLRGCQLGDAGTVTLRAGSTATSARLHVRETELLFLRRLQDVRAEEGQDVCLEVETGRVGAAGAVRWVRGGQPLPHDSRLSMAQDGHIHRLFIHGVILADQGTYGCESHHDRTLARLSVRRECPVLS

SEQ ID NO: 50387 - protein, 911 aa, Homo sapiens
MEPSQNNWLRTDWITREGAQRVYIEIKFTLRDCNSLPGVMGTCKETFNLYYYESDNDKERFIRENQFVKIDTIAADESFTQVDIGDRIMKLNTEIRDVGPLSKKGFYLAFQDVGACIALVSVRVFYKKCPLTVRNLAQFPDTITGADTSSLVEVRGSCVNNSEEKDVPKMYCGADGEWLVPIGNCLCNAGHEERSGECQACKIGYYKALSTDATCAKCPPHSYSVWEGATSCTCDRGFFRADNDAASMPCTRPPSAPLNLISNVNETSVNLEWSSPQNTGGRQDISYNVVCKKCGAGDPSKCRPCGSGVHYTPQQNGLKTTKVSITDLLAHTNYTFEIWAVNGVSKYNPNPDQSVSVTVTTNQAAPSSIALVQAKEVTRYSVALAWLEPDRPNGVILEYEVKYYEKDQNERSYRIVRTAARNTDIKGLNPLTSYVFHVRARTAAGYGDFSEPLEVTTNTVPSRIIGDGANSTVLLVSVSGSVVLVVILIAAFVISRRRSKYSKAKQEADEEKHLNQGVRTYVDPFTYEDPNQAVREFAKEIDASCIKIEKVIGVGEFGEVCSGRLKVPGKREICVAIKTLKAGYTDKQRRDFLSEASIMGQFDHPNIIHLEGVVTKCKPVMIITEYMENGSLDAFLRKNDGRFTVIQLVGMLRGIGSGMKYLSDMSYVHRDLAARNILVNSNLVCKVSDFGMSRVLEDDPEAAYTTRGGKIPIRWTAPEAIAYRKFTSASDVWSYGIVMWEVMSYGERPYWDMSNQDVIKAIEEGYRLPPPMDCPIALHQLMLDCWQKERSDRPKFGQIVNMLDKLIRNPNSLKRTGTESSRPNTALLDPSSPEFSAVVSVGDWLQAIKMDRYKDNFTAAGYTTLEAVVHVNQEDLARIGITAITHQNKILSSVQAMRTQMQQMHGRMVPV

SEQ ID NO: 50388 - protein, 337 aa, Homo sapiens
MAYHHDSRRIFVGQDNGAVMEFHVSEDFNKMNFIKTYPAHQNRVSAIIFSLATEWVISTGHDKCVSWMCTRSGNMLGRHFFTSWASCLQYDFDTQYAFVGDYSGQITLLKLEQNTCSVITTLKGHEGSVACLWWDPIQRLLFSGASDNSIIMWDIGGRKGRTLLLQGHHDKVQSLCYLQLTRQLVSCSSDGGIAVWNMDVSREEAPQWLESDSCQKCEQPFFWNIKQMWDTKTLGLRQHHCRKCGQAVCGKCSSKRSSYPVMGFEFQVRVCDSCYDSIKDEDRTSLATFHEGKHNISHMSMDIARGLMVTCGTDRIVKIWDMTPVVGCSLATGFSPH

SEQ ID NO: 50389 - protein, 120 aa, Homo sapiens
MAYHHDSRRIFVGQDNGAVMEFHVSEDFNKMNFIKTYPAHQNRVSAIIFSLATEWVISTGHDKCVSWMCTRSGNMLGRHFFTSWASCLQYPSEPRTSPSPGLCFSVFGSESHPKWLRSKD

SEQ ID NO: 50390 - protein, 687 aa, Homo sapiens
MRIRAFPVREDVLNSLNNNFLQTLNQAWNDHQTAMVMIRDILMYMDRVYVQQNNVENVYNLGLIIFRDQVVRYGCIRDHLRQTLLDMIARERKGEVVDRGAIRNACQMLMILGLEGRSVYEEDFEAPFLEMSAEFFQMESQKFLAENSASVYIKKVEARINEEIERVMHCLDKSTEEPIVKVVERELISKHMKTIVEMENSGLVHMLKNGKTEDLGCMYKLFSRVPNGLKTMCECMSSYLREQGKALVSEEGEGKNPVDYIQGLLDLKSRFDRFLLESFNNDRLFKQTIAGDFEYFLNLNSRSPEYLSLFIDDKLKKGVKGLTEQEVETILDKAMVLFRFMQEKDVFERYYKQHLARRLLTNKSVSDDSEKNMISKLKTECGCQFTSKLEGMFRDMSISNTTMDEFRQHLQATGVSLGGVDLTVRVLTTGYWPTQSATPKCNIPPAPRHAFEIFRRFYLAKHSGRQLTLQHHMGSADLNATFYGPVKKEDGSEVGVGGAQVTGSNTRKHILQVSTFQMTILMLFNNREKYTFEEIQQETDIPERELVRALQSLACGKPTQRVLTKEPKSKEIENGHIFTVNDQFTSKLHRVKIQTVAAKQGESDPERKETRQKVDDDRKHEIEAAIVRIMKSRKKMQHNVLVAEVTQQLKARFLPSPVVIKKRIEGLIEREYLARTPEDRKVYTYVA

SEQ ID NO: 50391 - protein, 231 aa, Homo sapiens
MASMLWKGINLERRLGSRWFAYVITAFSVLTGVVYLLLQFAVAEFMDEPDFKRSCAVGFSGVLFALKVLNNHYCPGGFVNILGFPVPNRFACWVELVAIHLFSPGTSFAGHLAGILVGLMYTQGPLKKIMEACAGGFSSSVGYPGRQYYFNSSGSSGYQDYYPHGRPDHYEEAPRNYDTYTAGLSEEEQLERALQASLWDRGNTRNSPPPYGFHLSPEEMRRQRLHRFDSQ

SEQ ID NO: 50392 - protein, 1553 aa, Homo sapiens
MSGHNGSRGDPGFPGGRGALGPGGPLGHPGEKGEKGNSVFILGAVKGIQGDRGDPGLPGLPGSWGAGGPAGPTGYPGEPGLVGPPGQPGRPGLKGNPGVGVKGQMGDPGEVGQQGSPGPTLLVEPPDFCLYKGEKGIKGIPGMVGLPGPPGRKGESGIGAKGEKGIPGFPGPRGDPGSYGSPGFPGLKGELGLVGDPGLFGLIGPKGDPGNRGHPGPPGVLVTPPLPLKGPPGDPGFPGRYGETGDVGPPGPPGLLGRPGEACAGMIGPPGPQGFPGLPGLPGEAGIPGRPDSAPGKPGKPGSPGLPGAPGLQGLPGSSVIYCSVGNPGPQGIKGKVGPPGGRGPKGEKGNEGLCACEPGPMGPPGPPGLPGRQGSKGDLGLPGWLGTKGDPGPPGAEGPPGLPGKHGASGPPGNKGAKGDMVVSRVKGHKGERGPDGPPGFPGQPGSHGRDGHAGEKGDPGPPGDHEDATPGGKGFPGPLGPPGKAGPVGPPGLGFPGPPGERGHPGVPGHPGVRGPDGLKGQKGDTISCNVTYPGRHGPPGFDGPPGPKGFPGPQGAPGLSGSDGHKGRPGTPGTAEIPGPPGFRGDMGDPGFGGEKGSSPVGPPGPPGSPGVNGQKGIPGDPAFGHLGPPGKRGLSGVPGIKGPRGDPGCPGAEGPAGIPGFLGLKGPKGREGHAGFPGVPGPPGHSCERGAPGIPGQPGLPGYPGSPGAPGGKGQPGDVGPPGPAGMKGLPGLPGRPGAHGPPGLPGIPGPFGDDGLPGPPGPKGPRGLPGFPGFPGERGKPGAEGCPGAKGEPGEKGMSGLPGDRGLRGAKGAIGPPGDEGEMAIISQKGTPGEPGPPGDDGFPGERGDKGTPGMQGRRGEPGRYGPPGFHRGEPGEKGQPGPPGPPGPPGSTGLRGFIGFPGLPGDQGEPGSPGPPGFSGIDGARGPKGNKGDPASHFGPPGPKGEPGSPGCPGHFGASGEQGLPGIQGPRGSPGRPGPPGSSGPPGCPGDHGMPGLRGQPGEMGDPGPRGLQGDPGIPGPPGIKGPSGSPGLNGLHGLKGQKGTKGASGLHDVGPPGPVGIPGLKGERGDPGSPGISPPGPRGKKGPPGPPGSSGPPGPAGATGRAPKDIPDPGPPGDQGPPGPDGPRGAPGPPGLPGSVDLLRGEPGDCGLPGPPGPPGPPGPPGYKGFPGCDGKDGQKGPVGFPGPQGPHGFPGPPGEKGLPGPPGRKGPTGLPGPRGEPGPPADVDDCPRIPGLPGAPGMRGPEGAMGLPGMRGPSGPGCKGEPGLDGRRGVDGVPGSPGPPGRKGDTGEDGYPGGPGPPGPIGDPGPKGFGPGYLGGFLLVLHSQTDQEPTCPLGMPRLWTGYSLLYLEGQEKAHNQDLGLAGSCLPVFSTLPFAYCNIHQVCHYAQRNDRSYWLASAAPLPMMPLSEEAIRPYVSRCAVCEAPAQAVAVHSQDQSIPPCPQTWRSLWIGYSFLMHTGAGDQGGGQALMSPGSCLEDFRAAPFLECQGRQGTCHFFANKYSFWLTTVKADLQFSSAPAPDTLKESQAQRQKISRCQVCVKYS

SEQ ID NO: 50393 - protein, 521 aa, Homo sapiens [sequence omitted]

SEQ ID NO: 50394 - protein, 519 aa, Homo sapiens [sequence omitted]

SEQ ID NO: 50395 - protein, 1670 aa, Homo sapiens
MADPESNQEAVNSSAARTDEAPQGAAASSSVAGAVGMTTSGESESDDSEMGRLQALLEARGLPPHLFGPLGPRMSQLFHRTIGSGASSKAQQLLQGLQASDESQQLQAVIEMCQLLVMGNEETLGGFPVKSVVPALITLLQMEHNFDIMNHACRALTYMMEALPRSSAVVVDAIPVFLEKLQVIQCIDVAEQALTALEMLSRRHSKAILQAGGLADCLLYLEFFSINAQRNALAIAANCCQSITPDEFHFVADSLPLLTQRLTHQDKKSVESTCLCFARLVDNFQHEENLLQQVASKDLLTNVQQLLVVTPPILSSGMFIMVVRMFSLMCSNCPTLAVQLMKQNIAETLHFLLCGASNGSCQEQIDLVPRSPQELYELTSLICELMPCLPKEGIFAVDTMLKKGNAQNTDGAIWQWRDDRGLWHPYNRIDSRIIEAAHQVGEDEISLSTLGRVYTIDFNSMQQINEDTGTARAIQRKPNPLANSNTSGYSESKKDDARAQLMKEDPELAKSFIKTLFGVLYEVYSSSAGPAVRHKCLRAILRIIYFADAELLKDVLKNHAVSSHIASMLSSQDLKIVVGALQMAEILMQKLPDIFSVYFRREGVMHQVKHLAESESLLTSPPKACTNGSGSMGSTTSVSSGTATAATHAAADLGSPSLQHSRDDSLDLSPQGRLSDVLKRKRLPKRGPRRPKYSPPRDDDKVDNQAKSPTTTQSPKSSFLASLNPKTWGRLSTQSNSNNIEPARTAGGSGLARAASKDTISNNREKIKGWIKEQAHKFVERYFSSENMDGSNPALNVLQRLCAATEQLNLQVDGGAECLVEIRSIVSESDVSSFEIQHSGFVKQLLLYLTSKSEKDAVSREIRLKRFLHVFFSSPLPGEEPIGRVEPVGNAPLLALVHKMNNCLSQMEQFPVKVHDFPSGNGTGGSFSLNRGSQALKFFNTHQLKCQLQRHPDCANVKQWKGGPVKIDPLALVQAIERYLVVRGYGRVREDDEDSDDDGSDEEIDESLAAQFLNSGNVRHRLQFYIGEHLLPYNMTVYQAVRQFSIQAEDERESTDDESNPLGRAGIWTKTHTIWYKPVREDEESNKDCVGGKRGRAQTAPTKTSPRNAKKHDELWHDGVCPSVSNPLEVYLIPTPPENITFEDPSLDVILLLRVLHAISRYWYYLYDNAMCKEIIPTSEFINSKLTAKANRQLQDPLVIMTGNIPTWLTELGKTCPFFFPFDTRQMLFYVTAFDRDRAMQRLLDTNPEINQSDSQDSRVAPRLDRKKRTVNREELLKQAESVMQDLGSSRAMLEIQYENEVGTGLGPTLEFYALVSQELQRADLGLWRGEEVTLSNPKGSQEGTKYIQNLQGLFALPFGRTAKPAHIAKVKMKFRFLGKLMAKAIMDFRLVDLPLGLPFYKWMLRQETSLTSHDLFDIDPVVARSVYHLEDIVRQKKRLEQDKSQTKESLQYALETLTMNGCSVEDLGLDFTLPGFPNIELKKGGKDIPVTIHNLEEYLRLVIFWALNEGVSRQFDSFRDGFESVFPLSHLQYFYPEELDQLLCGSKADTWDAKTLMECCRPDHGYTHDSRAVKFLFEILSSFDNEQQRLFLQFVTGSPRLPVGGFRSLNPPLTIVRKTFESTENPDDFLPSVMTCVNYLKLPDYSSIEIMREKLLIAAREGQQSFHLS

SEQ ID NO: 50396 - protein, 710 aa, Homo sapiens
MTRAMEEALFQHFMHQKLGIAYAIHKPFPFFEGLLDNSIITKRMYMESLEACRNLIPVSRVVHNILTQLERTFNLSLLVTLFSQINLREYPNLVTIYRSFKRVGASYEWQSRDTPILLEAPTGLAEGSSLHTPLALPPPQPPQPSCSPCAPRVSEPGTSSQQSDEILSESPSPSDPVLPLPALIQEGRSTSVTNDKLTSKMNAEEDSEEMPSLLTSTVQVASDNLIPQIRDKEDPQEMPHSPLGSMPEIRDNSPEPNDPEEPQEVSSTPSDKKGKKRKRCIWSTPKRRHKKKSLPGGTASSRHGIQKKLKRVDQVPQKKDDSTCNSTVETRAQKARTECARKSRSEEIIDGTSEMNEGKRSQKTPSTPRRVTQGAASPGHGIQEKLQVVDKVTQRKDDSTWNSEVMMRVQKARTKCARKSRLKEKKKEKDICSSSKRRFQKNIHRRGKPKSDTVDFHCSKLPVTCGEAKGILYKKKMKHGSSVKCIRNEDGTWLTPNEFEVEGKGRNAKNWKRNIRCEGMTLGELLKRKNSDECEVCCQGGQLLCCGTCPRVFHEDCHIPPVEAKRMLWSCTFCRMKRSSGSQQCHHVSKTLERQMQPQDQLKCEFLLLKAYCHPQSSFFTGIPFNIRDYGEPFQEAMWLDLVKERLITEMYTVAWFVRDMRLMFRNHKTFYKASDFGQVGLDLEAEFEKDLKDVLGFHEANDGGFWTLP

SEQ ID NO: 50397 - protein, 546 aa, Homo sapiens [sequence omitted]

SEQ ID NO: 50398 - protein, 34 aa, Homo sapiens
MEQQLAERECPPHAEQRQPTKKMSKVKGLVSSRH

SEQ ID NO: 50399 - protein, 23 aa, Homo sapiens
MAESAFSFKKLLDQCENQELEDA

SEQ ID NO: 50400 - protein, 66 aa, Homo sapiens
MNNARYLWKRIPPAIKSANSELGGIWSVGQRIWQRDFPGIYTTINAHQWSETVQPIMEALRGVVLY

SEQ ID NO: 50401 - protein, 49 aa, Homo sapiens
MVLPRKPVAGALDVSFNKFIPLSEPAPVPPIPNEQQLARLTDYVAFLEN

SEQ ID NO: 50402 - protein, 361 aa, Homo sapiens
MIGGKPQDIIFTSGGTESNNLVIHSVVKHFHANQTSKGHTGGHHSPVKGAKPHFITSSVEHDSIRLPLEHLVEEQVAAVTFVPVSKVSGQAEVDDILAAVRPTTRLVTIMLANNETGIVMPVPEISQRIKALNQERVAAGLPPILVHTDAAQALGKQRVDVEDLGVDFLTIVGHKFYGPRIGALYIRGLGEFTPLYPMLFGGGQERNFRPGTENTPMIAGLGKAAELVTQNCEAYEAHMRDVRDYLEERLEAEFGQKRIHLNSQFPGTQRLPNTCNFSIRGPRLQGHVVLAQCRVLMASVGAACHSDHGDQPSPVLLSYGVPFDVARNALRLSVGRSTTRAEVDLVVQDLKQAVAQLEDQA

SEQ ID NO: 50403 - protein, 1041 aa, Homo sapiens
MDLRLDHQFSLPVAEPALREQQLQQELLALKQKQQIQRQILIAEFQRQHEQLSRQHEAQLHEHIKQQQEMLAMKHQQELLEHQRKLERHRQEQELEKQHREQKLQQLKNKEKGKESAVASTEVKMKLQEFVLNKKKALAHRNLNHCISSDPRYWYGKTQHSSLDQSSPPQSGVSTSYNHPVLGMYDAKDDFPLRKTASEPNLKLRSRLKQKVAERRSSPLLRRKDGPVVTALKKRPLDVTDSACSSAPGSGPSSPNNSSGSVSAENGIAPAVPSIPAETSLAHRLVAREGSAAPLPLYTSPSLPNITLGLPATGPSAGTAGQQDAERLTLPALQQRLSLFPGTHLTPYLSTSPLERDGGAAHSPLLQHMVLLEQPPAQAPLVTDWYLSGLGALPLHAQSLVGADRVSPSIHKLRQHRPLGRTQSAPLPQNAQALQHLVIQQQHQQFLEKHKQQFQQQQLQMNKIIPKPSEPARQPESHPEETEEELREHQALLDEPYLDRLPGQKEAHAQAGVQVKQEPIESDEEEAEPPREVEPGQRQPSEQELLFRQQALLLEQQRIHQLRNYQASMEAAGIPVSFGGHRPLSRAQSSPASATFPVSVQEPPTKPRFTTGLVYDTLMLKHQCTCGSSSSHPEHAGRIQSIWSRLQETGLRGKCECIRGRKATLEELQTVHSEAHTLLYGTNPLNRQKLDSKKLLGSLASVFVRLPCGGVGVDSDTIWNEVHSAGAARLAVGCVVELVFKVATGELKNGFAVVRPPGHHAEESTPMGFCYFNSVAVAAKLLQQRLSVSKILIVDWDVHHGNGTQQAFYSDPSVLYMSLHRYDDGNFFPGSGAPDEVGTGPGVGFNVNMAFTGGLDPPMGDAEYLAAFRTVVMPIASEFAPDVVLVSSGFDAVEGHPTPLGGYNLSARCFGYLTKQLMGLAGGRIVLALEGGHDLTAICDASEACVSALLGNELDPLPEKVLQQRPNANAVRSMEKVMEIHSKYWRCLQRTTSTAGRSLIEAQTCENEEAETVTAMASLSVGVKPAEKRPDEEPMEEEPPL

SEQ ID NO: 50404 - protein, 28 aa, Homo sapiens
MDLAANEKAVHADFFNDFEDLFDDDDIQ

SEQ ID NO: 50405 - protein, 19 aa, Homo sapiens
MRWPGITDTSVEAFKPGRM

SEQ ID NO: 50406 - protein, 968 aa, Homo sapiens
MEFQNTQSYWIWLEPMKPIIRQIRRPKNVVLRLAVKFFPPDPGQLQEEYTRYLFALQLKRDLLEERLTCADTTAALLTSHLLQSEIGDYDETLDREHLKVNEYLPGQQHCLEKILEFHQKHVGQTPAESDFQVLEIARKLEMYGIRFHMASDREGTKIQLAVSHMGVLVFQGTTKINTFNWSKVRKLSFKRKRFLIKLHPEVHGPYQDTLEFLLGSRDECKNFWKICVEYHTFFRLLDQPKPKAKAVFFSRGSSFRYSGRTQKQLVDYFKDSGMKRIPYERRHSKTHTSVRALTADLPKQSISFPEGLRTPASPSSANAFYSLSPSTLVPSGLPEFKDSSSSLTDPQVSYVKSPAAERRSGAVAGGPDTPSAQPLGPPALQPGPGLSTKSPQPSPSSRKSPLSLSPAFQVPLGPAEQGSSPLLSPVLSDAGGAGMDCEEPRHKRVPADEAYFIVKEILATERTYLKDLEVITVWFRSAVVKEDAMPATLMTLLFSNIDPIYEFHRGFLREVEQRLALWEGPSKAHTKGSHQRIGDILLRNMRQLKEFTSYFQRHDEVLTELEKATKRCKKLEAVYKEFELQKVCYLPLNTFLLKPIQRLLHYRLLLRRLCGHYSPGHHDYADCHDALKAITEVTTTLQHILIRLENLQKLTELQRDLVGIENLIAPGREFIREGCLHKLTKKGLQQRMFFLFSDMLLYTSKGVAGTSHFRIRGLLPLQGMLVEESDNEWSVPHCFTIYAAQKTIVVAASTRLEKEKWMLDLNSAIQAAKSGGDTAPALPGRTVCTRPPRSPNEVSLEQESEDDARGVRSSLEGHGQHRANTTMHVCWYRNTSVSRADHSAAVENQLSGYLLRKFKNSHGWQKLWVVFTNFCLFFYKTHQDDYPLASLPLLGYSVSIPREADGIHKDYVFKLQFKSHVYFFRAESKYTFERWMEVIQGASSSAGRAPSIVQDGPQPSSGLEGMVRGKEE

SEQ ID NO: 50407 - protein, 22 aa, Homo sapiens
MTELGTERPWCPSQWTDAAGAS

SEQ ID NO: 50408 - protein, 177 aa, Homo sapiens
MLGTWLSDPPGAGTYPTLQPFQYLEEVHISHVGQPMLNFSFNSFHPDTRKPMHRECGFIRLKPDTNKVAFVSAQNTGVVEVEEGEVNGQELCIASHSIARISFAKEPHVEQVSPALLPARSCLLFAAVCGVSLFLFREITRKFRLNSEGKLEQTVSMATTTQPMTQHLHVTYKKVTP

SEQ ID NO: 50409 - protein, 550 aa, Homo sapiens
MLENYRNLLSLDGVSLLLPRLECNRAISAHHNLCLPGSSNSPATASRVVGITAEPKPEIYTCSSCLLAFSCQQFLSQHVLQIFLGLCAENHFHPGNSSPGHWKQQGQQYSHVSCWFENAEGQERGGGSKPWSARTEERETSRAFPSPLQRQSASPRKGNMVVETEPSSAQRPNPVQLDKGLKELETLRFGAINCREYEPDHNLESNFITNPRTLLGKKPYICSDCGRSFKDRSTLIRHHRIHSMEKPYVCSECGRGFSQKSNLSRHQRTHSEEKPYLCRECGQSFRSKSILNRHQWTHSEEKPYVCSECGRGFSEKSSFIRHQRTHSGEKPYVCLECGRSFCDKSTLRKHQRIHSGEKPYVCRECGRGFSQNSDLIKHQRTHLDEKPYVCRECGRGFCDKSTLIIHERTHSGEKPYVCGECGRGFSRKSLLLVHQRTHSGEKHYVCRECRRGFSQKSNLIRHQRTHSNEKPYICRECGRGFCDKSTLIVHERTHSGEKPYVCSECGRGFSRKSLLLVHQRTHSGEKHYVCRECGRGFSHKSNLIRHQRTH

SEQ ID NO: 50410 - protein, 25 aa, Homo sapiens
MASSLSLTFIFQGPGCRETSWAFYN

SEQ ID NO: 50411 - protein, 271 aa, Homo sapiens
MPLGERITGGFLLPELQPLAGSLRRDVVEGNFYSATLAGDHCFDVLDLHFHFRHAVQHRHRDGVHWDQHAHRHLSHLLLTHVADAWGVELPKRGYPPDPWIEDWAEMNHPFQGSHRQTPDFGEHLALLPPPPSSLPPPMPFPYPLPQPSPPPLFPPLPQDTPFFPGQPFPPHEFFNYNPVEDFSMPPHLGCGPGVNFVPGPLPPPIPGPNPHGQHWGPVVHRGMPRYVPNSPYHVRRMGGPCRQRLRHSERLIHTYKLDRRPPAHSGTWPG

SEQ ID NO: 50412 - protein, 273 aa, Homo sapiens
MGRDKNFSSLHTVFCATGGGAYKFEQDFLTIGDLQLCKLDELDCLIKGILYIDSVGFNGRSQCYYFENPADSEKCQKLPFDLKNPYPLLLVNIGSGVSILAVYSKDNYKRVTGTSLGGGTFFGLCCLLTGCTTFEEALEMASRGDSTKVDKLVRDIYGGDYERFGLPGWAVASSFGNMMSKEKREAVSKEDLARATLITITNNIGSIARMCALNENINQVVFVGNFLRINTIAMRLLAYALDYWSKGQLKALFSEHEGYFGAVGALLELLKIP

SEQ ID NO: 50413 - protein, 406 aa, Homo sapiens
MLTRKETEHVSALILRAFLLTIPENAEGHIILGKSLIVPLKGQRVIDSTVLPGILIEMSEVQLMRLLPIKKSTALKVALFCTTLSGDTSDTGEGTVVVSYGVSLENAVLDQLLNLGRQLISDHVDLVLCQKVIHPSLKQFLNMHRIIAIDRIGVTLMEPLTKMTGTQPIGSLGSICPNSYGSVKDVCTAKFGSKHFFHLIPNEATICSLLLCNRNDTAWDELKLTCQTALHVLQLTLKEPWALLGGGCTETHLAAYIRHKTHNDPESILKDDECTQTELQLIAEAFCSALESVVGSLEHDGGEILTDMKYGHLWSVQADSPCVANWPDLLSQCGCGLYNSQEELNWSFLRSTRRPFVPQSCLPHEAVGSASNLTLDCLTAKLSGLQVAVETANLILDLSYVIEDKN

SEQ ID NO: 50414 - protein, 81 aa, Homo sapiens
MNGCYSRLKELVPTLPQNRKVSKVEILQHVIDYIRDLQLELNSESEVGTPGGRGLPVRAPLSTLNGEISALTAEVRSRSDH

SEQ ID NO: 50415 - protein, 87 aa, Homo sapiens [sequence omitted]

SEQ ID NO: 50416 - protein, 179 aa, Homo sapiens
MHRLYLARRSFIIQNIPGFWVTAFLNHPQLSAMISPRDEDMLCYLMNLEVRELRHSRTGCKFKFRFWSNPYFQNKVIVKEYECRASGRVVSIATRIRWHWGQEPPALVHRNRDTVRSFFSWFSQHSLPEADRVAQIIKDDLWPNPLQYYLLGDRPCRARGGLARWPTETPSRPYGFQSG

SEQ ID NO: 50417 - protein, 1374 aa, Homo sapiens
MLPRVVLTPLKVNGAHVESASGFSGCHADGESGSPSSSSSGSLALGSAAIRGQAEVTQDPAPLLRGFRKPATGQMKRNRGEEIDFETPGSILVNTNLRALINSRTFHALPSHFQQQLLFLLPEVDRQVGTDGLLRLSSSALNNEFFTHAAQSWRERLADGEFTHEMQVRIRQEMEKEKKVEQWKEKFFEDYYGQKLGLTKEESLQQNVGQEEAEIKSGLCVPGESVRIQRGPATRQRDGHFKKRSRPDLRTRARRNLYKKQESEQAGVAKDAKSVASDVPLYKDGEAKTDPAGLSSPHLPGTSSAAPDLEGPEFPVESVASRIQAEPDNLARASASPDRIPSLPQETVDQEPKDQKRKSFEQAASASFPEKKPRLEDRQSFRNTIESVHTEKPQPTKEEPKVPPIRIQLSRIKPPWVVKGQPTYQICPRIIPTTESSCRGWTGARTLADIKARALQVRGARGHHCHREAATTAIGGGGGPGGGGGGATDEGGGRGSSSGDGGEACGHPEPRGGPSTPGKCTSDLQRTQLLPPYPLNGEHTQAGTAMSRARREDLPSLRKEESCLLQRATVGLTDGLGDASQLPVAPTGDQPCQALPLLSSQTSVAERLVEQPQLHPDVRTECESGTTSWESDDEEQGPTVPADNGPIPSLVGDDTLEKGTGQALDSHPTMKDPVNVTPSSTPESSPTDCLQNRAFDDELGLGGSCPPMRESDTRQENLKTKALVSNSSLHWIPIPSNDEVVKQPKPESREHIPSVEPQVGEEWEKAAPTPPALPGDLTAEEGLDPLDSLTSLWTVPSRGGSDSNGSYCQQVDIEKLKINGDSEALSPHGESTDTASDFEGHLTEDSSEADTREAAVTKGSSVDKDEKPNWNQSAPLSKVNGDMRLVTRTDGMVAPQSWVSRVCAVRQKIPDSLLLASTEYQPRAVCLSMPGSSVEATNPLVMQLLQGSLPLEKVLPPAHDDSMSESPQVPLTKDQSHGSLRMGSLHGLGKNSGMVDGSSPSSLRALKEPLLPDSCETGTGLARIEATQAPGAPQKNCKAVPSFDSLHPVTNPITSSRKLEEMDSKEQFSSFSCEDQKEVRAMSQDSNSNAAPGKSPGDLTTSRTPRFSSPNVISFGPEQTGRALGDQSNVTGQGKKLFGSGNVAATLQRPRPADPMPLPAEIPPVFPSGKLGPSTNSMSGGVQTPREDWAPKPHAFVGSVKNEKTFVGGPLKANAENRKATGHSPLELVGHLEGMPFVMDLPFWKLPREPGKGLSEPLEPSSLPSQLSIKQAFYGKLSKLQLSSTSFNYSSSSPTFPKGLAGSVVQLSHKANFGASHSASLSLQMFTDSSTVESISLQCACSLKAMIMCQGCGAFCHDDCIGPSKLCVLCLVVR

SEQ ID NO: 50418 - protein, 430 aa, Homo sapiens
MSADPHLASSLSPSQDERMRSPQNLHSQEDDDSSSESGSGNGSSTLNPSTSSSTQGDPAFPEMNGNGAVAPMDFTTAAEDQPINLCDKLPPATALGTASYPSDGCGADGLRSRVKYGVKTTPESPPYSSGSYDSIKTEVSGCPEDLTVGRAPTADDDDDDHDDHEDNDKMNDSEGMDPERLKAFNMFVRLFVDENLDRMVPISKQPKEKIQAIIESCSRQFPEFQERARKRIRTYLKSCRRMKKNGMEMTRPTPPHLTSAMAENILAAACESETRKAAKRMRLEIYQSSQDEPIALDKQHSRDSAAITHSTYSLPASSYSQDPVYANGGLNYSYRGYGALSSNLQPPASLQTGNHSNGPTDLSMKGGASTTSTTPTPTPSSTSTSRPVPTAQLSPTEISAVRQLIAGYRESAAFLLRSADELENLILQQN

SEQ ID NO: 50419 - protein, 273 aa, Homo sapiens
MDATKLEYERASKVDQFVTRFLLRETVSQLQALQSSLEGASDTLEAQAHGWRSDAESVEAQSRLCGSRRAGRRALRSVSRSSTWSPGSSDTGRSSEAEMQWRLQVNRLQELIDQLECKVRAVGPGPHKGGPSWYPPEPGPCWRPGPHSVPSQAPRLEPLREEDLAKGPDLHILMAQRQVQVAEEGLQDFHRALRCYVDFTGAQSHCLHVSAQKMLDGASFTLYEFWQDEASWRRHQQSPGSKAFQRILIDHLRAPDTLTTVFFPASWWIMNNN

SEQ ID NO: 50420 - protein, 239 aa, Homo sapiens
MDATKLEYERASKVDQFVTRFLLRETVSQLQALQSSLEGASDTLEAQAHGWRSDAESVEAQSRLCGSRRAGRRALRSVSRSSTWSPGSSDTGRSSEAEMQWRLQVNRLQELIDQLECKAPRLEPLREEDLAKGPDLHILMAQRQVQVAEEGLQDFHRALRCYVDFTGAQSHCLHVSAQKMLDGASFTLYEFWQDEASWRRHQQSPGSKAFQRILIDHLRAPDTLTTVFFPASWWIMNNN

SEQ ID NO: 50421 - protein, 85 aa, Homo sapiens
MYLLSRVLFALSRLAVEKGYIPEPRWDPFPLLTAVVWGLVLWLFEYHRSTLQPSLQSSMTYLYEDSNVWHDISDFLVYNKSRPSN

SEQ ID NO: 50422 - protein, 322 aa, Homo sapiens
MSKKKKKKKKPFMLDEEGDTQTEETQPSETKEVEPEPTEDKDLEADEEDTRKKDASDDLDDLNFFNQKKKKKKTKKIFDIDEAEEGVKDLKIESDVQEPTEPEDDLDIMLGNKKKKKKNVKFPDEDEILEKDEALEDEDNKKDDGISFSNQTGPAWAGSERDYTYEELLNRVFNIMREKNPDMVAGEKRKFVMKPPQVVRVGTKKTSFVNFTDICKLLHRQPKHLLAFLLAELGTSGSIDGNNQLVIKGRFQQKQIENVLRRYIKEYVTCHTCRSPDTILQKDTRLYFLQCETCHSRCSVASIKTGFQAVTGKRAQLRAKAN

SEQ ID NO: 50423 - protein, 888 aa, Homo sapiens
MKSQLQITVISAKLKENKKNWFGPSPYVEVTVDGQSKKTEKCNNTNSPKWKQPLTVIVTPVSKLHFRVWSHQTLKSDVLLGTAALDIYETLKSNNMKLEEVVVTLQLGGDKEPTETIGDLSICLDGLQLESEVVTNGETTCSENGVSLCLPRLECNSAISAHCNLCLPGLSDSPISASRVAGFTGASQNDDGSRSKDETRVSTNGSDDPEDAGAGENRRVSGNNSPSLSNGGFKPSRPPRPSRPPPPTPRRPASVNGSPSATSESDGSSTGSLPPTNTNTNTSEGATSGLIIPLTISGGSGPRPLNPVTQAPLPPGWEQRVDQHGRVYYVDHVEKRTTWDRPEPLPPGWERRVDNMGRIYYVDHFTRTTTWQRPTLESVRNYEQWQLQRSQLQGAMQQFNQRFIYGNQDLFATSQSKEFDPLGPLPPGWEKRTDSNGRVYFVNHNTRITQWEDPRSQGQLNEKPLPEGWEMRFTVDGIPYFVDHNRRTTTYIDPRTGKSALDNGPQIAYVRDFKAKVQYFRFWCQQLAMPQHIKITVTRKTLFEDSFQQIMSFSPQDLRRRLWVIFPGEEGLDYGGVAREWFFLLSHEVLNPMYCLFEYAGKDNYCLQINPASYINPDHLKYFRFIGRFIAMALFHGKFIDTGFSLPFYKRILNKPVGLKDLESIDPEFYNSLIWVKENNIEECDLEMYFSVDKEILGEIKSHDLKPNGGNILVTEENKEEYIRMVAEWRLSRGVEEQTQAFFEGFNEILPQQYLQYFDAKELEVLLCGMQEIDLNDWQRHAIYRHYARTSKQIMWFWQFVKEIDNEKRMRLLQFVTGTCRLPVGGFADLMGSNGPQKFCIEKVGKENWLPRSHTCFNRLDLPPYKSYEQLKEKLLFAIEETEGFGQE

SEQ ID NO: 50424 - protein, 847 aa, Homo sapiens
MKSQLQITVISAKLKENKKNWFGPSPYVEVTVDGQSKKTEKCNNTNSPKWKQPLTVIVTPVSKLHFRVWSHQTLKSDVLLGTAALDIYETLKSNNMKLEEVVVTLQLGGDKEPTETIGDLSICLDGLQLESEVVTNGETTCSESASQNDDGSRSKDETRVSTNGSDDPEDAGAGENRRVSGNNSPSLSNGGFKPSRPPRPSRPPPPTPRRPASVNGSPSATSESDGSSTGSLPPTNTNTNTSEGATSGLIIPLTISGGSGPRPLNPVTQAPLPPGWEQRVDQHGRVYYVDHVEKRTTWDRPEPLPPGWERRVDNMGRIYYVDHFTRTTTWQRPTLESVRNYEQWQLQRSQLQGAMQQFNQRFIYGNQDLFATSQSKEFDPLGPLPPGWEKRTDSNGRVYFVNHNTRITQWEDPRSQGQLNEKPLPEGWEMRFTVDGIPYFVDHNRRTTTYIDPRTGKSALDNGPQIAYVRDFKAKVQYFRFWCQQLAMPQHIKITVTRKTLFEDSFQQIMSFSPQDLRRRLWVIFPGEEGLDYGGVAREWFFLLSHEVLNPMYCLFEYAGKDNYCLQINPASYINPDHLKYFRFIGRFIAMALFHGKFIDTGFSLPFYKRILNKPVGLKDLESIDPEFYNSLIWVKENNIEECDLEMYFSVDKEILGEIKSHDLKPNGGNILVTEENKEEYIRMVAEWRLSRGVEEQTQAFFEGFNEILPQQYLQYFDAKELEVLLCGMQEIDLNDWQRHAIYRHYARTSKQIMWFWQFVKEIDNEKRMRLLQFVTGTCRLPVGGFADLMGSNGPQKFCIEKVGKENWLPRSHTCFNRLDLPPYKSYEQLKEKLLFAIEETEGFGQE

SEQ ID NO: 50425 - protein, 2412 aa, Homo sapiens
MAENQAASWRKLKNSQEAQQRQATLVRKLQAKVLQYRSWCQELEKRLEATGGPIPQRWENVEEPNLDELLVRLEEEQQRCESLAEVNTQLRLHMEKADVVNKALREDVEKLTVDWSRARDELMRKESQWQMEQEFFKGYLKGEHGRLLSLWREVVTFRRHFLEMKSATDRDLMELKAEHVRLSGSLLTCCLRLTVGAQSREPNGSGRMDGREPAQLLLLLAKTQELEKEAHERSQELIQLKSQGDLEKAELQDRVTELSALLTQSQKQNEDYEKMIKALRETVEILETNHTELMEHEASLSRNAQEEKLSLQQVIKDITQVMVEEGDNIAQGSGHENSLELDSSIFSQFDYQDADKALTLVRSVLTRRRQAVQDLRQQLAGCQEAVNLLQQQHDQWEEEGKALRQRLQKLTGERDTLAGQTVDLQGEVDSLSKERELLQKAREELRQQLEVLEQEAWRLRRVNVELQLQGDSAQGQKEEQQEELHLAVRERERLQEMLMGLEAKQSESLSELITLREALESSHLEGELLRQEQTEVTAALARAEQSIAELSSSENTLKTEVADLRAAAVKLSALNEALALDKVGLNQQLLQLEEENQSVCSRMEAAEQARNALQVDLAEAEKRREALWEKNTHLEAQLQKAEEAGAELQADLRDIQEEKEEIQKKLSESRHQQEAATTQLEQLHQEAKRQEEVLARAVQEKEALVREKAALEVRLQAVERDRQDLAEQLQGLSSAKELLESSLFEAQQQNSVIEVTKGQLEVQIQTVTQAKEVIQGEVRCLKLELDTERSQAEQERDAAARQLAQAEQEGKTALEQQKAAHEKEVNQLREKWEKERSWHQQELAKALESLEREKMELEMRLKEQQTEMEAIQAQREEERTQAESALCQMQLETEKERVSLLETLLQTQKELADASQQLERLRQDMKVQKLKEQETTGILQTQLQEAQRELKEAARQHRDDLAALQEESSSLLQDKMDLQKQVEDLKSQLVAQDDSQRLVEQEVQEKLRETQEYNRIQKELEREKASLTLSLMEKEQRLLVLQEADSIRQQELSALRQDMQEAQGEQKELSAQMELLRQEVKEKEADFLAQEAQLLEELEASHITEQQLRASLWAQEAKAAQLQLRLRSTESQLEALAAEQQPGNQAQAQAQLASLYSALQQALGSVCESRPELSGGGDSAPSVWGLEPDQNGARSLFKRGPLLTALSAEAVASALHKLHQDLWKTQQTRDVLRDQVQKLEERLTDTEAEKSQVHTELQDLQRQLSQNQEEKSKWEGKQNSLESELMELHETMASLQSRLRRAELQRMEAQGERELLQAAKENLTAQVEHLQAAVVEARAQASAAGILEEDLRTARSALKLKNEEVESERERAQALQEQGELKVAQGKALQENLALLTQTLAEREEEVETLRGQIQELEKQREMQKAALELLSLDLKKRNQEVDLQQEQIQELEKCRSVLEHLPMAVQEREQKLTVQREQIRELEKDRETQRNVLEHQLLELEKKDQMIESQRGQVQDLKKQLVTLECLALELEENHHKMECQQKLIKELEGQRETQRVALTHLTLDLEERSQELQAQSSQIHDLESHSTVLARELQERDQEVKSQREQIEELQRQKEHLTQDLERRDQELMLQKERIQVLEDQRTRQTKILEEDLEQIKLSLRERGRELTTQRQLMQERAEEGKGPSKAQRGSLEHMKLILRDKEKEVECQQEHIHELQELKDQLEQQLQGLHRKVGETSLLLSQREQEIVVLQQQLQEAREQGELKEQSLQSQLDEAQRALAQRDQELEALQQEQQQAQGQEERVKEKADALQGALEQAHMTLKERHGELQDHKEQARRLEEELAVEGRRVQALEEVLGDLRAESREQEKALLALQQQCAEQAQEHEVETRALQDSWLQAQAVLKERDQELEALRAESQSSRHQEEAARARAEALQEALGKAHAALQGKEQHLLEQAELSRSLEASTATLQASLDACQAHSRQLEEALRIQEGEIQDQDLRYQEDVQQLQQALAQRDEELRHQQEREQLLEKSLAQRVQENMIQEKQNLGQEREEEEIRGLHQSVRELQLTLAQKEQEILELRETQQRNNLEALPHSHKTSPMEEQSLKLDSLEPRLQRELERLQAALRQTEAREIEWREKAQDLALSLAQTKASVSSLQEVAMFLQASVLERDSEQQRLQDELELTRRALEKERLHSPGATSTAELGSRGEQGVQLGEVSGVEAEPSPDGMEKQSWRQRLEHLQQAVARLEIDRSRLQRHNVQLRSTLEQVERERRKLKREAMRAAQAGSLEISKATASSPTQQDGRGQKNSDAKCVAELQKEVVLLQAQLTLERKQKQDYITRSAQTSRELAGLHHSLSHSLLAVAQAPEATVLEAETRRLDESLTQSLTSPGPVLLHPSPSTTQAASR

SEQ ID NO: 50426 - protein, 411 aa, Homo sapiens
MSITSEDSKGLRSAEPGPGEPEGRRARGPSCGEPALSAGVPGGTTWAGSSQQKPAPRSHNWQTACGAATVRGGASEPTGSPVVSEEPLDLLPTLDLRQEMPPPRVFKSFLSLLFQGLSVLLSLAGDVLVSMYREVCSIRFLFTAVSLLSLFLSAFWLGLLYLVSPLENEPKEMLTLSEYHERVRSQGQQLQQLQAELDKLHKEVSTVRAANSERVAKLVFQRLNEDFVRKPDYALSSVGASIDLQKTSHDYADRNTAYFWNRFSFWNYARPPTVILEPHVFPGNCWAFEGDQGQVVIQLPGRVQLSDITLQHPPPSVEHTGGANSAPRDFAVFGLQVYDETEVSLGKFTFDVEKSEIQTFHLQNDPPAAFPKVKIQILSNWGHPRFTCLYRVRAHGVRTSEGAEGSAQGPH

SEQ ID NO: 50427 - protein, 423 aa, Homo sapiens
MLKPGKPAGRGTITVSAQELKDNRVVTMEVEARNLDKKDFLGKSDPFLEFFRQGDGKWHLVYRSEVIKNNLNPTWKRFSVPVQHFCGGNPSTPIQVQCSDYDSDGSHDLIGTFHTSLAQLQAVPAEFECIHPEKQQKKKSYKNSGTIRVKICRVETEYSFLDYVMGGCQINFTVGVDFTGSNGDPSSPDSLHYLSPTGVNEYLMALWSVGSVVQDYDSDKLFPAFGFGAQVPPDWQVSHEFALNFNPSNPYCAGIQGIVDAYRQALPQVRLYGPTNFAPIINHVARFAAQAAHQGTASQYFMLLLLTDGAVTDVEATREAVVRASNLPMSVIIVGVGGADFEAMEQLDADGGPLHTRSGQAAARDIVQFVPYRRFQNAPREALAQTVLAEVPTQLVSYFRAQGWAPLKPLPPSAKDPAQAPQA

SEQ ID NO: 50428 - protein, 39 aa, Homo sapiens
MGFVMGCAVGMAAGALFGTFSCLSSILVSSSGSECGVES

SEQ ID NO: 50429 - protein, 19 aa, Homo sapiens
MTESILEMPKWIRNLKMTL

SEQ ID NO: 50430 - protein, 168 aa, Homo sapiens [sequence omitted]

SEQ ID NO: 50431 - protein, 388 aa, Homo sapiens [sequence omitted]

SEQ ID NO: 50432 - protein, 479 aa, Homo sapiens
MILTFEKRSYKNQELRIKFPDNPEKFMESELDLNDIIQEMHVVATMPDLYHLLVELNAVQSLLGLLGHDNTDVSIAVVDLLQELTDIDTLHESEEGAEVLIDALVDGQVVALLVQNLERLDESVKEEADGVHNTLAIVENMAEFRPEMCTEGAQQGLLQWLLKRLKAKMPFDANKLYCSEVLAILLQDNDENRELLGELDGIDVLLQQLSVFKRHNPSTAEEQEMMENLFDSLCSCLMLSSNRERFLKGEGLQLMNLMLREKKISRSSALKVLDHAMIGPEGTDNCHKFVDILGLRTIFPLFMKSPRKIKKVGTTEKEHEEHVCSILASLLRNLRGQQRTRLLNKFTENDSEKVDRLMELHFKYLGAMQVADKKIEGEKHDMVRRGEIIDNDTEEEFYLRRLDAGLFVLQHICYIMAEICNANVPQIRQRVHQILNMRGSSIKIVRHIIKEYAENIGDGRSPEFRENEQKRILGLLENF

SEQ ID NO: 50433 - protein, 145 aa, Homo sapiens
MACSFRGSGSPSYSLEIQWWYVRSHRDWTDKQAWASNQLKASQQEDAGKEATKISVVKVVGSNISHKLRLSRVKPTDEGTYECRVIDFSDGKARHHKVKAYLRVQPGENSVLHLPEAPPAAPAPPPPKPGKELRKRSVDQEACSL

SEQ ID NO: 50434 - protein, 548 aa, Homo sapiens
MAEELVLERCDLELETNGRDHHTADLCREKLVVRRGQPFWLTLHFEGRNYEASVDSLTFSVVTGPAPSQEAGTKARFPLRDAVEEGDWTATVVDQQDCTLSLQLTTPANAPIGLYRLSLEASTGYQGSSFVLGHFILLFNAWCPADAVYLDSEEERQEYVLTQQGFIYQGSAKFIKNIPWNFGQFEDGILDICLILLDVNPKFLKNAGRDCSRRSSPVYVGRVVSGMVNCNDDQGVLLGRWDNNYGDGVSPMSWIGSVDILRRWKNHGCQRVKYGQCWVFAAVACTVLRCLGIPTRVVTNYNSAHDQNSNLLIEYFRNEFGEIQGDKSEMIWNFHCWVESWMTRPDLQPGYEGWQALDPTPQEKSEGTYCCGPVPVRAIKEGDLSTKYDAPFVFAEVNADVVDWIQQDDGSVHKSINRSLIVGLKISTKSVGRDEREDITHTYKYPEGSSEEREAFTRANHLNKLAEKEETGMAMRIRVGQSMNMGSDFDVFAHITNNTAEEYVCRLLLCARTVSYNGILGPECGTKYLLNLNLEPFSGKALCSWSIC

SEQ ID NO: 50435 - protein, 1081 aa, Homo sapiens
MIKCLSLDLCTVDKKPVPEPAYPILFTQEWLEAINSDFEGNPLHNCLVASENGIAPVPWTKITSPEFVDDRPQVVNALCQAWGPLPLEALDLSSPQELHQASSPDNQVLPAQSLAKGKGRTYGSKYPGLIKVEQARCGEVAFRMDEVVSQDFEGDYVALLGFSQESRGESPSREAGTSSGCTSGALEEIAGTKETPLFQKILPLSEANEGPSLGNRACTKPESSEERPYNLGFRRKVNLKAPTHNSERPPQGSYMNVLEDALDCASGLRAGVSQEPAASKMQGPLGNPENMVQLRPGPRQASSPRLSPASPAAAASETKIEVKTKERNGRLPKPMPCPSRNTSSPEPPTPGLKFSFLRGQRQPSVTPEKASLQHNGPWKVLCSLYSPKPNRAKSLGKAGTTQTKTSGPATAPSPLTEEKAALPEASAGSPERGPTLEEEPPGPEPRIGALGVKVFRSRIACLPGGRDRAGRPLLLVSTTEGAWEAPWCTVSEVTKLLSYLCTIPRPEDKAKGLAVLIDARRQPPQPGLVSALQATQAQVPASIRAILFLGEKEAALQLQTLPDVQVEVLTSLKALSHHVDPSQLPAVLEGPFPYCHTEWVHFFQKLDPFLADLHQASSLLQASIEEFEKADPPGGMQEATRCLSKSKELMEAVLRDPGLLGLQREGGATLARLQHDASRLDFSPDVRSHLAAATALYSLVDEQLHVLVTASNSLLGKLELRVRLGRLEAAIHQVSDWMEQEGRRCLQSLTPKDGSLETVEKAHAEFENFFLQAAAQYRRGLELSKQAAQLGATARGAGEAERAEFPELAAFASTQRAFQAELTHFYMAAERQRTDLETLLHLHRFCKRMTWFHMDCQDLMAQLRLDKTSRVSPGDQRRLHRYLQRLASEFPAEKLAAVGLQVASLSRAGLGQELWEEARIRHEEIRMLLEKALTHSSCPEAPAAHSARPERRGVAAKGQGVSVEVTSKGRWDQPPLDSLGMDHLPKSYWPPGPPRGEQNRTFQAGSPPQEAGQAAEAEDGKGSHKLPDPAREHLLATTFFRQQPPRQSQVPRLTGGSFSSEGTDSQTSLEDSPQTSPLASL

SEQ ID NO: 50436 - protein, 104 aa, Homo sapiens
MKKREESTSRSTVLPTSMSPSACRSRPPAPQMPRHPARAPLLVEVVLVSRHSRGPPERLPCTPCLGPRWQCDRTVIVLDVPAQVCWSHLAAKWISPGENKVKGH

SEQ ID NO: 50437 - protein, 2713 aa, Homo sapiens
MKIQKKEKQLSNLKVLNHSPMSDASVNFDYKSPSPFDCSTDQEEKIEDVASHCLPQKDLYTAEEEAATLFPRKMTSHNGMEDSGGGGTGVKKKRKKKEPGDQEGAAKGSKDREPKPKRKREPKEPKEPRKAKEPKKAKEHKEPKQKDGAKKARKPREASGTKEAKEKRSCTDSAARTKSRKASKEQGPTPVEKKKKGKRKSETTVESLELDQGLTNPSLRSPEESTESTDSQKRRSGRQVKRRKYNEDLDFKVVDDDGETIAVLGAGRTSALSASTLAWQAEEPPEDDANIIEKILASKTVQEVHPGEPPFDLELFYVKYRNFSYLHCKWATMEELEKDPRIAQKIKRFRNKQAQMKHIFTEPDEDLFNPDYVEVDRILEVAHTKDAETGEEVTHYLVKWCSLPYEESTWELEEDVDPAKVKEFESLQVLPEIKHVERPASDSWQKLEKSREYKNSNQLREYQLEGMNWLLFNWYNRKNCILADEMGLGKTIQSITFLSEIFLRGIHGPFLIIAPLSTITNWEREFRTWTEMNAIVYHGSQISRQMIQQYEMVYRDAQGNPLSGVFKFHVVITTFEMILADCPELKKIHWSCVIIDEAHRLKNRNCKLLEGLKLMALEHKVLLTGTPLQNSVEELFSLLNFLEPSQFPSETAFLEEFGDLKTEEQVKKLQSILKPMMLRRLKDDVEKNLAPKQETIIEVELTNIQKKYYRAILEKNFSFLTKGANQHNMPNLINTMMELRKCCNHPYLINGAEEKILEDFRKTHSPDAPDFQLQAMIQAAGKLVLIDKLLPKLIAGGHKVLIFSQMVRCLDILEDYLIQRRYTYERIDGRVRGNLRQAAIDRFCKPDSDRFVFLLCTRAGGLGINLTAADTCIIFDSDWNPQNDLQAQARCHRIGQSKAVKVYRLITRNSYEREMFDKASLKLGLDKAVLQDINRKGGTNGVQQLSKMEVEDLLRKGAYGALMDEEDEGSKFCEEDIDQILQRRTHTITIQSEGKGSTFAKASFVASGNRTDISLDDPNFWQKWAKIAELDTEAKNEKESLVIDRPRVRKQTKHYNSFEEDELMEFSELDSDSDERPTRSRRLNDKARRYLRAECFRVEKNLLIFGWGRWKDILTHGRFKWHLNEKDMEMICRALLVYCVKHYKGDEKIKSFIWELITPTKDGQAQTLQNHSGLSAPVPRGRKGKKTKNQLLIPELKDADWLATCNPEVVLHDDGYKKHLKQHCNKVLLRVRMLYYLKAEILGEAAEKAFEGSPARELDVPLPDIDYMEIPVDWWDAEADKSLLIGVFKHGYERYNAMRADPALCFLEKVGMPDEKSLSAEQGVTDGTSDIPERGNTDKEDNAEDKVDGLQKQTESSSDGGDGVFSEKKDDSRAAQDGSDPDKSPWPVSSALTARLRRLVTVYQRCNRKELCRPEILGPGNQGYWVQEEMFRRTSEMDLINKEAQKRWTRREQADFYRTVSSFGVVYDQEKKTFDWTQFRIISRLDKKSDESLEQYFYSFVAMCRNVCRLPTWKDGGPPDTTIYVEPITEERAARTLYRIELLRKVREQVLKCPQLHERLQLCRPSLYLPVWWECGKHDRDLLIGTAKHGLNRTDCYIMNDPQLSFLDAYRNYAQHKRSGTQAPGNLCCLYQTNSKLYESLTYSQMSRTSESLENEPENLVRVESRDDHLSLPDVTCENFISKVQDVISINHDESLLPESLESMMYGKKVLSQEPSSFQESPSTNTESRKDVITISISKDGNCQSGGPEAEIASGPTFMGSLEAGGVAQANIKNGKHLLMSISKEGELCCSEAGQRPENIGQLEAKCLASPSLNPGNESGFVDMCSLSVCDSKRNLSSDQQLIDLLENKSLESKLILSQNHSDEEEEEEENEEENLAMAVGMGERPEVLHLTEPTTNISREKNQGFQDETKKGSLEVANQTPGLQRAFPAPAACQCHCKHMERWMHGLENDEFEIEKPKAYIPDLFKSKTNTIAMEGEPTAIPSQPFKVKHELLKEPWKESAEGQNVFPTYPLEGSELKSEDMDFENKDDYDRDGNCHSQDYPGKYSEEESKSSTSGITGDIGDELQEARAPTIAQLLQEKTLYSFSEWPKDRVIINRLDNICHVVLKGKWPSSQQYEPSGTLPTPVLTSSAGSRTSLSEPEAAEHSFSNGAALAAQIHKESFLAPVFTKDEQKHRRPYEFEVERDAKARGLEQFSATHGHTPIILNGWHGESAMDLSCSSEGSPGATSPFPVSASTPKIGAISSLQGALGMDLSGILQAGLIHPVTGQIVNGSLRRDDAATRRRRGRRKHVEGGMDLIFLKEQTLQAGILEVHEDPGQATLSTTHPEGPGPATSAPEPATAASSQAEKSIPSKSLLDWLRQQADYSLEVPGFGANFSDKPKQRRPRCKEPGKLDVSSLSGEERVPAIPKEPGLRGFLPENKFNHTLAEPILRDTGPRRRGRRPRSELLKAPSIVADSPSGMGPLFMNGLIAGMDLVGLQNMRNMPGIPLTGLVGFPAGFATMPTGEEVKSTLSMLPMMLPGMAAVPQMFGVGGLLSPPMATTCTSTAPASLSSTTKSGTAVTEKTAEDKPSSHDVKTDTLAEDKPGPGPFSDQSEPAITTSSPVAFNPFLIPGVSPGLIYPSMFLSPGMGMALPAMQQARHSEIVGLESQKRKKKKTKGDNPNSHPEPAPSCEREPSGDENCAEPSAPLPAEREHGAQAGEGALKDSNNDTN

SEQ ID NO: 50438 - protein, 42 aa, Homo sapiens
MSPREAKPLELVSDSQMSSPALSKACCLQKRRARRMEITSER

SEQ ID NO: 50439 - protein, 21 aa, Homo sapiens
MWNASHSSTRIPVLISQQWKI

SEQ ID NO: 50440 - protein, 126 aa, Homo sapiens
MIGPEVVHPLVPLDNHIPERAGSGSQVPTEPKKLEENEVIPKRISPVEESEDVSNKVSMSSTVQGSNIFERTEVLAALIVGGIVGILFAVFLILLLMYRMKKKDEGSYDLGKKPIYKKAPTNEFYA

SEQ ID NO: 50441 - protein, 136 aa, Homo sapiens
MSGDKGISAFPESDNLFKWVGTIHGAAGTVYEDLRYKLSLEFPSGYPYNAPTVKFLTPCYHPNVDTQGNICLDILKEKWSALYDVRTILLSIQSLLGEPNIDSPLNTHAAELWKNPTAFKKYLQETYSKQVTSQEP

SEQ ID NO: 50442 - protein, 456 aa, Homo sapiens
MALTMLNGLLIKDSSPPMLLHQVNKTAQLDTFNYQSCFMQSVFDHFPEILFIHRTYNPRGKVLYTFLVDGPRVQLEGHLARAVYFAIPAKEDTEGLAQMFQVFKKFNPAWERVCTILVDPHFLPLPILAMEFPTAEVLLSAFHICKFLQAKFYQLSLERPVERLLLTSLQSTMCSATAGNLRKLYTLLSNCIPPAKLPELHSHWLLNDRIWLAHRWRSRAESSHYFQSLEVTTHILSQFFGTTPSEKQGMASLFRYMQQNSADKANFNQGLCAQNNHAPSDTIPESPKLEQLVESHIQHSLNAICTGPAAQLCLGELAVVQKSTHLIGSGSEKMNIQILEDTHKVQPQPPASCSCYFNQAFHLPCRHILAMLSARRQVLQPDMLPAQWTAGCATSLDSILGSKWSETLDKHLAVTHLTEEVGQLLQHCTKEEFERRYSTLRELADSWIGPYEQVQL

SEQ ID NO: 50443 - protein, 468 aa, Homo sapiens [sequence omitted]

SEQ ID NO: 50444 - protein, 1023 aa, Homo sapiens
MTMLTIEQLSYLLKFAIQKMKQPGTDAFQKPVPLEQHPDYAEYIFHPMDLCTLEKNAKKKMYGCTEAFLADAKWILHNCIIYNGGNHKLTQIAKVVIKICEHEMNEIEVCPECYLAACQKRDNWFCEPCSNPHPLVWAKLKGFPFWPAKALRDKDGQVDARFFGQHDRAWVPINNCYLMSKEIPFSVKKTKSIFNSAMQEMEVYVENIRRKFGVFNYSPFRTPYTPNSQYQMLLDPTNPSAGTAKIDKQEKVKLNFDMTASPKILMSKPVLSGGTGRRISLSDMPRSPMSTNSSVHTGSDVEQDAEKKATSSHFSASEESMDFLDKSTASPASTKTGQAGSLSGSPKPFSPQLSAPITTKTDKTSTTGSILNLNLDRSKAEMDLKELSESVQQQSTPVPLISPKRQIRSRFQLNLDKTIESCKAQLGINEISEDVYTAVEHSDSEDSEKSDSSDSEYISDDEQKSKNEPEDTEDKEGCQMDKEPSAVKKKPKPTNPVEIKEELKSTSPASEKADPGAVKDKASPEPEKDFSEKAKPSPHPIKDKLKGKDETDSPTVHLGLDSDSESELVIDLGEDHSGREGRKNKKEPKEPSPKQDVVGKTPPSTTVGSHSPPETPVLTRSSAQTSAAGATATTSTSSTVTVTAPAPAATGSPVKKQRPLLPKETAPAVQRVVWNSSTVQQKEITQSPSTSTITLVTSTQSSPLVTSSGSMSTLVSSVNADLPIATASADVAADIAKYTSKMMDAIKGTMTEIYNDLSKNTTGSTIAEIRRLRIEIEKLQWLHQQELSEMKHNLELTMAEMRQSLEQERDRLIAEVKKQLELEKQQAVDETKKKQWCANCKKEAIFYCCWNTSYCDYPCQQAHWPEHMKSCTQSATAPQQEADAEVNTETLNKSSQGSSSSTQSAPSETASASKEKETSAEKSKESGSTLDLSGSRETPSSILLGSNQGSVSKRCDKQPAYAPTTTDHQPHPNYPAQKYHSRSNKSSWSSSDEKRGSTRSDHNTSTSTKSLLPKESRLDTFWD

SEQ ID NO: 50445 - protein, 995 aa, Homo sapiens
MTMLTIEQLSYLLKFAIQKMKQPGTDAFQKPVPLEQHPDYAEYIFHPMDLCTLEKNAKKKMYGCTEAFLADAKWILHNCIIYNGGNHKLTQIAKVVIKICEHEMNEIEVCPECYLAACQKRDNWFCEPCSNPHPLVWAKLKGFPFWPAKALRDKDGQVDARFFGQHDRAWVPINNCYLMSKEIPFSVKKTKSIFNSAMQEMEVYVENIRRKFGVFNYSPFRTPYTPNSQYQMLLDPTNPSAGTAKIDKQEKVKLNFDMTASPKILMSKPVLSGGTGRRISLSDMPRSPMSTNSSVHTGSDVEQDAEKKATSSHFSASEESMDFLDKSTASPASTKTGQAGSLSGSPKPFSPQLSAPITTKTDKTSTTGSILNLNLDRSKAEMDLKELSESVQQQSTPVPLISPKRQIRSRFQLNLDKTIESCKAQLGINEISEDVYTAVEHSDSEDSEKSDSSDSEYISDDEQKSKNEPEDTEDKEGCQMDKEPSAVKKKPKPTNPVEIKEELKSTSPASEKADPGAVKDKASPEPEKDFSEKAKPSPHPIKDKLKGKDETDSPTVHLGLDSDSESELVIDLGEDHSGREGRKNKKEPKEPSPKQDVVGKTPPSTTVGSHSPPETPVLTRSSAQTSAAGATATTSTSSTVTVTAPAPAATGSPVKKQRPLLPKETAPAVQRVVWNSSTVQQKEITQSPSTSTITLVTSTQSSPLVTSSGSMSTLVSSVNADLPIATASADVAADIAKYTSKMMDAIKGTMTEIYNDLSKNTTGSTIAEIRRLRIEIEKLQWLHQQELSEMKHNLELTMAEMRQSLEQERDRLIAEVKKQLELEKQQAVDETKKKQWCANCKKEAIFYCCWNTSYCDYPCQQAHWPEHMKSCTQSATAPQQEADAEVNTETLNKSSQGSSSSTQSAPSETASASKEKETSAEKSKESGSTLDLSGSRETPSSILLGSNQGSDHSRSNKSSWSSSDEKRGSTRSDHNTSTSTKSLLPKESRLDTFWD

SEQ ID NO: 50446 - protein, 477 aa, Homo sapiens
MQSTYNYNMRGGAYPPRYFYPFPVPPLLYQVELSVGGQQFNGKGKTRQAAKHDAAAKALRILQNEPLPERLEVNGRESEEENLNKSEISQVFEIALKRNLPVNFEVARESGPPHMKNFVTKVSVGEFVGEGEGKSKKISKKNAAIAVLEELKKLPPLPAVERVKPRIKKKTKPIVKTSPEYGQGINPISRLAQIQQAKKEKEPEYTLLTERGLPRRREFVMQVKVGNHTAEGTGTNKKVAKRNAAENMLEILGFKVPQAQPTKPALKSEEKTPIKKPGDGRKVTFFEPGSGDENGTSNKEDEFRMPYLSHQQLPAGILPMVPEVAQAVGVSQGHHTKDFTRAAPNPAKATVTAMIARELLYGGTSPTAETILKNNISSGHVPHGPLTRPSEQLDYLSRVQGFQVEYKDFPKNNKNEFVSLINCSSQPPLISHGIGKDVESCHDMAALNILKLLSELDQQSTEMPRTGNGPMSVCGRC

SEQ ID NO: 50447 - protein, 545 aa, Homo sapiens
MSIPSTTSSLPSENAGRPIQNSALPSASITSTSAAAESITPTVELNALCMKLGKKPMYKPVDPYSRMQSTYNYNMRGGAYPPRYFYPFPVPPLLYQVELSVGGQQFNGKGKTRQAAKHDAAAKALRILQNEPLPERLEVNGRESEEENLNKSEISQVFEIALKRNLPVNFEVARESGPPHMKNFVTKVSVGEFVGEGEGKSKKISKKNAAIAVLEELKKLPPLPAVERVKPRIKKKTKPIVKPQTSPEYGQGINPISRLAQIQQAKKEKEPEYTLLTERGLPRRREFVMQVKVGNHTAEGTGTNKKVAKRNAAENMLEILGFKVPQAQPTKPALKSEEKTPIKKPGDGRKVTFFEPGSGDENGTSNKEDEFRMPYLSHQQLPAGILPMVPEVAQAVGVSQGHHTKDFTRAAPNPAKATVTAMIARELLYGGTSPTAETILKNNISSGHVPHGPLTRPSEQLDYLSRVQGFQVEYKDFPKNNKNEFVSLINCSSQPPLISHGIGKDVESCHDMAALNILKLLSELDQQSTEMPRTGNGPMSVCGRC

SEQ ID NO: 50448 - protein, 692 aa, Homo sapiens
MSQLKKKRAATTLDEKIEKVRKKRKTEDKEAKSGKLEKEKEAKEGSEPKEQEDLQENDEEGSEDEASETDYSSADENILTKADTLKVKDRKKKKKKGQEAGGFFEDASQYDENLSFQDMNLSRPLLKAITAMGFKQPTPIQKACIPVGLLGKDICACAATGTGKTAAFALPVLERLIYKPRQAPVTRVLVLVPTRELGIQVHSVTRQLAQFCNITTCLAVGGLDVKSQEAALRAAPDILIATPGRLIDHLHNCPSFHLSSIEVLILDEADRMLDEYFEEQMKEIIRMCSHHRQTMLFSATMTDEVKDLASVSLKNPVRIFVNSNTDVAPFLRQEFIRIRPNREGDREAIVAALLTRTFTDHVMLFTQTKKQAHRMHILLGLMGLQVGELHGNLSQTQRLEALRRFKDEQIDILVATDVAARGLDIEGVKTVINFTMPNTIKHYVHRVGRTARAGRAGRSVSLVGEDERKMLKEIVKAAKAPVKARILPQDVILKFRDKIEKMEKDVYAVLQLEAEEKEMQQSEAQINTAKRLLEKGKEAVVQEPERSWFQTKEERKKEKIAKALQEFDLALRGKKKRKKFMKDAKKKGEMTAEERSQFEILKAQMFAERLAKRNRRAKRARAMPEEEPVRGPAKKQKQGKKSVFDEELTNTSKKALKQYRAGPSFEERKQLGLPHQRRGGNFKSKSRYKRRK

SEQ ID NO: 50449 - protein, 522 aa, Homo sapiens [sequence omitted]

SEQ ID NO: 50450 - protein, 563 aa, Homo sapiens
MEEEGILRRLKKYDNCWLALTDPRDVARIESKTVIVTQEQRDTVPIPKTGLSQLGRWMSEEDFEKAFNARFPGCMKGRTMYVIPFSMGPLGSPLSKIGIELTDSPYVVASMRIMTRMGTPVLEAVGDGEFVKCLHSVGCPLPLQKPLVNNWPCNPELTLIAHLPDRREIISFGSGYGGNSLLGKKCFALRMASRLAKEEGWLAEHMLILGITNPEGEKKYLAAAFPSACGKTNLAMMNPSLPGWKVECVGDDIAWMKFDAQGHLRAINPENGFFGVAPGTSVKTNPNAIKTIQKNTIFTNVAETSDGGVYWEGIDEPLASGVTITSWKNKEWSSEDGEPCAHPNSRFCTPASQCPIIDAAWESPEGVPIEGIIFGGRRPAGVPLVYEALSWQHGVFVGAAMRSEATAAAEHKGKIIMHDPFAMRPFFGYNFGKYLAHWLSMAQHPAAKLPKIFHVNWFRKDKEGKFLWPGFGENSRVLEWMFNRIDGKASTKLTPIGYIPKEDALNLKGLGHINMMELFSISKEFWEKEVEDIEKYLEDQVNADLPCEIEREILALKQRISQM

SEQ ID NO: 50451 - protein, 400 aa, Homo sapiens
MLLSEAGAAEKTSGGGDGARARADGAAKEGAGAAAAAAGPDGAPEARAKPAVRVRLEDRFNSIPAEPPPAPRGPEPPEPGGALNNLVTLIRHPSELMNVPLQQQNKCTALVKNKTAATTTALQFTYPLFTTNACSTSGNSNLSQTQSSSNSCSVLEAAKHQDIGLPRAFSFCYQQEIESTKQTLGSRNKVLPEQVWIKVGEAALCKQALKRNRSRMRQLDTNVERRALGEIQNVGEGATATQGAWQSSESSQANLGEQAQSGPQGGRSQRRERHNRMERDRRRRIRICCDELNLLVPFCNAETDKATTLQWTTAFLKYIQERHGDSLKKVLSTNSRYVMLWTCFLKMKSAVDGKNPQHAYRTANHKWLCLHEARSFAFEVSIWAHFQLFRVRIPEGFLSI

SEQ ID NO: 50452 - protein, 715 aa, Homo sapiens
MIEGEIESLHSENSGKSGQEHWFTELPPVLTFELSRFEFNQALGRPEKIHNKLEFPQVLYLDRYMHRNREITRIKREEIKRLKDYLTVLQQRLERYLSYGSGPKRFPLVDVLQYALEFASSKPVCTSPVDDIDASSPPSGSIPSQTLPSTTEQQGALSSELPSTSPSSVAAISSRSVIHKPFTQSRIPPDLPMHPAPRHITEEELSVLESCLHRWRTEIENDTRDLQESISRIHRTIELMYSDKSMIQVPYRLHAVLVHEGQANAGHYWAYIFDHRESRWMKYNDIAVTKSSWEELVRDSFGGYRNASAYCLMYINDKAQFLIQEEFNKETGQPLVGIETLPPDLRDFVEEDNQRFEKELEEWDAQLAQKALQEKLLASQKLRESETSVTTAQAAGDPEYLEQPSRSDFSKHLKEETIQIITKASHEHEDKSPETVLQSAIKLEYARLVKLAQEDTPPETDYRLHHVVVYFIQNQAPKKIIEKTLLEQFGDRNLSFDERCHNIMKVAQAKLEMIKPEEVNLEEYEEWHQDYRKFRETTMYLIIGLENFQRESYIDSLLFLICAYQNNKELLSKGLYRGHDEELISHYRRECLLKLNEQAAELFESGEDREVNNGLIIMNEFIVPFLPLLLVDEMEEKDILAVEDMRNRWCSYLGQEMEPHLQEKLTDFLPKLLDCSMEIKSFHEPPKLPSYSTHELCERFARIMLSLSRTPADGR

SEQ ID NO: 50453 - protein, 747 aa, Homo sapiens
MIEGEIESLHSENSGKSGQEHWFTELPPVLTFELSRFEFNQALGRPEKIHNKLEFPQVLYLDRYMHRNREITRIKREEIKRLKDYLTVLQQRLERYLSYGSGPKRFPLVDVLQYALEFASSKPVCTSPVDDIDASSPPSGSIPSQTLPSTTEQQGALSSELPSTSPSSVAAISSRSVIHKPFTQSRIPPDLPMHPAPRHITEEELSVLESCLHRWRTEIENDTRDLQESISRIHRTIELMYSDKSMIQVPYRLHAVLVHEGQANAGHYWAYIFDHRESRWMKYNDIAVTKSSWEELVRDSFGGYRNASAYCLMYINDKAQFLIQEEFNKETGQPLVGIETLPPDLRDFVEEDNQRFEKELEEWDAQLAQKALQEKLLASQKLRESETSVTTAQAAGDPEYLEQPSRSDFSKHLKEETIQIITKASHEHEDKSPETVLQSIMMTPNMQGIIMAIGKSRSVYDRCGPEAGFFKAIKLEYARLVKLAQEDTPPETDYRLHHVVVYFIQNQAPKKIIEKTLLEQFGDRNLSFDERCHNIMKVAQAKLEMIKPEEVNLEEYEEWHQDYRKFRETTMYLIIGLENFQRESYIDSLLFLICAYQNNKELLSKGLYRGHDEELISHYRRECLLKLNEQAAELFESGEDREVNNGLIIMNEFIVPFLPLLLVDEMEEKDILAVEDMRNRWCSYLGQEMEPHLQEKLTDFLPKLLDCSMEIKSFHEPPKLPSYSTHELCERFARIMLSLSRTPADGR

SEQ ID NO: 50454 - protein, 169 aa, Homo sapiens [sequence omitted]

SEQ ID NO: 50455 - protein, 21 aa, Homo sapiens
MCECISIHIGQPGVQTGSSSW

SEQ ID NO: 50456 - protein, 104 aa, Homo sapiens [sequence omitted]

SEQ ID NO: 50457 - protein, 451 aa, Homo sapiens
MEPEETKKDPASQCPTEKSEVTPFPHNSSIDPHGLYSLSLLHTYDQYGDLNFAGMQNTTVLTEKPLSGTDVQEKTFGESQDLPLKSDLGTREDSSVASSDRSSVEREVAEHLAKGFWSDICSTDTPCQMQLSPAVAKDGSEQISQKRSECPWLGIRISESPEPGQRTFTTLSSVNCPFISTLSTEGCSSNLEIGNDDYVSEPQQEPCPYACVISLGDDSETDTEGDSESCSAREQECEVKLPFNAQRIISLSRNDFQSLLKMHKLTPEQLDCIHDIRRRSKNRIAAQRCRKRKLDCIQNLESEIEKLQSEKESLLKERDHILSTLGETKQNLTGLCQKVCKEAALSQEQIQILAKYSAADCPLSFLISEKDKSTPDGELALPSIFSLSDRPPAVLPPCARGNSEPGYARGQESQQMSTATSEQAGPAEQCRQSGGISDFCQQMTDKCTTDE

SEQ ID NO: 50458 - protein, 1109 aa, Homo sapiens
MKPPISRAKMILITKAAIKAIKLYKHVVQIVEKFIKKCKPEYKVPGLYVIDSIVRQSRHQFGTDKDVFGPRFSKNITATFQYLYLCPSEDKSKIVRVLNLWQKNGVFKIEIIQPLLDMAAGTSNAAPVAENVTNNEGSPPPPVKVSSEPPTQATPNSVPAVPQLPSSDAFAAVAQLFQTTQGQQLQQILQTFQQPPKPQSPALDNAVMAQVQAITAQLKTTPTQPSEQKAAFPPPEQKTAFDKKLLDRFDYDDEPEAVEESKKEDTTAVTTTAPAAAVPPAPTATVPAAAAPAAASPPPPQAPFGFPGDGMQQPAYTQHQNMDQFQPRMMGIQQDPMHHQVPLPPNGQMPGFGLLPTPPFPPMAQPVIPPTPPVQQPFQASFQAQNEPLTQKPHQQEMEVEQPCIQEVKRHMSDNRKSRSRSASRSPKRRRSRSGSRSRRSRHRRSRSRSRDRRRHSPRSRSQERRDREKERERRQKGLPQVKPETASVCSTTLWVGQLDKRTTQQDVASLLEEFGPIESINMIPPRGCAYIVMVHRQDAYRALQKLSRGNYKVNQKSIKIAWALNKGIKADYKQYWDVELGVTYIPWDKVKPEELESFCEGGMLDSDTLNPDWKGIPKKPENEVAQNGGAETSHTEPVSPIPKPLPVPVPPIPVPAPITVPPPQVPPHQPGPPVVGALQPPAFTPPLGIPPPGFGPGVPPPPPPPPFLRPGFNPMHLPPGFLPPGPPPPITPPVSIPPPHTPPISIPNLVSGARGNAESGDSVKMYGSAVPPAAPTNLPTPPVTQPVSLLGTQGVAPGPVIGLQAPSTGLLGARPGLIPLQRPPGMPPPHLQRFPLMPPRPMPPHMMHRGPPPGPGGFAMPPPHGMKGPFPPHGPFVRPGGMPGLGGPGPGPGGPEDRDGRQQPPQQPQQQPQPQAPQQPQQQQQQQPPPSQQPPPTQQQPQQFRNDNRQQFNSGRDQERFGRRSFGNRVENDRERYGNRNDDRDNSNRDRREWGRRSPDRDRHRDLEERNRRSSGHRDRERDSRDRESRREKEEARGKEKPEVTDRAGGNKTVEPPISQVGNVDTASELEKGVSEAAVLKPSEELPAEATSSVEPEKDSGSAAEAPR

SEQ ID NO: 50459 - protein, 229 aa, Homo sapiens [sequence omitted]

SEQ ID NO: 50460 - protein, 627 aa, Homo sapiens
MESEKEEEKPKTGGAFSNALSSLNVLRPGEIPDAAFIHAARKKRQMARELGDFTPHDNEPGKGRLVREDENDASDDEDDDEKRRIVFSVKEKSQRQKIAEEIGIEGSDDDALVTGEQDEELSRWEQEQIRKGINIPQVQASQPAEVNMYYQNTYQTMPYGSSYGIPYSYTAYGSSDAKSQKTDNTVPFKTPSNEMTPVTIDLVKKQLKDRLDSMKELHKTNRQQHEKHLQSRVDSTRAIERLEGSSGGIGERYKFLQEMRGYVQDLLECFSEKVPLINELESAIHQLYKQRASRLVQRRQDDIKDESSEFSSHSNKALMAPNLDSFGRDRALYQEHAKRRIAEREARRTRRRQAREQTGKMADHLEGLSSDDEETSTDITNFNLEKDRISKESGKVFEDVLESFYSIDCIKSQFEAWRSKYYTSYKDAYIGLCLPKLFNPLIRLQLLTWTPLEAKCRDFENMLWFESLLFYGCEEREQEKDDVDVALLPTIVEKVILPKLTVIAENMWDPFSTTQTSRMVGITLKLINGYPSVVNAENKNTQVYLKALLLRMRRTLDDDVFMPLYPKNVLENKNSGPYLFFQRQFWSSVKVIKPPFQRGSCPIPRRKECCSERPRRIWTDRPCVVFS

SEQ ID NO: 50461 - protein, 78 aa, Homo sapiens
MKALPEEKQSSISLFWRAVNVTRPINYLTEVLNFENESSGGEFCPFQPGELCQGSPERLFQLIKLARGPSLPPCRKCL

SEQ ID NO: 50462 - protein, 73 aa, Homo sapiens
MGTALDIKIKRANKVYHAGPIQIINSTIEMVKPGKFPSGKTEIPFEFPLHLKGNKVLYETYHGVFVNIQVRAS

SEQ ID NO: 50463 - protein, 461 aa, Homo sapiens [sequence omitted]

SEQ ID NO: 50464 - protein, 239 aa, Homo sapiens
MSRVLQKDAEQESQMRAEIQDMKQELSTVNMMDEFARYARLERKINKMTDKLKTHVKARTAQLAKIKWVISVAFYVLQIRKKQQEVVGFLEANKIDFKELDIAGDEDNRRWMRENVPGEKKPQNGIPLPPQIFNEEQYCGDFDSFFSAKEENIIYSFLGLAPPPDSKGSEKAEEGGETEAQKEGSEDVGNLPEAQEKNEEEGETATEETEEIAMEGAEGEAEEEEETAEGEEPGEDEDS

SEQ ID NO: 50465 - protein, 510 aa, Homo sapiens
MHHKLEAILTENQFLKQLQLRHLKAIGKYENSQNNLPQIMAKHQNEVKNLRQLLRKSQEKERTLSRKLRETDSQLLKTKDILQALQKLSEDKNLAEREELTHKLSIITTKMDANDKKIQSLEKQLRLNCRAFSRQLAIETRKTLAAQTATKTLQVEVKHLQQKLKEKDRELEIKNIYSHRILKNLHDTEDYPKVSSTKSVQADRKILPFTSMRHQGTQKSDVPPLTTKGKKATGNIDHKEKSTEINHEIPHCVNKLPKQEDSKRKYEDLSGEEKHLEVQILLENTGRQKDKKEDQEKKNIFVKEEQELPPKIIEVIHPERESNQEDVLVREKFKRSMQRNGVDDTLGKGTAPYTKGPLRQRRHYSFTEATENLHHGLPASGGPANAGNMRYSHSTGKHLSNREEMELEHSDSGYEPSFGKSSRIKVKDTTFRDKKSSLMEELFGSGYVLKTDQSSPGVAKGSEEPLQSKESHPLPPSQASTSHAFGDSKVTVVNSIKPSSPTEGKRKIII

SEQ ID NO: 50466 - protein, 1132 aa, Homo sapiens
MFIWCEDCSQYHDSECPELGPVVMVKDSFVLSRARSSLPPNLEIRRLEDGAEGVFAITQLVKRTQFGPFESRRVAKWEKESAFPLKVFQKDGHPVCFDTSNEDDCNWMMLVRPAAEAEHQNLTAYQHGSDVYFTTSRDIPPGTELRVWYAAFYAKKMDKPMLKQAGSGVHAAGTPENSAPVESEPSQWACKVCSATFLELQLLNEHLLGHLEQAKSLPPGSQSEAAAPEKEQDTPRGEPPAVPESENVATKEQKKKPRRGRKPKVSKAEQPLVIVEDKEPTEQVAEIITEVPPDEPVSATPDERIMELVLGKLATTTTDTSSVPKFTHHQNNTITLKRSLILSSRHGIRRKLIKQLGEHKRVYQCNICSKIFQNSSNLSRHVRSHGDKLFKCEECAKLFSRKESLKQHVSYKHSRNEVDGEYRYRCGTCEKTFRIESALEFHNCRTDDKTFQCEMCFRFFSTNSNLSKHKKKHGDKKFACEVCSKMFYRKDVMLDHQRRHLEGVRRVKREDLEAGGENLVRYKKEPSGCPVCGKVFSCRSNMNKHLLTHGDKKYTCEICGRKFFRVDVLRDHIHVHFKDIALMDDHQREEFIGKIGISSEENDDNSDESADSEPHKYSCKRCQLTFGRGKEYLKHIMEVHKEKGYGCSICNRRFALKATYHAHMVIHRENLPDPNVQKYIHPCEICGRIFNSIGNLERHKLIHTGVKSHACEQCGKSFARKDMLKEHMRVHDNVREYLCAECGKGMKTKHALRHHMKLHKGIKEYECKECHRRFAQKVNMLKHCKRHTGIKDFMCELCGKTFSERNTMETHKLIHTVGKQWTCSVCDKKYVTEYMLQKHVQLTHDKVEAQSCQLCGTKVSTRASMSRHMRRKHPEVLAVRIDDLDHLPETTTIDASSIGIVQPELTLEQEDLAEGKHGKAAKRSHKRKQKPEEEAGAPVPEDATFSEYSEKETEFTGSVGDETNSAVQSIQQVVVTLGDPNVTTPSSSVGLTNITVTPITTAAATQFTNLQPVAVGHLTTPERQLQLDNSILTVTFDTVSGSAMLHNRQNDVQIHPQPEASNPQSVAHFINLTTLVNSITPLGSQLSDQHPLTWRAVPQTDVLPPSQPQAPPQQAAQPQVQAEQQQQQMYSY

SEQ ID NO: 50467 - protein, 1245 aa, Homo sapiens
MENKPIVTCAGDQNLFTSVYPTLSQQLPREPMEWRRSYGRAPKMIHLESNFVQFKEELLPKEGNKALLTFPFLHIYWTECCDTEVYKATVKDDLTKWQNVLKAHSSVDWLIVIVENDAKKKNKTNILPRTSIVDKIRNDFCNKQSDRCVVLSDPLKDSSRTQESWNAFLTKLRTLLLMSFTKNLGKFEDDMRTLREKRTEPGWSFCEYFMVQEELAFVFEMLQQFEDALVQYDELDALFSQYVVNFGAGDGANWLTFFCQPVKSWNGLILRKPIDMEKRESIQRREATLLDLRSYLFSRQCTLLLFLQRPWEVAQRALELLHNCVQELKLLEVSVPPGALDCWVFLSCLEVLQRIEGCCDRAQIDSNIAHTVGLWSYATEKLKSLGYLCGLVSEKGPNSEDLNRTVDLLAGLGAERPETANTAQSPYKKLKEALSSVEAFEKHYLDLSHATIEMYTSIGRIRSAKFVGKDLAEFYMRKKAPQKAEIYLQGALKNYLAEGWALPITHTRKQLAECQKHLGQIENYLQTSSLLASDHHLTEEERKHFCQEILDFASQPSDSPGHKIVLPMHSFAQLRDLHFDPSNAVVHVGGVLCVEITMYSQMPVPVHVEQIVVNVHFSIEKNSYRKTAEWLTKHKTSNGIINFPPETAPFPVSQNSLPALELYEMFERSPSDNSLNTTGIICRNVHMLLRRQESSSSLEMPSGVALEEGAHVLRCSHVTLEPGANQITFRTQAKEPGTYTLRQLCASVGSVWFVLPHIYPIVQYDVYSQEPQLHVEPLADSLLAGIPQRVKFTVTTGHYTIKNGDSLQLSNAEAMLILCQAESRAVVYSNTREQSSEAALRIQSSDKVTSISLPVAPAYHVIEFELEVLSLPSAPALGGESDMLGMAEPHRKHKDKQRTGRCMVTTDHKVSIDCPWSIYSTVIALTFSVPFRTTHSLLSSGTRKYVQVCVQNLSELDFQLSDSYLVDTGDSTDLQLVPLNTQSQQPIYSKQSVFFVWELKWTEEPPPSLHCRFSVGFSPASEEQLSISLKPYTYEFKVENFFTLYNVKAEIFPPSGMEYCRTGSLCSLEVLITRLSDLLEVDKDEALTESDEHFSTKLMYEVVDNSSNWAVCGKSCGVISMPVAARATHRVHMEVMPLFAGYLPLPDVRLFKYLPHHSAHSSQLDADSWIENDSLSVDKHGDDQPDSSSLKSRGSVHSACSSEHKGLPMPRLQALPAGQVFNSSSGTQVLVIPSQDDHVLEVSVT

SEQ ID NO: 50468 - protein, 827 aa, Homo sapiens
MCNQGRGRESSRGGLHVQGSCRGLSRSPQQETGFAKAPAGTDCFFHCSPGSRGQGDRKEEVTSEPGGTSIMSRLGGMNAAVRAVTRMGIYVGAKVFLIYEGYEGLVEGGENIKQANWLSVSNIIQLGGTIIGSARCKAFTTREGRRAAAYNLVQHGITNLCVIGGDGSLTGANIFRSEWGSLLEELVAEGKISETTARTYSHLNIAGLVGSIDNDFCGTDMTIGTDSALHRIMEVIDAITTTAQSHQRTFVLEVMGRHCGYLALVSALASGADWLFIPEAPPEDGWENFMCERLGETRSRGSRLNIIIIAEGAIDRNGKPISSSYVKDLVVQRLGFDTRVTVLGHVQRGGTPSAFDRILSSKMGMEAVMALLEATPDTPACVVTLSGNQSVRLPLMECVQMTKEVQKAMDDKRFDEATQLRGGSFENNWNIYKLLAHQKPPKEKSNFSLAILNVGAPAAGMNAAVRSAVRTGISHGHTVYVVHDGFEGLAKGQVQEVGWHDVAGWLGRGGSMLGTKRTLPKGQLESIVENIRIYGIHALLVVGGFEAYEGVLQLVEARGRYEELCIVMCVIPATISNNVPGTDFSLGSDTAVNAAMESCDRIKQSASGTKRRVFIVETMGGYCGYLATVTGIAVGADAAYVFEDPFNIHDLKVNVEHMTEKMKTDIQRGLVLRNEKCHDYYTTEFLYNLYSSEGKGVFDCRTNVLGHLQQGGAPTPFDRNYGTKLGVKAMLWLSEKLREVYRKGRVFANAPDSACVIGLKKKAVAFSPVTELKKDTDFEHRMPREQWWLSLRLMLKMLAQYRISMAAYVSGELEHVTRRTLSMDKGF

SEQ ID NO: 50469 - protein, 45 aa, Homo sapiens
MLPDSTEIDQDTINRIIKVMKHEAYGEVSGASLPASAGRQLTQQR

SEQ ID NO: 50470 - protein, 775 aa, Homo sapiens
MPSKRRSVLVHSSVETYTPPDTSSASEDEGSLRRPGRLTSTPLQSHSSVEPWLDRVIQGSSTSSSASSTSSHPGGRPTTAPSAAATPGAAATTALAGLEAHTHIDLHSAPPDVTTGLVEHSYFERPQVASVRSVPRGCSGSMLETADGVPVNSRVSSKIQQLLNTLKRPKRPPLKEFFVDDFEELLEVQQPDPNQPKPEGSETSVLRGEPLTAGVPRPPSLLATLQRWGTTQPKSPCLTALDTTGKAVYTLTYGKLWSRSLKLAYTLLNKLTSKNEPLLKPGDRVALVFPNSDPVMFMVAFYGCLLAELVPVPIEVPLTRKDAGSQQVGFLLGSCGVFLALTTDACQKGLPKAQTGEVAAFKGWPPLSWLVIDGKHLAKPPKDWHPLAQDTGTGTAYIEYKTSKEGSTVGVTVSHASLLAQCRALTQACGYSEAETLTNVLDFKRDAGLWHGVLTSVMNRMHVVSVPYALMKANPLSWIQKVCFYKARAALVKSRDMHWSLLAQRGQRDVSLSSLRMLIVADGANPWSISSCDAFLNVFQSRGLRPEVICPCASSPEALTVAIRRPPDLGGPPPRKAVLSMNGLSYGVIRVDTEEKLSVLTVQDVGQVMPGANVCVVKLEGTPYLCKTDEVGEICVSSSATGTAYYGLLGITKNVFEAVPVTTGGAPIFDRPFTRTGLLGFIGPDNLVFIVGKLDGLMVTGVRRHNADDVVATALAVEPMKFVYRGRIAVFSVTVLHDDRIVLVAEQRPDASEEDSFQWMSRVLQVGAPARPMVR

SEQ ID NO: 50471 - protein, 246 aa, Homo sapiens [sequence omitted]

SEQ ID NO: 50472 - protein, 151 aa, Homo sapiens
MRAKLFRFASENDLPEWKERGTGDVKLLKHKEKGAIRLLMRRDKTLKICANHYITPMMELKPNAGSDRAWVWNTHADFADECPKPELLAIRFLNAENAQKFKTKFEECRKEIEEREKKAGSGKNDHAEKVAEKLEALSVKEETKEDAEEKQ

SEQ ID NO: 50473 - protein, 150 aa, Homo sapiens
MRAKLFRFASENDLPEWKERGTGDVKLLKHKEKGAIRLLMRRDKTLKICANHYITPMMELKPNAGSDRAWVWNTHADFADECPKPELLAIRFLNAENAQKFKTKFEECRKEIEEREKKGSGKNDHAEKVAEKLEALSVKEETKEDAEEKQ

SEQ ID NO: 50474 - protein, 88 aa, Homo sapiens
MNCQMSNITVTYRDGRVAQLEQVYIRGSKIRFLILPDMLKNAPMLKSMKNKNQGSGAGRGKAAILKAQVAARGRGRGMGRGNIFQKRR

SEQ ID NO: 50475 - protein, 128 aa, Homo sapiens
MHMLAHLLHPMPPLSPAFPLEYISTVAFEAGLLECTPELRIHRVSLYRQAGVVQWQDLGSLQSPPPGFKPFSCLSLPSSWDYSYTPPHPANFCIFSRDGVSPCCPGWSRSPDLMICPPWPPKVLGLQA

SEQ ID NO: 50476 - protein, 256 aa, Homo sapiens
MIHIYLDKETGKPKGDATVSYEDPPTAKAAVEWFDGKDFQGSKLKVSLARKKPPMNSMRGGLPPREGRGMPPPLRGGPGGPGGPGGPMGRMGGRGGDRGGFPPRGPRGSRGNPSGGGNVQHRAGDWQCPNPSIGDFCCDVIVCRGCGNQNFAWRTECNQCGDRGRGGPGGMRGGRGGLMDRGGPGGMFRGGRGGDRGGFRGGRGMDRGGFGGGRRGGPGGPPGPLMEQMGGRRGGRGGPGKMDKGEHRQERRDRPY

SEQ ID NO: 50477 - protein, 561 aa, Homo sapiens [sequence omitted]

SEQ ID NO: 50478 - protein, 618 aa, Homo sapiens
MAEIQDLKSRGGKDVAIEIEERRIQSCVHFMTLKKLNRLAHIRLKKGRDQTHEAKQKVDAYHLQLQNLLYEVMHLQKEITKCLEFKSKHEEIDLVSLEEFYKEAPPDISKAEVTMGDPHQQTLARLDWELEQRKRLAEKYRECLSNKEKILKEIEVKKEYLSSLQPRLNSIMQASLPVQEYLFMPFDQAHKQYETARHLPPPLYVLFVQATAYGQACDKTLSVAIEGSVDEAKALFKPPEDSQDDESDSDAEEEQTTKRRRPTLGVQLDDKRKEMLKRHPLSVMLDLKCKDDSVLHLTFYYLMNLNIMTVKAKVTTAMELITPISAGDLLSPDSVLSCLYPGDHGKKTPNPANQYQFDKVGILTLSDYVLELGHPYLWVQKLGGLHFPKEQPQQTVIADHSLSASHMETTMKLLKTRVQSRLALHKQFASLEHGIVPVTSDCQYLFPAKVVSRLVKWVTVAHEDYMELHFTKDIVDAGLAGDTNLYYMALIERGTAKLQAAVVLNPGYSSIPPVFQLCLNWKGEKTNSNDDNIRAMEGEVNVCYKELCGPWPSHQLLTNQLQRLCVLLDVYLETESHDDSVEGPKEFPQEKMCLRLFRGPSRMKPFKYNHPQGFFSHR

SEQ ID NO: 50479 - protein, 278 aa, Homo sapiens
MAEIQDLKSRGGKDVAIEIEERRIQSCVHFMTLKKLNRLAHIRLKKGRDQTHEAKQKVDAYHLQLQNLLYEVMHLQKEITKCLEFKSKHEEIDLVSLEEFYKEAPPDISKAEVTMGDPHQQTLARLDWELEQRKRLAEKYRECLSNKEKILKEIEVKKEYLSSLQPRLNSIMQASLPVQEYLFMPFDQAHKQYETARHLPPPLYVLFVQATAYGQACAHMKSSQPPRQDKTLSVAIEGSVDEAKALFKPPEDSQDDESDSDAEEEQTTVPSSLEAEEV

SEQ ID NO: 50480 - protein, 39 aa, Homo sapiens
MAPCHTDGHRGCRAGGTSGRLDCSGIRGQGAGGPVPPGE

SEQ ID NO: 50481 - skipped

SEQ ID NO: 50482 - protein, 74 aa, Homo sapiens
MKHLPGADPELVLLGRRYEELERIPLSEMTREEINALVQELGFYRKAAPDAQVPPEYVWAPAKPPEETSDHADL

SEQ ID NO: 50483 - protein, 250 aa, Homo sapiens
MLLAEAYGSGGCFWDNGHLYREDQTSPAPGLRCLNWLDAQSGLASAPVSGAGNHSYCRNPDEDPRGPWCYVSGEAGVPEKRPCEDLRCPETTSQALPAFTTEIQEASEGPGADEVQVFAPANALPARSEAAAVQPVIGISQRVRMNSKEKKDLGTLGYVLGITMMVIIIAIGAGIILGYSYKRGKDLKEQHDQKVCEREMQRITLPLSAFTNPTCEIVDEKTVVVHTSQTPVDPQEGTTPLMGQAGTPGA

SEQ ID NO: 50484 - protein, 353 aa, Homo sapiens
MARTQKNKATAHHLGLLKARLAKLRRELITPKGGGGGGPGEGFDVAKTGDARIGFVGFPSVGKSTLLSNLAGVYSEVAAYEFTTLTTVPGVIRYKGAKIQLLDLPGIIEGAKDGKGRGRQVIAVARTCNLILIVLDVLKPLGHKKIIENELEGFGIRLNSKPPNIGFKKKDKGGINLTATCPQSELDAETVKSILAEYKIHNADVTLRSDATADDLIDVVEGNRVYIPCIYVLNKIDQISIEELDIIYKVPHCVPISAHHRWNFDDLLEKIWDYLKLVRIYTKPKGQLPDYTSPVVLPYSRTTVEDFCMKIHKNLIKEFKYALVWGLSVKHNPQKVGKDHTLEDEDVIQIVKK

SEQ ID NO: 50485 - protein, 1025 aa, Homo sapiens
MRQAWKSWLIYVVVRRTKLQMQTTALEFRQRIILRVWWSTWRQRLGQVRVSRALHASALKHRALSLQVQAWSQWREQLLYVQKEKQKVVSAVKHHQHWQKRRFLKAWLEYLQVRRVKRQQNEMAERFHHVTVLQIYFCDWQQAWERRESLYAHHAQVEKLARKMALRRAFTHWKHYMLLCAEEAAQFEMAEEHHRHSQLLLHRFWNLWRSQIEQKKERELLPLLHAAWDHYRIALLCKCIELWLQYTQKRRYKQLLQARADGHFQQRALPAAFHTWNRLWRWRHQENVLSARATRFHRETLEKQVFSLWRQKMFQHRENRLAERMAILHAERQLLYRSWFMWHQQAAARHQEQEWQTVACAHHRHGRLKKAFCLWRESAQGLRTERTGRVRAAEFHMAQLLRWAWSQWRECLALRGAERQKLMRADLHHQHSVLHRALQAWVTYQGRVRSILREVAARESQHNRQLLRGALRRWKENTMARVDEAKKTFQASTHYRRTICSKVLVQWREAVSVQMYYRQQEDCAIWEAQKVLDRGCLRTWFQRWWDCSRRSAQQRLQLERAVQHHHRQLLLEGLARWKTHHLQCVRKRLLHRQSTQLLAQRLSRTCFRQWRQQLAARRQEQRATVRALWFWAFSLQAKVWATWLAFVLERRRKKARLQWALQAYQGQLLQEGATRLLRFAASMKASRQQLQAQQQVQAAHSLHRAVRRCATLWKQKVLGRGGKPQPLAAIAPSRKVTFEGPLLNRIAAGAGDGTLETKRPQASRPLGALGRLAAEEPHALELNTAHSARKQPRRPHFLLEPAQSQRPQKPQEHGLGMAQPAAPSLTRPFLAEAPTALVPHSPLPGALSSAPGPKQPPTASTGPELLLLPLSSFMPCGAAAPARVSAQRATPRDKPPVPSSLASVPDPHLLLPGDFSATRAGPGLSTAGSLDLEAELEEIQQQLLHYQTTKQNLWSCRRQASSLRRWLELNREEPGPEDQEVEQQVQKELEQVEMQIQLLAEELQAQRQPIGACVARIQALRQALC

SEQ ID NO: 50486 - protein, 991 aa, Homo sapiens
MWDFDIYGDLYFEKAVNGFLADLFTKWKEKNCSHEVTVVLFSRTFYDAKSVDEFPEINRASIRQDHKGRFYEDFYKVVVQNERREEWTSLLVTIKKLFIQYPVLVRLEQAEGFPQGDNSTSAQGNYLEAINLSFNVFDKHYINRNFDRTGQMSVVITPGVGVFEVDRLLMILTKQRMIDNGIGVDLVCMGEQPLHAVPLFKLHNRSAPRDSRLGDDYNIPHWINHSFYTSKSQLFCNSFTPRIKLAGKKPASEKAKNGRDTSLGSPKESENALPIQVDYDAYDAQVFRLPGPSRAQCLTTCRSVRERESHSRKSASSCDVSSSPSLPSRTLPTEEVRSQASDDSSLGKSANILMIPHPHLHQYEVSSSLGYTSTRDVLENMMEPPQRDSSAPGRFHVGSAESMLHVRPGGYTPQRALINPFAPSRMPMKLTSNRRRWMHTFPVGPSGEAIQIHHQTRQNMAELQGSGQRDPTHSSAELLELAYHEAAGRHSNSRQPGDGMSFLNFSGTEELSVGLLSNSGAGMNPRTQNKDSLEDSVSTSPDPILTLSAPPVVPGFCCTVGVDWKSLTTPACLPLTTDYFPDRQGLQNDYTEGCYDLLPEADIDRRDEDGVQMTAQQVFEEFICQRLMQGYQIIVQPKTQKPNPAVPPPLSSSPLYSRGLVSRNRPEEEDQYWLSMGRTFHKVTLKDKMITVTRYLPKYPYESAQIHYTYSLCPSHSDSEFVSCWVEFSHERLEEYKWNYLDQYICSAGSEDFSLIESLKFWRTRFLLLPACVTATKRITEGEAHCDIYGDRPRADEDEWQLLDGFVRFVEGLNRIRRRHRSDRMMRKGTAMKGLQMTGPISTHSLESTAPPVGKKGTSALSALLEMEASQKCLGEQQAAVHGGKSSAQSAESSSVAMTPTYMDSPRKVSVDQTATPMLDGTSLGICTGQSMDRGNSQTFGNSQNIGEQGYSSTNSSDSSSQQLVASSLTSSSTLTEILEAMKHPSSPAAL

SEQ ID NO: 50487 - protein, 391 aa, Homo sapiens
MQNEPLTPGYHGFPARDSQGNQEPTTTPDAMVQPFTTIPFPPPPQNGIPTEYGVPHTQDYAGQTGEHNLTLYGSTQAHGEQSSNSPSTQNGSLTQTEGGAQTDGQQSQTQSSENSESKSTPKRLHVSNIPFRFRDPDLRQMFGQFGKILDVEIIFNERGSKGFGFVTFENSADADRAREKLHGTVVEGRKIEVNNATARVMTNKKMVTPYANGWKLSPVVGAVYGPELYAASSFQADVSLGNDAAVPLSGRGGINTYIPLISLPLVPGFPYPTAATTAAAFRGAHLRGRGRTVYGAVRAVPPTAIPAYPGVVYQDGFYGADLYGGYAAYRYAQPATATAATAAAAAAAAYSDGYGRVYTADPYHALAPAASYGVGAVASLYRGGYSRFAPY

SEQ ID NO: 50488 - protein, 560 aa, Homo sapiens [sequence omitted]

SEQ ID NO: 50489 - protein, 143 aa, Homo sapiens [sequence omitted]

SEQ ID NO: 50490 - protein, 360 aa, Homo sapiens
MSILDEPGEPPSPSLTTTSTSQWKKHWFVLTDSSLKYYRDSTAEEADELDGEIDLRSCTDVTEYAVQRNYGFQIHTKDAVYTLSAMTSGIRRNWIEALRKTVRPTSAPDVTKLSDSNKENALHSYSTQKGPLKAGEQRAGSEVISRGGPRKADGQRQALDYVELSPLTQASPQRARTPARTPDRLAKQEELERDLAQRSEERRKWFEATDSRTPEVPAGEGPRRGLGAPLTEDQQNRLSEEIEKKWQELEKLPLRENKRVPLTALLNQSRGERRGPPSDGHEALEKEVQALRAQLEAWRLQGEAPQSALRSQEDGHIPPGYISQLVGVITVPVLQTRPLSSERLCDLPKVTPPAGLKGGI

SEQ ID NO: 50491 - protein, 581 aa, Homo sapiens [sequence omitted]

SEQ ID NO: 50492 - protein, 239 aa, Homo sapiens
MADLEAKLQEAQKHRLRLVATDGAFSMDGDIAPLQEICCLASRYGALVFMDECHATGFLGPTGRGTDELLGVMDQVTIINSTLGKALGGASGGYTTGPGPLVSLLRQRARPYLFSNSLPPAVVGCASKALDLLMGSNTIVQSMAAKTQRFRSKMEAAGFTISGASHPICPVMLGDARLASRMADDMLKRGIFVIGFSYPVVPKGKARIRVQISAVHSEEDIDRCVEAFVEVGRLHGALP

SEQ ID NO: 50493 - protein, 449 aa, Homo sapiens
MRSRTSMRTDAVFLILYKELYYRHIYAKVSGGPSLEQRFESYYNYCNLFNYILNADGPAPLELPNQWLWDIIDEFIYQFQSFSQYRCKTAKKSEEEIDFLRSNPKIWNVHSVLNVLHSLVDKSNINRQLEVYTSGGDPESVAGEYGRHSLYKMLGYFSLVGLLRLHSLLGDYYQAIKVLENIELNKKSMYSRVPECQVTTYYYVGFAYLMMRRYQDAIRVFANILLYIQRTKSMFQRTTYKYEMINKQNEQMHALLAIALTMYPMRIDESIHLQLREKYGDKMLRMQKGDPQVYEELFSYSCPKFLSPVVPNYDNVHPNYHKEPFLQQLKVFSDEVQQQAQLSTIRSFLKLYTTMPVAKLAGFLDLTEQEFRIQLLVFKHKMKNLVWTSGISALDGEFQSASEVDFYIDKDMIHIADTKVARRYGDFFIRQIHKFEELNRTLKKMGQRP

SEQ ID NO: 50494 - protein, 549 aa, Homo sapiens [sequence omitted]

SEQ ID NO: 50495 - protein, 547 aa, Homo sapiens
MDVLMDQHFTEPTPIQCQGFPLALSGRDMVGIAQTGSGKTLAYLLPAIVHINHQPYLERGDGPICLVLAPTRELAQQVQQVADDYGKCSRLKSTCIYGGAPKGPQIRDLERGVEICIATPGRLIDFLESGKTNLRRCTYLVLDEADRMLDMGFEPQIRKIVDQIRPDRQTLMWSATWPKEVRQLAEDFLRDYTQINVGNLELSANHNILQIVDVCMESEKDHKLIQLMEEIMAEKENKTIIFVETKRRCDDLTRRMRRDGWPAMCIHGDKSQPERDWVLNEFRSGKAPILIATDVASRGLDVEDVKFVINYDYPNSSEDYVHRIGRTARSTNKGTAYTFFTPGNLKQARELIKVLEEANQAINPKLMQLVDHRGGGGGGGGRSRYRTTSSANNPNLMYQDECDRRLRGVKDGGRRDSASYRDRSETDRAGYANGSGYGSPNSAFGAQAGQYTYGQGTYGAAAYGTSSYTAQEYGAGTYGASSTTSTGRSSQSSSQQFSGIGRSGQQPQPLMSQQFAQPPGATNMIGYMGQTAYQYPPPPPPPPPSRK

SEQ ID NO: 50496 - protein, 304 aa, Homo sapiens
MDVLMDQHFTEPTPIQCQGFPLALSGRDMVGIAQTGSGKTLAYLLPAIVHINHQPYLERGDGPICLVLAPTRELAQQVQQVADDYGKCSRLKSTCIYGGAPKGPQIRDLERGVEICIATPGRLIDFLESGKTNLRRCTYLVLDEADRMLDMGFEPQIRKIVDQIRPDRQTLMWSATWPKEVRQLAEDFLRDYTQINVGNLELSANHNILQIVDVCMESEKDHKLIQLMEEIMAEKENKTIIFVETKRRCDDLTRRMRRDGWPAMCIHGDKSQPERDWVLNEFRSGKAPILIATDVASRGLGLYR

SEQ ID NO: 50497 - protein, 26 aa, Homo sapiens
MLSESTAESHLMEKELDELRISRKRK

SEQ ID NO: 50498 - protein, 322 aa, Homo sapiens [sequence omitted]

SEQ ID NO: 50499 - protein, 338 aa, Homo sapiens
MAVVAVLLNNKLYVANVGTNRALLCKSTVDGLQVTQLNVDHTTENEDELFRLSQLGLDAGKIKQVGIICGQESTRRIGDYKVKYGYTDIDLLSAAKSKPIIAEPEIHGAQPLDGVTGFLVLMSEGLYKALEAAHGPGQANQEIAAMIDTEFAKQTSLDAVAQAVVDRVKRIHSDTFASGGERARFCPRHEDMTLLVRNFGYPLGEMSQPTPSPAPAAGGRVYPVSVPYSSAQSTSKTSVTLSLVMPSQGQMVNGAHSASTLDEATPTLTNQSPTLTLQSTNTHTQSSSSSSDGGLFRSRPAHSLPPGEDGRVEPYVDFAEFYRLWSVDHGEQSVVTAP

SEQ ID NO: 50500 - protein, 416 aa, Homo sapiens
MKSNLENIDFKMAAEEEKRLRHDVMAHVHTFGHCCPKAAGIIHLGATSCYVGDNTDLIILRNALDLLLPKLARVISRLADFAKERASLPTLGFTHFQPAQLTTVGKRCCLWIQDLCMDLQNLKRVRDDLRFRGVKGTTGTQASFLQLFEGDDHKVEQLDKMVTEKAGFKRAFIITGQTYTRKVDIEVLSVLASLGASVHKICTDIRLLANLKEMEEPFEKQQIGSSAMPYKRNPMRSERCCSLARHLMTLVMDPLQTASVQWFERTLDDSANRRICLAEAFLTADTILNTLQNISEGLVVYPKVIERRIRQELPFMATENIIMAMVKAGGSRQDCHEKIRVLSQQAASVVKQEGGDNDLIERIQVDAYFSPIHSQLDHLLDPSSFTGRASQQVQRFLEEEVYPLLKPYESVMKTCP

SEQ ID NO: 50501 - protein, 13 aa, Homo sapiens
MKPEEPSSSKIAG

SEQ ID NO: 50502 - protein, 258 aa, Homo sapiens [sequence omitted]

SEQ ID NO: 50503 - protein, 198 aa, Homo sapiens
MVDTVRIPPWQFERKLNDSIAEELNKKLANKVVYNVGLCICLFDITKLEDAYVFPGDGASHTKVHFRCVVFHPFLDEILIGKIKGCSPEGVHVSLGFFDDILIPPESLQQPAKFDEAEQVWVWEYETEEGAHDLYMDTGEEIRFRVVDESFVDTSPTGPSSADATTSSEELPKKEAPYTLVGSISEPGLGLLSWWTSN

SEQ ID NO: 50504 - protein, 117 aa, Homo sapiens
MVDTVRIPPWQFERKLNDSIAEELNKKLANKVVYNVGLCICLFDITKLEDAYVFPGDGASHTKVHFRCVVFHPFLDEILIGKIKGCSPEGVHGNSGPDASDKTWEHCGGRSLSRLLR

SEQ ID NO: 50505 - protein, 475 aa, Homo sapiens [sequence omitted]

SEQ ID NO: 50506 - protein, 317 aa, Homo sapiens [sequence omitted]

SEQ ID NO: 50507 - protein, 350 aa, Homo sapiens
MKKDESFLGKLGGTLARKRRAREVSDLQEEGKNAINSPMSPALVDVHPEDTQLEENEERTMIDPTSKEDPKFKELVKVLLDWINDVLVEERIIVKQLEEDLYDGQVLQKLLEKLAGCKLNVAEVTQSEIGQKQKLQTVLEAVHDLLRPRGWALRWSVDSIHGKNLVAILHLLVSLAMHFRAPIRLPEHVTVQVVVVRKREGLLHSSHISEELTTTTEMMMGRFERDAFDTLFDHAPDKLSVVKKSLITFVNKHLNKLNLEVTELETQFADGVYLVLLMGLLEDYFVPLHHFYLTPESFDQKVHNVSFAFELMLDGGLKKPKARPEDVVNLDLKSTLRVLYNLFTKYKNVE

SEQ ID NO: 50508 - protein, 303 aa, Homo sapiens
MSHNAIRFGRMPRSEKAKLKAEILTCEHDIEDSETADLKSLAKRIYEAYLKNFNMNKVKARVILSGKASNNPPFVIHDMETLCMAEKTLVAKLVANGIQNKEAEVRIFHCCQCTSVETVTELTEFAKAIPGFANLDLNDQVTLLKYGVYEAIFAMLSSVMNKDGMLVAYGNGFITREFLKSLRKPFCDIMEPKFDFAMKFNALELDDSDISLFVAAIICCGDRPGLLNVGHIEKMQEGIVHVLRLHLQSNHPDDIFLFPKLLQKMADLRQLVTEHAQLVQIIKKTESDAALHPLLQEIYRDMY

SEQ ID NO: 50509 - protein, 116 aa, Homo sapiens
MASLGAHDPQTTQELLTTLRDASESPGENCQHLLARDVGLPLCQALVEAEDGNPDRVLELLLPIRYRIVQLGGSNAQRDVFNQLLIHAALNCTSSVHKNVARGKVSLGHPGWNAVV

SEQ ID NO: 50510 - protein, 203 aa, Homo sapiens
MGMCFIGKRNFEHFLLQYLQPRPGHFISIEDNKVLGTHKGWFLYTLGQRANIGGLREPWYVVEKDSVKGDVFVAPRTDHPALYRDLLRTSRVHWIAEEPPAALVRDKMMECHFRFRHQMALVPCVLTLNQDGTVWVTAVQAVRALATGQFAVFYKGDECLGSGKILRLGPSAYTLQKGQRRAGMATESPSDSPEDGPGLSPLL

SEQ ID NO: 50511 - protein, 511 aa, Homo sapiens
MYLGEVCTATGERWELQLKGAGPTPFSRQADGRKVLRSSIREFLCSEAMFHLGVPTTRAGACVTSESTVVRDVFYDGNPKYEQCTVVLRVASTFIRFGSFEIFKSADEHTGRAGPSVGRNDIRVQLLDYVISSFYPEIQAAHASDSVQRNAAFFREVTRRTARMVAEWQCVGFCHGVLNTDNMSILGLTIDYGPFGFLDRYDPDHVCNASDNTGRYAYSKQPEVCRWNLRKLAEALQPELPLELGEAILAEEFDAEFQRHYLQKMRRKLGLVQVELEEDGALVSKLLETMHLTGADFTNTFYLLSSFPVELESPGLAEFLARLMEQCASLEELRLAFRPQMDPRQLSMMLMLAQSNPQLFALMGTRAGIARELERVEQQSRLEQLSAAELQSRNQGHWADWLQAYRARLDKDLEGAGDAAAWQAEHVRVMHANNPKYVLRNYIAQNAIEAAERGDFSEVRRVLKLLETPYHCEAGAATDAEATEADGADGRQRSYSSKPPLWAAELCVTSS

SEQ ID NO: 50512 - protein, 100 aa, Homo sapiens
MRQCGGQRSPWHADDRHYNSRAPVALQREPAHYFGYVYFRQVKDSSVKRGYFQKAFLGQLSCEVGGTCYPGPAPVFGAGVPLALCPAVPSAAKPHRPRVL

SEQ ID NO: 50513 - protein, 169 aa, Homo sapiens
MAEVGPGHTPAHPSQGAVPPSRAAAEPHLKPSPSELQTAGPAATIPARLCTRKPRLVYTQCWYVKEPKHPEIVTPWGTAARHSWRQHQMLSASERRCLPRDVEQKLGPEHTGPCLDEQGREAELARSGPSAAGPVRLKPGLVPGLFLLSCTTSPSTCLPVGQEGERGML

SEQ ID NO: 50514 - protein, 9 aa, Homo sapiens
MAAFRSVLS

SEQ ID NO: 50515 - protein, 1211 aa, Homo sapiens
MRQHDTRPETREDRTKRLFRHYTVGSYDSLTSHSDYVIDDKVAVLQKRDHEGFGFVLRGAKAETPIEEFTPTPAFPALQYLESVDVEGVAWRAGLRTGDFLIEVNGVNVVKVGHKQVVALIRQGGNRLVMKVVSVTRKPEEDGARRRAPPPPKRAPSTTLTLRSKSMTAELEELASIRRRKGEKLDEMLAAAAEPTLRPDIADADSRAATVKQRPTSRRITPAEISSLFERQGLPGPEKLPGSLRKGIPRTKSVGEDEKLASLLEGRFPRSTSMQDPVREGRGIPPPPQTAPPPPPAPYYFDSGPPPAFSPPPPPGRAYDTVRSSFKPGLEARLGAGAAGLYEPGAALGPLPYPERQKRARSMIILQDSAPESGDAPRPPPAATPPERPKRRPRPPGPDSPYANLGAFSASLFAPSKPQRRKSPLVKQLQVEDAQERAALAVGSPGPGGGSFAREPSPTHRGPRPGGLDYGAGDGPGLAFGGPGPAKDRRLEERRRSTVFLSVGAIEGSAPGADLPSLQPSRSIDERLLGTGPTAGRDLLLPSPVSALKPLVSGPSLGPSGSTFIHPLTGKPLDPSSPLALALAARERALASQAPSRSPTPVHSPDADRPGPLFVDVQARDPERGSLASPAFSPRSPAWIPVPARREAEKVPREERKSPEDKKSMILSVLDTSLQRPAGLIVVHATSNGQEPSRLGGAEEERPGTPELAPAPMQSAAVAEPLPSPRAQPPGGTPADAGPGQGSSEEEPELVFAVNLPPAQLSSSDEETREELARIGLVPPPEEFANGVLLATPLAGPGPSPTTVPSPASGKPSSEPPPAPESAADSGVEEADTRSSSDPHLETTSTISTVSSMSTLSSESGELTDTHTSFADGHTFLLEKPPVPPKPKLKSPLGKGPVTFRDPLLKQSSDSELMAQQHHAASAGLASAAGPARPRYLFQRRSKLWGDPVESRGLPGPEDDKPTVISELSSRLQQLNKDTRSLGEEPVGGLGSLLDPAKKSPIAAARCRSPMVGLRLFSSLGELSSISAQRSPGGPGGGASYSVRPSGRYPVARRAPSPVKPASLERVEGLGAGAGGAGRPFGLTPPTILKSSSLSIPHEPKEVRFVVRSVSARSRSPSPSPLPSPASGPGPGAPGPRRPFQQKPLQLWSKFDVGDWLESIHLGEHRDRFEDHEIEGAHLPALTKDDFVELGVTRVGHRMNIERALRQLDGS

SEQ ID NO: 50516 - protein, 1202 aa, Homo sapiens
MRQHDTRPETREDRTKRLFRHYTVGSYDSLTSHSDYVIDDKVAVLQKRDHEGFGFVLRGAKAETPIEEFTPTPAFPALQYLESVDVEGVAWRAGLRTGDFLIEVNGVNVVKVGHKQVVALIRQGGNRLVMKVVSVTRKPEEDGARRRAPPPPKRAPSTTLTLRSKSMTAELEELASIRRRKGEKLDEMLAAAAEPTLRPDIADADSRAATVKQRPTSRRITPAEISSLFERQGLPGPEKLPGSLRKGIPRTKSVGEDEKLASLLEGRFPRSTSMQDPVREGRGIPPPPQTAPPPPPAPYYFDSGPPPAFSPPPPPGRAYDTVRSSFKPGLEARLGAGAAGLYEPGAALGPLPYPERQKRARSMIILQDSAPESGDAPRPPPAATPPERPKRRPRPPGPDSPYANLGAFSASLFAPSKPQRRKSPLVKQLQVEDAQERAALAVGSPGPGGGSFAREPSPTHRGPRPGGLDYGAGDGPGLAFGGPGPAKDRRLEERRRSTVFLSVGAIEGSAPGADLPSLQPSRSIDERLLGTGPTAGRDLLLPSPVSALKPLVSGPSLGPSGSTFIHPLTGKPLDPSSPLALALAARERALASQAPSRSPTPVHSPDADRPGPLFVDVQARDPERGSLASPAFSPRSPAWIPVPARREAEKVPREERKSPEDKKSMILSVLDTSLQRPAGLIVVHATSNGQEPSRLGGAEEERPGTPELAPAPMQSAAVAEPLPSPRAQPPGGTPADAGPGQGSSEEEPELVFAVNLPPAQLSSSDEETREELARIGLVPPPEEFANGVLLATPLAGPGPSPTTVPSPASGKPSSEPPPAPESAADSGVEEADTRSSSDPHLETTSTISTVSSMSTLSSESGELTDTHTSFADGHTFLLEKPPVPPKPKLKSPLGKGPVTFRDPLLKQSSDSELMAQQHHAASAGLASAAGPARPRYLFQRRSKLWGDPVESRGLPGPEDDKPTVISELSSRLQQLNKDTRSLGEEPVGGLGSLLDPAKKSPIAAARLFSSLGELSSISAQRSPGGPGGGASYSVRPSGRYPVARRAPSPVKPASLERVEGLGAGAGGAGRPFGLTPPTILKSSSLSIPHEPKEVRFVVRSVSARSRSPSPSPLPSPASGPGPGAPGPRRPFQQKPLQLWSKFDVGDWLESIHLGEHRDRFEDHEIEGAHLPALTKDDFVELGVTRVGHRMNIERALRQLDGS

SEQ ID NO: 50517 - protein, 174 aa, Homo sapiens
MDSKYSTLTARVKGGDGIRIYKRNRMIMTNPIATGKDPTFDTITYEWAPPGVTQKLGLQYMELIPKEKQPVTGTEGAFYRRRQLMHQLPIYDQDPSRCRGLLENELKLMEEFVKQYKSEALGVGEVALPGQGGLPKEEGKQQEKPEGAETTAATTNGSLSDPSKEVEYKPVPLV

SEQ ID NO: 50518 - protein, 596 aa, Homo sapiens
MCVDARTFGNDARFIRRSCTPNAEVRHMIADGMIHLCIYAVSAITKDAEVTIAFDYEYSNCNYKVDCACHKGNRNCPIQKRNPNATELPLLPPPPSLPTIGAETRRRKARRKELEMEQQNEASEENNDQQSQEVPEKVTVSSDHEEVDNPEEKPEEEKEEVIDDQENLAHSRRTREDRKVEAIMHAFENLEKRKKRRDQPLEQSNSDVEITTTTSETPVGEETKTEAPESEVSNSVSNVTIPSTPQSVGVNTRRSSQAGDIAAEKLVPKPPPAKPSRPRPKSRISRYRTSSAQRLKRQKQANAQQAELSQAALEEGGSNSLVTPTEAGSLDSSGENRPLTGSDPTVVSITGSHVNRAASKYPKTKKYLVTEWLNDKAEKQECPVECPLRITTDPTVLATTLNMLPGLIHSPLICTTPKHYIRFGSPFIPERRRRPLLPDGTFSSCKKRWIKQALEEGMTQTSSVPQETRTQHLYQSNENSSSSSICKDNADLLSPLKKWKSRYLMEQNVTKLLRPLSPVTPPPPNSGSKSPQLATPGSSHPGEEECRNGYSLMFSPVTSLTTASRCNTPLQFEVIWVWLLGVLDMKIIICTFSFQI

SEQ ID NO: 50519 - protein, 278 aa, Homo sapiens
MDYYGTRLATCSSDRSVKIFDVRNGGQILIADLRGHEGPVWQVAWAHPMYGNILASCSYDRKVIIWREENGTWEKSHEHAGHDSSVNSVCWAPHDYGLILACGSSDGAISLLTYTGEGQWEVKKINNAHTIGCNAVSWAPAVVPGSLIDHPSGQKPNYIKRFASGGCDNLIKLWKEEEDGQWKEEQKLEAHSDWVRDVAWAPSIGLPTSTIASCSQDGRVFIWTCDDASSNTWSPKLLHKFNDVVWHVSWSITANILAVSGGDNKEELQMQPQIDHLP

SEQ ID NO: 50520 - protein, 84 aa, Homo sapiens
MNEPPTSLGLVPHQIRGFLSRFDNVLPVSLAFDKCTACSSKVLDQYEREGFNFLAKVFNSSHSFLEDLTGLTLLHQETQAAEHL

SEQ ID NO: 50521 - protein, 202 aa, Homo sapiens
MGKVKVENHYDFQDIASVVALTQTYATAEPFIDSKYDIRVQKIGNNYKAYMRTSISGNWKTNTGSAMLEQIAMSDRYKLWVDTCSEMFGGLDICAVKAVHGKDGKDYIFEVMDCSMPLIGEHQVEDRQLITELVISKMNQLLSRTPALSPQRPLTTQQPQSGTLKDPDSSKTPPQRPPPQGCLQYILDCNGIAVGPKQVQAS

SEQ ID NO: 50522 - protein, 266 aa, Homo sapiens
MTMVDTEMPFWPTNFGISSVDLSVMEDHSHSFDIKPFTTVDFSSISTPHYEDIPFTRTDPVVADYKYDLKLQEYQSAIKVEPASPPYYSEKTQLYNKPHEEPSNSLMAIECRVCGDKASGFHYGVHACEGCKGFFRRTIRLKLIYDRCDLNCRIHKKSRNKCQYCRFQKCLAVGMSHNAIRFGRMPQAEKEKLLAEISSDIDQLNPESADLRALAKHLYDSYIKSFPLTKAKARAILTGKTTDKSVSSLLLSSLGEAGSCFGFLFL

SEQ ID NO: 50523 - protein, 1073 aa, Homo sapiens
MLCPELPPNCIEAVVVADSCPQCGQVGCVHAGHKYAAGHTVHLPPCRACHCPDAGGELICYQLPGCHGNFSDAEEGDPERHYEDPYSYDQEVAEVEAATALGGEVQAGAVQAGAGGPPAALGGGSQPLSTIQAPPWPAVLPRPTAAAALGPPAPVQAKARRVTEDSEEEEEEEEEREEMAVTEQLAAGGHRGLDGLPTTAPAGPSLPIQEERAEAGARAEAGARPEENLILDAQATSRSTGPEGVTHAPSLGKAALVPTQAVPGSPRDPVKPSPHNILSTSLPDAAWIPPTREVPRKPQVLPHSHVEEDTDPNSVHSIPRSSPEGSTKDLIETCCAAGQQWAIDNDECLEIPESGTEDNVCRTAQRHCCVSYLQEKSCMAGVLGAKEGETCGAEDNDSCGISLYKQCCDCCGLGLRVRAEGQSCESNPNLGYPCNHVMLSCCEGEEPLIVPEVRRPPEPAAAPRRVSEAEMAGREALSLGTEAELPNSLPGDDQDECLLLPGELCQHLCINTVGSYHCACFPGFSLQDDGRTCRPEGHPPQPEAPQEPALKSEFSQVASNTIPLPLPQPNTCKDNGPCKQVCSTVGGSAICSCFPGYAIMADGVSCEDINECVTDLHTCSRGEHCVNTLGSFHCYKALTCEPGYALKDGECEDVDECAMGTHTCQPGFLCQNTKGSFYCQARQRCMDGFLQDPEGNCVDINECTSLSEPCRPGFSCINTVGSYTCQRNPLICARGYHASDDGTKCVDVNECETGVHRCGEGQVCHNLPGSYRCDCKAGFQRDAFGRGCIDVNECWASPGRLCQHTCENTLGSYRCSCASGFLLAADGKRCEDVNECEAQRCSQECANIYGSYQCYCRQGYQLAEDGHTCTDIDECAQGAGILCTFRCLNVPGSYQCACPEQGYTMTANGRSCKDVDECALGTHNCSEAETCHNIQGSFRCLRFECPPNYVQVSKTKCERTTCHDFLECQNSPARITHYQLNFQTGLLVPAHIFRIGPAPAFTGDTIALNIIKGNEEGYFGTRRLNAYTGVVYLQRAVLEPRDFALDVEMKLWRQGSVTTFLAKMHIFFTTFAL

SEQ ID NO: 50524 - protein, 1120 aa, Homo sapiens
MLCPELPPNCIEAVVVADSCPQCGQVGCVHAGHKYAAGHTVHLPPCRACHCPDAGGELICYQLPGCHGNFSDAEEGDPERHYEDPYSYDQEVAEVEAATALGGEVQAGAVQAGAGGPPAALGGGSQPLSTIQAPPWPAVLPRPTAAAALGPPAPVQAKARRVTEDSEEEEEEEEEREEMAVTEQLAAGGHRGLDGLPTTAPAGPSLPIQEERAEAGARAEAGARPEENLILDAQATSRSTGPEGVTHAPSLGKAALVPTQAVPGSPRDPVKPSPHNILSTSLPDAAWIPPTREVPRKPQVLPHSHVEEDTDPNSVHSIPRSSPEGSTKDLIETCCAAGQQWAIDNDECLEIPESGTEDNVCRTAQRHCCVSYLQEKSCMAGVLGAKEGETCGAEDNDSCGISLYKQCCDCCGLGLRVRAEGQSCESNPNLGYPCNHVMLSCCEGEEPLIVPEVRRPPEPAAAPRRVSEAEMAGREALSLGTEAELPNSLPGDDQDECLLLPGELCQHLCINTVGSYHCACFPGFSLQDDGRTCRPEGHPPQPEAPQEPALKSEFSQVASNTIPLPLPQPNTCKDNGPCKQVCSTVGGSAICSCFPGYAIMADGVSCEDQDECLMGAHDCSRRQFCVNTLGSFYCVNHTVLCADGYILNAHRKCVDINECVTDLHTCSRGEHCVNTLGSFHCYKALTCEPGYALKDGECEDVDECAMGTHTCQPGFLCQNTKGSFYCQARQRCMDGFLQDPEGNCVDINECTSLSEPCRPGFSCINTVGSYTCQRNPLICARGYHASDDGTKCVDVNECETGVHRCGEGQVCHNLPGSYRCDCKAGFQRDAFGRGCIDVNECWASPGRLCQHTCENTLGSYRCSCASGFLLAADGKRCEDVNECEAQRCSQECANIYGSYQCYCRQGYQLAEDGHTCTDIDECAQGAGILCTFRCLNVPGSYQCACPEQGYTMTANGRSCKDVDECALGTHNCSEAETCHNIQGSFRCLRFECPPNYVQVSKTKCERTTCHDFLECQNSPARITHYQLNFQTGLLVPAHIFRIGPAPAFTGDTIALNIIKGNEEGYFGTRRLNAYTGVVYLQRAVLEPRDFALDVEMKLWRQGSVTTFLAKMHIFFTTFAL

SEQ ID NO: 50525 - protein, 353 aa, Homo sapiens
MLVNIQQPLIREDGTVLLATDSKAETSQGALGTLANVVTSLANLSESLNNGDTSEIQPEDQSASEITRAFDTLAKALNTTDSSSSPSLADGIDTSGGGSIHVISRDQSTPIIEVEGPLLSDTHVTFKLTMPSPMPEYLNVHYICESASRLLFLSMHWARSIPAFQALGQDCNTSLVRACWNELFTLGLAQCAQVMSLSTILAAIVNHLQNSIQEDKLSGDRIKQVMEHIWKLQEFCNSMAKLDIDGYEYAYLKAIVLFSPDHPGLTSTSQIEKFQEKAQMELQDYVQKTYSEDTYRLARILVRLPALRLMSSNITEELFFTGLIGNVSIDSIIPYILKMETAEYNGQITGASL

SEQ ID NO: 50526 - protein, 594 aa, Homo sapiens [sequence omitted]

SEQ ID NO: 50527 - protein, 202 aa, Homo sapiens [sequence omitted]

SEQ ID NO: 50528 - protein, 158 aa, Homo sapiens
MLEAGCGVGNCLFPLLEEDPNIFAYACDFSPRAIEYVKQNPLYDTERCKVFQCDLTKDDLLDHVPPESVDVVMLIFVLSAVHPDKMHLVLQNIYKCHGCSSELRQPWDKDDFAVTWDPWSPAIRVLLCHSGWSAVAWTWLTAASTSWAQAVLPPQPLK

SEQ ID NO: 50529 - protein, 81 aa, Homo sapiens
MRNEQAACYAASAIGYLTSRPGVCLVVSGPGLIHALGGMANANMNCWPLLVIGGSSERNQETMGAFQEFPQVHGTLHVTSY

SEQ ID NO: 50530 - protein, 41 aa, Homo sapiens
MPSPQVVRWNPCLEPHRFNDTELLFLRPKFTFCTASAPPDL

SEQ ID NO: 50531 - protein, 42 aa, Homo sapiens [sequence omitted]

SEQ ID NO: 50532 - protein, 608 aa, Homo sapiens
MLQDVYHVVTLKIQLHSCPKLEDLPPEQWSHTTVRNALKDLLKDMNQSSLAKECPLSQSMISSIVNSTYYANVSAAKCQEFGRWYKHFKKTKDMMVEMDSLSELSQQGANHVNFGQQPVPGNTAEQPPSPAQLSHGSQPSVRTPLPNLHPGLVSTPISPQLVNQQLVMAQLLNQQYAVNRLLAQQSLNQQYLNHPPPVSRSMNKPLEQQVSTNTEVSSEIYQWVRDELKRAGISQAVFARVAFNRTQGLLSEILRKEEDPKTASQSLLVNLRAMQNFLQLPEAERDRIYQDERERSLNAASAMGPAPLISTPPSRPPQVKTATIATERNGKPENNTMNINASIYDEIQQEMKRAKVSQALFAKVAATKSQGWLCELLRWKEDPSPENRTLWENLSMIRRFLSLPQPERDAIYEQESNAVHHHGDRPPHIIHVPAEQIQQQQQQQQQQQQQQQAPPPPQPQQQPQTGPRLPPRQPTVASPAESDEENRQKTRPRTKISVEALGILQSFIQDVGLYPDEEAIQTLSAQLDLPKYTIIKFFQNQRYYLKHHGKLKDNSGLEVDVAEYKEEELLKDLEESVQDKNTNTLFSVKLEEELSVEGNTDINTDLKD

SEQ ID NO: 50533 - protein, 149 aa, Homo sapiens
MSLRAAVRYDPESETLTLNGEMAVTRGQLKNGGLGVVSDAIFDLGMSLSSFNLDDTEVALLQAVLLMSSDRPGLACVERIEKYQDSFLLAFEHYINYRKHHVTHFWPKLLMKVTDLRMIGACHASRFLHMKVECPTELFPPLFLEVFED

SEQ ID NO: 50534 - protein, 123 aa, Homo sapiens
MLVVYSANGEMFKLRAADAKEKQFWVTQLRACAKYHMEMNSKSAPSSRSRSLTLLPHGTPNSASPCSQRHLSVGAPGVVTITHHKSPAAARRAKSQYSGQLHEVREVHTLLTEESCLLHWFTG

SEQ ID NO: 50535 - protein, 133 aa, Homo sapiens
MDLEECILITDSTLIQLSIHCPKLQALSLSHCELITDDGILHLSNSTCGHERLRVLELDNCLLITDVALEHLENCRGLERLELYDCQQVTRAGIKRMRAQLPHVKVHAYFAPVTPPTAVAGSGQRLCRCCVIL

SEQ ID NO: 50536 - protein, 64 aa, Homo sapiens [sequence omitted]

SEQ ID NO: 50537 - protein, 672 aa, Homo sapiens
MRELERQQKEYSLHSFDRKWGQIQKWLEDSERARYSHRSSHHRPYLGVEDALSIRSVGSHRYDMFKDRSSRLSSLNHSYSHSHGMKKRSSDSHKDLLSGLYFDQRNYSSLRHSKPTSAYYTRQSSSLYSDPLATYKSDRASPTANSGLLRSASLASLYNGGLYNPYGPRTPSECSYYSSRISSARSSPGFTNDDTASIVSSDRASRGRRESVVSAADYFSRSNRRGSVVSEVDDISIPDLSSLDEKSDKQYAENYTRPSSRNSASATTPLSGNSSRRGSGDTSSLIDPDTSLSELRDIYDLKDQIQDVEGRYMQGLKELKESLSEVEEKYKKAMVSNAQLDNEKNNLIYQVDTLKDVIEEQEEQMAEFYRENEEKSKELERQKHMCSVLQHKMEELKEGLRQRDELIEEKQRMQQKIDTMTKEVFDLQETLLWKDKKIGALEKQKEYIACLRNERDMLREELADLQETVKTGEKHGLVIIPDGTPNGDVSHEPVAGAITVVSQEAAQVLESAGEGPLDVRLRKLAGEKEELLSQIRKLKLQLEEERQKCSRNDGTVGDLAGLQNGSDLQFIEMQRDANRQISEYKFKLSKAEQDITTLEQSISRLEGQVLRYKTAAENAEKVEDELKAEKRKLQRELRTALDKIEEMEMTNSHLAKRLEKMKANRTALLAQQ

SEQ ID NO: 50538 - protein, 698 aa, Homo sapiens
MRTPESQLFSIEDIQEVRMGHRTEGLEKFARDVPEDRCFSIVFKDQRNTLDLIAPSPADAQHWVLGLHKIIHHSGSMDQRQKLQHWIHSCLRKADKNKDNKMSFKELQNFLKELNIQVDDSYARKIFRECDHSQTDSLEDEEIEAFYKMLTQRVEIDRTFAEAAGSGETLSVDQLVTFLQHQQREEAAGPALALSLIERYEPSETAKAQRQMTKDGFLMYLLSADGSAFSLAHRRVYQDMGQPLSHYLVSSSHNTYLLEDQLAGPSSTEAYIRALCKGCRCLELDCWDGPNQEPIIYHGYTFTSKILFCDVLRAIRDYAFKASPYPVILSLENHCTLEQQRVMARHLHAILGPMLLNRPLDGVTNSLPSPEQLKGKILLKGKKLGGLLPPGGEGGPEATVVSDEDEAAEMEDEAVRSRVQHKPKEDKLRLAQELSDMVIYCKSVHFGGFSSPGTPGQAFYEMASFSENRALRLLQESGNGFVRHNVGHLSRIYPAGWRTDSSNYSPVEMWNGGCQIVALNFQTPGPEMDVYQGRFQDNGACGYVLKPAFLRDPNGTFNPRALAQGPWWARKRLNIRVISGQQLPKVNKNKNSIVDPKVTVEIHGVSRDVASRQTAVITNNGFNPWWDTEFAFEVVVPDLALIRFLVEDYDASSKNDFIGQSTIPLNSLKQGYRHVHLMSKNGDQHPSATLFVKISLQD

SEQ ID NO: 50539 - protein, 367 aa, Homo sapiens
MRTPESQLFSIEDIQEVRMGHRTEGLEKFARDVPEDRCFSIVFKDQRNTLDLIAPSPADAQHWVLGLHKIIHHSGSMDQRQKLQHWIHSCLRKADKNKDNKMSFKELQNFLKELNIQVDDSYARKIFRECDHSQTDSLEDEEIEAFYKMLTQRVEIDRTFAEAAGSGETLSVDQLVTFLQHQQREEAAGPALALSLIERYEPSETAKAQRQMTKDGFLMYLLSADGSAFSLAHRRVYQDMGQPLSHYLVSSSHNTYLLEDQLAGPSSTEAYIRALCKGCRCLELDCWDGPNQEPIIYHGYTFTSKILFCDVLRAIRDYAFKVGVPLAGEEWDARGGPPLLMCPWASRRPPTLSSYPWRTTAHWSSSA

SEQ ID NO: 50540 - protein, 219 aa, Homo sapiens
MRVRRRLSLFLNVRTQVAADWTALAEEMDFEYLEIRQLETQADPTGRLLDAWQGRPGASVGRLLELLTKLGRDDVLLELGPSIEEDCQKYILKQQQEEAEKPLQVAAVDSSVPRTAELAGITTLDDPLGHMPERFDAFICYCPSDIQFVQEMIRQLEQTNYRLKLCVSDRDVLPGTCVWSIASAAGWWWLSLMITCRARNVTSRPNLHSASLQVPIRSD

SEQ ID NO: 50541 - protein, 278 aa, Homo sapiens
MRVRRRLSLFLNVRTQVAADWTALAEEMDFEYLEIRQLETQADPTGRLLDAWQGRPGASVGRLLELLTKLGRDDVLLELGPSIEEDCQKYILKQQQEEAEKPLQVAAVDSSVPRTAELAGITTLDDPLGHMPERFDAFICYCPSDIQFVQEMIRQLEQTNYRLKLCVSDRDVLPGTCVWSIASELIEKRLARRPRGGCRRMVVVVSDDYLQSKECDFQTKFALSLSPGAHQKRLIPIKYKAMKKEFPSILRFITVCDYTNPCTKSWFWTRLAKALSLP

SEQ ID NO: 50542 - protein, 84 aa, Homo sapiens
MAPAGNNKFSSKAMAETFYLSNIVPQDFDNNSGYWNRIEMYCRELTERFEDVWVVSGPLTLPQTRGDGKKIVSYQSWEYPSLQF

SEQ ID NO: 50543 - protein, 599 aa, Homo sapiens
MPNTTSRRYHSLGLFPMDSLAAEIEGTMRKELQLEEAESPDITHQKRVFETVRNINQVVKQRSLTPSPMNIPGSNQSSAMNSLLSSCVSTPRSSFYGSDIGNVVLDNKTNSIILETEAADLGNDERSKKPGTPGTPGSHDLETALRRLSLRRENYLSERRFFEEEQERKLQELAEKGELRSGSLTPTESIMSLGTHSRFSEFTGFSGMSFSSRSYLPEKLQIVKPLEGSATLHHWQQLAQPHLGGILDPRPGVVTKGFRTLDVDLDEVYCLNDFEEDDTGDHISLPRLATSTPVQHPETSAHHPGKCMSQTNSTFTFTTCRILHPSDELTRVTPSLNSAPTPACGSTSHLKSTPVATPCTPRRLSLAESFTNTRESTTTMSTSLGLVWLLKERGISAAVYDPQSWDRAGRGSLLHSYTPKMAVIPSTPPNSPMQTPTSSPPSFEFKCTSPPYDNFLASKPASSILREVREKNVRSSESQTDVSVSNLNLVDKVRRFGVAKVVNSGRAHVPTLTEEQGPLLCGPPGPAPALVPRGLVPEGLPLRCPTVTSAIGGLQLNSGIRRNRSFPTMVGSSMQMKAPVTLTSGILMGAKLSKQTSLR

SEQ ID NO: 50544 - protein, 390 aa, Homo sapiens
MPNTTSRRYHSLGLFPMDSLAAEIEGTMRKELQLEEAESPDITHQKRVFETVRNINQVVKQRSLTPSPMNIPGSNQSSAMNSLLSSCVSTPRSSFYGSDIGNVVLDNKTNSIILETEAADLGNDERSKKPGTPGTPGSHDLETALRRLSLRRENYLSERRFFEEEQERKLQELAEKGELRSGSLTPTESIMSLGTHSRFSEFTGFSGMSFSSRSYLPEKLQIVKPLEGSATLHHWQQLAQPHLGGILDPRPGVVTKGFRTLDVDLDEVYCLNDFEEDDTGDHISLPRLATSTPVQHPETSGERSQARVTVSGSRSYPSRPQASPEEMQEPPAATEEEEEEEEEEGSGEGTTISPVNLAPFPEAEFWAILTSVPGTIRSGSLSVASARLCG

SEQ ID NO: 50545 - protein, 59 aa, Homo sapiens
MSKWHCGRSCAPIATEVAARAGREGEKSGVLMTSLVDHVRDLFCLRGTGKGWTAPLSLY

SEQ ID NO: 50546 - protein, 666 aa, Homo sapiens [sequence omitted]

SEQ ID NO: 50547 - protein, 481 aa, Homo sapiens
MKENSPREIAESCLFQEGGFGRITFIHKEAPPEIISQGYNFEKSLLLTSSLVTRLRVSTEESLHQWETSNIQTNDISDQSKCPTLCTQKKSWKCNECGKTFTQSSSLTQHQRTHTGERPYTCEECGKAFSRSSFLVQHQRIHTGVKPYGCEQCGKTFRCRSFLTQHQRIHTGEKPYKCNECGNSFRNHSHLTEHQRIHTGEKPYKCNRCGKAFNQNTHLIHHQRIHTGEKPYICSECGSSFRKHSNLTQHQRIHTGEKPHKCDECGKTFQTKANLSQHQRIHSGEKPYKCKECGKAFCQSPSLIKHQRIHTGEKPYKCKECGKAFTQSTPLTKHQRIHTGERPYKCSECGKAFIQSICLIRHQRSHTGEKPYKCNECGKGFNQNTCLTQHMRIHTGEKPYKCKECGKAFAHSSSLTEHHRTHTGEKLYKCSECEKTFRKYAHLSEHYRIHTGEKPYECIECGKFFRHSSVLFRHQKLHSGD

SEQ ID NO: 50548 - skipped

SEQ ID NO: 50549 - protein, 446 aa, Homo sapiens
MRPTKSRGLTPLLPKSTIQEQERHKQLKSAGIARPEEGRPVVSGTGNDITTPPNKELPPSPEKKTKPLATTQPAKTSTSKAKTQPTSLPKQPAPTTIGGLNKKPMSLASGLVPAAPPKRPAVASARPSILPSKDVKPKPIADAKAPEKRASPSKPASAPASRSGSKSTQTVAKTTTAAAVASTGPSSRSPSTLLPKKPTAIKTEGKPAEVKKMTAKSVPADLSRPKSTSTSSMKKTTTLSGTAPAAGVVPSRVKATPMPSRPSTTPFIDKKPTSAKPSSTTPRLSRLATNTSAPDLKNVRSKVGSTENIKHQPGGGRVQIQNKKVDISKVSSKCGSKANIKHKPGGGDVKIESQKLNFKEKAQAKVGSLDNVGHLPAGGAVKTEGGGSEAPLCPGPPAGEEPAISEAAPEAGAPTSASGLNGHPTLSGGGDQREAQTLDSQIQETN

SEQ ID NO: 50550 - protein, 80 aa, Homo sapiens
MFESFIESVPLLKSLEVSERMKIVDVIGEKIYKDGERIITQGEKADSFYIIESGEVSILIRSRLWMYKHSRGFWGPAWTS

SEQ ID NO: 50551 - protein, 489 aa, Homo sapiens
MNSQGSDSNEEDYDPNCEEEEEEEEDDPGDIEDYYVGVASDVEQQGADAFDPEEYQFTCLTYKESEGALNEHMTSLASVLKVSHSVAKLILVNFHWQVSEILDRYKSNSAQLLVEARVQPNPSKHVPTSHPPHHCAVCMQFVRKENLLSLACQHQFCRSCWEQHCSVLVKDGVGVGVSCMAQDCPLRTPEDFVFPLLPNEELREKYRRYLFRDYVESHYQLQLCPGADCPMVIRVQEPRARRVQCNRCNEVFCFKCRQMYHAPTDCATIRKWLTKCADDSETANYISAHTKDCPKCNICIEKNGGCNHMQCSKCKHDFCWMCLGDWKTHGSEYYECSRYKENPDIVNQSQQAQAREALKKYLFYFERWENHNKSLQLEAQTYQRIHEKIQERVMNNLGTWIDWQYLQNAAKLLAKCRYTLQYTYPYAYYMESGPRKKLFEYQQAQLEAEIENLSWKVERADSYDRGDLENQMHIAEQRRRTLLKDFHDT

SEQ ID NO: 50552 - protein, 810 aa, Homo sapiens
MIKRVQNLLGHYLIHGFRVRPEPNGDLDLEAMVAVFGSKGLRVVKISWGQGHFWELWRSGLWNMSDWIWDARWLEGNIALALGHNSVVLYDPVVGCILQEVPCTDRCTLSSACLIGDAWKELTIVAGAVSNQLLVWYPATALADNKPVAPDRRISGHVGIIFSMSYLESKGLLATASEDRSVRIWKVGDLRVPGGRVQNIGHCFGHSARVWQVKLLENYLISAGEDCVCLVWSHEGEILQAFRGHQGRGIRAIAAHERQAWVITGGDDSGIRLWHLVGRGYRGLGVSALCFKSRSRPGTLKAVTLAGSWRLLAVTDTGALYLYDVEVKCWEQLLEDKHFQSYCLLEAAPGPEGFGLCAMANGEGRVKVVPINTPTAAVDQTLFPGKVHSLSWALRGYEELLLLASGPGGVVACLEISAAPSGKAIFVKERCRYLLPPSKQRWHTCSAFLPPGDFLVCGDRRGSVLLFPSRPGLLKDPGVGGKARAGAGAPVVGSGSSGGGNAFTGLGPVSTLPSLHGKQGVTSVTCHGGYVYTTGRDGAYYQLFVRDGQLQPVLRQKSCRGMNWLAGLRIVPDGSMVILGFHANEFVVWNPRSHEKLHIVNCGGGHRSWAFSDTEAAMAFAYLKDGDVMLYRALGGCTRPHVILREGLHGREITCVKRVGTITLGPEYGVPSFMQPDDLEPGSEGPDLTDIVITCSEDTTVCVLALPTTTGSAHALTAVCNHISSVRAVAVWGIGTPGGPQDPQPGLTAHVVSAGGRAEMHCFSIMVTPDPSTPSRLACHVMHLSSHRLDEYWDRQRNRHRMVKVDPETR

SEQ ID NO: 50553 - protein, 118 aa, Homo sapiens
MEQGLYPTFPPVSSLDFSLLHDEGEWLLLFNSILPFPDLLSRTAVLDCTAPGLHIAVRTEMICKFLVQLSMDFSSYYNREPRPHLFGQMFVRLQLLRAVREVLHTGLAMLGLPPLSHI

SEQ ID NO: 50554 - protein, 94 aa, Homo sapiens [sequence omitted]

SEQ ID NO: 50555 - protein, 551 aa, Homo sapiens
MQRKRSSECLDGTLTPSDGQSMERAESPTPGMAQGMEPGAGQEGAMFVHARSYEDLTESEDGAASGDSHKEGTRGPPPLPTDMRQISQDFSELSTQLTGVARDLQEEMLPGSSEDWLEPPGAVGRPATEPPREGTTEGDEEDATEAWRLHQKHVFVLSEAGKPVYSRYGSEEALSSTMGVMVALVSFLEADKNAIRSIHADGYKVVFVRRSPLVLVAVARTRQSAQELAQELLYIYYQILSLLTGAQLSHIFQQKQNYDLRRLLSGSERITDNLLQLMARDPSFLMGAARCLPLAAAVRDTVSASLQQARARSLVFSILLARNQLVALVRRKDQFLHPIDLHLLFNLISSSSSFREGEAWTPVCLPKFNAAGFFHAHISYLEPDTDLCLLLVSTDREDFFAVSDCRRRFQERLRKRGAHLALREALRTPYYSVAQVGIPDLRHFLYKSKSSGLFTSPEIEAPYTSEEEQERLLGLYQYLHSRAHNASRPLKTIYYTGPNENLLAWVTGAFELYMCYSPLGTKASAVSAIHKLMRWIRKEEDRLFILTPLTY

SEQ ID NO: 50556 - protein, 389 aa, Homo sapiens
MQRKRSSECLDGTLTPSDGQSMERAESPTPGMAQGMEPDGYKVVFVRRSPLVLVAVARTRQSAQELAQELLYIYYQILSLLTGAQLSHIFQQKQNYDLRRLLSGSERITDNLLQLMARDPSFLMGAARCLPLAAAVRDTVSASLQQARARSLVFSILLARNQLVALVRRKDQFLHPIDLHLLFNLISSSSSFREGEAWTPVCLPKFNAAGFFHAHISYLEPDTDLCLLLVSTDREDFFAVSDCRRRFQERLRKRGAHLALREALRTPYYSVAQVGIPDLRHFLYKSKSSGLFTSPEIEAPYTSEEEQERLLGLYQYLHSRAHNASRPLKTIYYTGPNENLLAWVTGAFELYMCYSPLGTKASAVSAIHKLMRWIRKEEDRLFILTPLTY

SEQ ID NO: 50557 - protein, 312 aa, Homo sapiens
MVAVNLATGKRRNDSGDHSDHMHYYQGKKYFRDRRGGGRNSDWSSDTNRQGQQSSSDCYIYDSATGYYYDPLAGTYYDPNTQQEVYVPQDPGLPEEEEIKEKKPTSQGKSSSKKEMSKRDGKEKKDRGVTRFQENASEGKAPAEDVFKKPLPPTVKKEESPPPPKVVNPLIGLLGEYGGDSDYEEEEEEEQTPPPQPRTAQPQKREEQTKKENEEDKLTDWNKLACLLCRRQFPNKEVLIKHQQLSDLHKQNLEIHRKIKQSEQELAYLERREREGKFKGRGNDRREKLQSFDSPERKRIKYSRETDRKNKI

SEQ ID NO: 50558 - protein, 321 aa, Homo sapiens [sequence omitted]

SEQ ID NO: 50559 - protein, 174 aa, Homo sapiens
MEKKLIGCPVCIEHKKYSRNALLFNLGFVCDAQAKTCALEPIVKKLAGYLTTLELESSFVSMEESKQKLVPIMTILLEELNASGRCTLPIDESNTIHLKVIEQRPDPPVAQEYDVPVFTKDKEDFFNSQWDLTTQQILPYIDGFRHIQKISAEADVELNLVLRRCDTGVHPPGR

SEQ ID NO: 50560 - protein, 236 aa, Homo sapiens
MRDIGTAIQFLHSHNIAHRDVKPENLLYTSKEKDAVLKLTDFGFAKETTQNALQTPCYTPYYVAPEVLGPEKYDKSCDMWSLGVIMYILLCGFPPFYSNTGQAISPGMKRRIRLGQYGFPNPEWSEVSEDAKQLIRLLLKTDPTERLTITQFMNHPWINQSMVVPQTPLHTARVLQEDKDHWDEVKEEMTSALATMRVDYDQVKIKDLKTSNNRLLNKRRKKQAGSSSASQGCNNQ

SEQ ID NO: 50561 - protein, 492 aa, Homo sapiens [sequence omitted]

SEQ ID NO: 50562 - protein, 74 aa, Homo sapiens
MLEHLSSLPTQMVRAQPGDLCTPFLCLAASKPMLEHRPGAALFRARMVTVHPLSRIASWVPFSSTPRESPVHSP

SEQ ID NO: 50563 - protein, 645 aa, Homo sapiens
MKEALSTERGKTLVQKKPTMYPEWKSTFDAHIYEGRVIQIVLMRAAEEPVSEVTVGVSVLAERCKKNNGKAEFWLDLQPQAKVLMSVQYFLEDVDCKQSMRSEDEAKFPTMNRRGAIKQAKIHYIKNHEFIATFFGQPTFCSVCKDFVWGLNKQGYKCRQCNAAIHKKCIDKIIGRCTGTAANSRDTIFQKERFNIDMPHRFKVHNYMSPTFCDHCGSLLWGLVKQGLKCEDCGMNVHHKCREKVANLCGINQKLLAEALNQVTQRASRRSDSASSEPVGIYQGFEKKTGVAGEDMQDNSGTYGKIWEGSSKCNINNFIFHKVLGKGSFGKVLLGELKGRGEYFAIKALKKDVVLIDDDVECTMVEKRVLTLAAENPFLTHLICTFQTKDHLFFVMEFLNGGDLMYHIQDKGRFELYRATFYAAEIMCGLQFLHSKGIIYRDLKLDNVLLDRDGHIKIADFGMCKENIFGESRASTFCGTPDYIAPEILQGLKYTFSVDWWSFGVLLYEMLIGQSPFHGDDEDELFESIRVDTPHYPRWITKESKDILEKLFEREPTKRLGVTGNIKIHPFFKTINWTLLEKRRLEPPFRPKVKSPRDYSNFDQEFLNEKARLSYSDKNLIDSMDQSAFAGFSFVNPKFEHLLED

SEQ ID NO: 50564 - protein, 287 aa, Homo sapiens
MNLGDGLKLETELLDGKTKLILSPYEHKSKISVKMGNKAKIAKCPLRTKTGHILKSTQDTCIGSEKLLQKKPVGSETSQAKGEKNGMTFSSTKDLCKQCIDKDCLHIQKEISPATPNMQKTRNTVNTSLVGKQKPHKKHITAENMKSSLVCLTQDQLQQILMTVNQGNRSLSLTENGKEAKSQYSLYLNSISNQPKDENIMGLFKKTEMVSSVPAENKSVLNEHQETSKQCEQKIAIENEWKPADIFSTLGERECDRSSLEAKKAQWRKELVLQTVQAWYQHLLGFW

SEQ ID NO: 50565 - protein, 652 aa, Homo sapiens
MYSQELFQLSQYLQEALHREQMLEQKLATLQRLLAITQEASDTSWQALIDEDRLLSRLEVMGNQLQACSKNQTEDSLRKELIALQEDKHNYETTAKESLRRVLQEKIEVVRKLSEVERSLSNTEDECTHLKEMNERTQEELRELANKYNGAVNEIKDLSDKLKVAEGKQEEIQQKGQAEKKELQHKIDEMEEKEQELQAKIEALQADNDFTNERLTALQEHLLSKSGGDCTFIHQFIECQKKLIVEGHLTKAVEETKLSKENQTRAKESDFSDTLSPSKEKSSDDTTDAQMDEQDLNEPLAKVSLLKDDLQGAQSEIEAKQEIQHLRKELIEAQELARTSKQKCFELQALLEEERKAYRNQVEESTKQIQVLQAQLQRLHIDTENLREEKDSEITSTRDELLSARDEILLLHQAAAKVASERDTDIASLQEELKKVRAELERWRKAASEYEKEITSLQNSFQLRCQQCEDQQREEATRLQGELEKLRKEWNALETECHSLKRENVLLSSELQRQEKELHNSQKQSLELTSDLSILQMSRKELENQVGSLKEQHLRDSADLKTLLSKAENQAKDVQKEYEKTQTVLSELKLKFEMTEQEKQSITDELKQCKNNLKLLREKGNNKPWPWMPMLAALVAVTAIVLYVPGLARASP

SEQ ID NO: 50566 - protein, 587 aa, Homo sapiens
MYSQELFQLSQYLQEALHREQMLEQKLATLQRLLAITQEASDTSWQALIDEDRLLSRLEVMGNQLQACSKNQTEDSLRKELIALQEDKHNYETTAKESLRRVLQEKIEVVRKLSEVERSLSNTEDECTHLKEMNERTQEELRELANKYNGAVNEIKDLSDKLKVAEGKQEEIQQKGQAEKKELQHKIDEMEEKEQELQAKIEALQADNDFTNERLTALQEKLIVEGHLTKAVEETKLSKENQTRAKESDFSDTLSPSKEKSSDDTTDAQMDEQDLNEPLAKVSLLKALLEEERKAYRNQVEESTKQIQVLQAQLQRLHIDTENLREEKDSEITSTRDELLSARDEILLLHQAAAKVASERDTDIASLQEELKKVRAELERWRKAASEYEKEITSLQNSFQLRCQQCEDQQREEATRLQGELEKLRKEWNALETECHSLKRENVLLSSELQRQEKELHNSQKQSLELTSDLSILQMSRKELENQVGSLKEQHLRDSADLKTLLSKAENQAKDVQKEYEKTQTVLSELKLKFEMTEQEKQSITDELKQCKNNLKLLREKGNNPSILQPVPAVFIGLFLAFLFWCFGPLW

SEQ ID NO: 50567 - protein, 669 aa, Homo sapiens
MYSQELFQLSQYLQEALHREQMLEQKLATLQRLLAITQEASDTSWQALIDEDRLLSRLEVMGNQLQACSKNQTEDSLRKELIALQEDKHNYETTAKESLRRVLQEKIEVVRKLSEVERSLSNTEDECTHLKEMNERTQEELRELANKYNGAVNEIKDLSDKLKVAEGKQEEIQQKGQAEKKELQHKIDEMEEKEQELQAKIEALQADNDFTNERLTALQVRLEHLQEKTLKECSSLEHLLSKSGGDCTFIHQFIECQKKLIVEGHLTKAVEETKLSKENQTRAKESDFSDTLSPSKEKSSDDTTDAQMDEQDLNEPLAKVSLLKDDLQGAQSEIEAKQEIQHLRKELIEAQELARTSKQKCFELQALLEEERKAYRNQVEESTKQIQVLQAQLQRLHIDTENLREEKDSEITSTRDELLSARDEILLLHQAAAKVASERDTDIASLQEELKKVRAELERWRKAASEYEKEITSLQNSFQLRCQQCEDQQREEATRLQGELEKLRKEWNALETECHSLKRENVLLSSELQRQEKELHNSQKQSLELTSDLSILQMSRKELENQVGSLKEQHLRDSADLKTLLSKAENQAKDVQKEYEKTQTVLSELKLKFEMTEQEKQSITDELKQCKNNLKLLREKGNNKPWPWMPMLAALVAVTAIVLYVPGLARASP

SEQ ID NO: 50568 - protein, 683 aa, Homo sapiens
MYSQELFQLSQYLQEALHREQMLEQKLATLQRLLAITQEASDTSWQALIDEDRLLSRLEVMGNQLQACSKNQTEDSLRKELIALQEDKHNYETTAKESLRRVLQEKIEVVRKLSEVERSLSNTEDECTHLKEMNERTQEELRELANKYNGAVNEIKDLSDKLKVAEGKQEEIQQKGQAEKKELQHKIDEMEEKEQELQAKIEALQADNDFTNERLTALQVRLEHLQEKTLKECSSLGIQVDDFLPKINGSTEKEHLLSKSGGDCTFIHQFIECQKKLIVEGHLTKAVEETKLSKENQTRAKESDFSDTLSPSKEKSSDDTTDAQMDEQDLNEPLAKVSLLKDDLQGAQSEIEAKQEIQHLRKELIEAQELARTSKQKCFELQALLEEERKAYRNQVEESTKQIQVLQAQLQRLHIDTENLREEKDSEITSTRDELLSARDEILLLHQAAAKVASERDTDIASLQEELKKVRAELERWRKAASEYEKEITSLQNSFQLRCQQCEDQQREEATRLQGELEKLRKEWNALETECHSLKRENVLLSSELQRQEKELHNSQKQSLELTSDLSILQMSRKELENQVGSLKEQHLRDSADLKTLLSKAENQAKDVQKEYEKTQTVLSELKLKFEMTEQEKQSITDELKQCKNNLKLLREKGNNPSILQPVPAVFIGLFLAFLFWCFGPLW

SEQ ID NO: 50569 - protein, 554 aa, Homo sapiens [sequence omitted]

SEQ ID NO: 50570 - protein, 575 aa, Homo sapiens [sequence omitted]

SEQ ID NO: 50571 - protein, 560 aa, Homo sapiens
MEKPPAGKVLLDDTVPLTAAIEASQSLQSHTIVRRYSDFDLLNNSLQIAGLSLPLPPKKLIGNMDREFIAERQKGLQNYLNVITTNHILSNCELVKKFLDPNNYSANYTEIALQQVSMFFRSEPKWEVVEPLKDIGWRIRKKYFLMKIKNQPKERLVLSWADLGPDKYLSDKDFQCLIKLLPSCLHPYIYRVTFATANESSALLIRMFNEKGTLKDLIYKAKPKDPFLKKYCNPKKIQGLELQQIKTYGRQILEVLKFLHDKGFPYGHLHASNVMLDGDTCRLLDLENSLLGLPSFYRSYFSQFRKINTLESVDVHCFGHLLYEMTYGRPPDSVPVDSFPPAPSMAVVAVLESTLSCEACKNGMPTISRLLQMPLFSDVLLTTSEKPQFKIPTKLKEALRIAKECIEKRLIEEQKQIHQHRRLTRAQSHHGSEEERKKRKILARKKSKRSALENSEEHSAKYSNSNNSGSGASSPLTSPSSPTPPSTSAALGLSKRCKERDICITSTSSTSTTTSSSLASCEHRGTCPALVSGCEWHEPRGLAQLHPEFPKRNFEESQNL

SEQ ID NO: 50572 - protein, 1532 aa, Homo sapiens
MLLPSGSLFFLRIVHGRKSRPDEGVYVCVARNYLGEAVSHNASLEVAILRDDFRQNPSDVMVAVGEPAVMECQPPRGHPEPTISWKKDGSPLDDKDERITIRGGKLMITYTRKSDAGKYVCVGTNMVGERESEVAELTVLERPSFVKRPSNLAVTVDDSAEFKCEARGDPVPTVRWRKDDGELPKSRYEIRDDHTLKIRKVTAGDMGSYTCVAENMVGKAEASATLTVQEPPHFVVKPRDQVVALGRTVTFQCEATGNPQPAIFWRREGSQNLLFSYQPPQSSSRFSVSQTGDLTITNVQRSDVGYYICQTLNVAGSIITKAYLEVTDVIADRPPPVIRQGPVNQTVAVDGTFVLSCVATGSPVPTILWRKDGVLVSTQDSRIKQLENGVLQIRYAKLGDTGRYTCIASTPSGEATWSAYIEVQEFGVPVQPPRPTDPNLIPSAPSKPEVTDVSRNTVTLSWQPNLNSGATPTSYIIEAFSHASGSSWQTVAENVKTETSAIKGLKPNAIYLFLVRAANAYGISDPSQISDPVKTQDVLPTSQGVDHKQVQRELGNAVLHLHNPTVLSSSSIEVHWTVDQQSQYIQGYKILYRPSGANHGESDWLVFEVRTPAKNSVVIPDLRKGVNYEIKARPFFNEFQGADSEIKFAKTLEEAPSAPPQGVTVSKNDGNGTAILVSWQPPPEDTQNGMVQEYKVWCLGNETRYHINKTVDGSTFSVVIPFLVPGIRYSVEVAASTGAGSGVKSEPQFIQLDAHGNPVSPEDQVSLAQQISDVVKQPAFIAGIGAACWIILMVFSIWLYRHRKKRNGLTSTYAGIRKVPSFTFTPTVTYQRGGEAVSSGGRPGLLNISEPAAQPWLADTWPNTGNNHNDCSISCCTAGNGNSDSNLTTYSRPADCIANYNNQLDNKQTNLMLPESTVYGDVDLSNKINEMKTFNSPNLKDGRFVNPSGQPTPYATTQLIQSNLSNNMNNGSGDSGEKHWKPLGQQKQEVAPVQYNIVEQNKLNKDYRANDTVPPTIPYNQSYDQNTGGSYNSSDRGSSTSGSQGHKKGARTPKVPKQGGMNWADLLPPPPAHPPPHSNSEEYNISVDESYDQEMPCPVPPARMYLQQDELEEEEDERGPTPPVRGAASSPAAVSYSHQSTATLTPSPQEELQPMLQDCPEETGHMQHQPDRRRQPVSPPPPPRPISPPHTYGYISGPLVSDMDTDAPEEEEDEADMEVAKMQTRRLLLRGLEQTPASSVGDLESSVTGSMINGWGSASEEDNISSGRSSVSSSDGSFFTDADFAQAVAAAAEYAGLKVARRQMQDAAGRRHFHASQCPRPTSPVSTDSNMSAAVMQKTRPAKKLKHQPGHLRRETYTDDLPPPPVPPPAIKSPTAQSKTQLEVRPVVVPKLPSMDARTDRSSDRKGSSYKGREVLDGRQVVDMRTNPGDPREAQEQQNDGKGRGNKAAKRDLPPAKTHLIQEDILPYCRPTFPTSNNPRDPSSSSSMSSRGSGSRQREQANVGRRNIAEMQVLGGYERGEDNNEELEETES

SEQ ID NO: 50573 - protein, 1471 aa, Homo sapiens
MLLPSGSLFFLRIVHGRKSRPDEGVYVCVARNYLGEAVSHNASLEVAILRDDFRQNPSDVMVAVGEPAVMECQPPRGHPEPTISWKKDGSPLDDKDERITIRGGKLMITYTRKSDAGKYVCVGTNMVGERESEVAELTVLERPSFVKRPSNLAVTVDDSAEFKCEARGDPVPTVRWRKDDGELPKSRYEIRDDHTLKIRKVTAGDMGSYTCVAENMVGKAEASATLTVQVGSEPPHFVVKPRDQVVALGRTVTFQCEATGNPQPAIFWRREGSQNLLFSYQPPQSSSRFSVSQTGDLTITNVQRSDVGYYICQTLNVAGSIITKAYLEVTDVIADRPPPVIRQGPVNQTVAVDGTFVLSCVATGSPVPTILWRKDGVLVSTQDSRIKQLENGVLQIRYAKLGDTGRYTCIASTPSGEATWSAYIEVQEFGVPVQPPRPTDPNLIPSAPSKPEVTDVSRNTVTLSWQPNLNSGATPTSYIIEAFSHASGSSWQTVAENVKTETSAIKGLKPNAIYLFLVRAANAYGISDPSQISDPVKTQDVLPTSQGVDHKQVQRELGNAVLHLHNPTVLSSSSIEVHWTVDQQSQYIQGYKILYRPSGANHGESDWLVFEVRTPAKNSVVIPDLRKGVNYEIKARPFFNEFQGADSEIKFAKTLEEAPSAPPQGVTVSKNDGNGTAILVSWQPPPEDTQNGMVQEYKVWCLGNETRYHINKTVDGSTFSVVIPFLVPGIRYSVEVAASTGAGSGVKSEPQFIQLDAHGNPVSPEDQVSLAQQISDVVKQPAFIAGIGAACWIILMVFSIWLYRHRKKRNGLTSTYAGIRKVTYQRGGEAVSSGGRPGLLNISEPAAQPWLADTWPNTGNNHNDCSISCCTAGNGNSDSNLTTYSRPGQPTPYATTQLIQSNLSNNMNNGSGDSGEKHWKPLGQQKQEVAPVQYNIVEQNKLNKDYRANDTVPPTIPYNQSYDQNTGGSYNSSDRGSSTSGSQGHKKGARTPKVPKQGGMNWADLLPPPPAHPPPHSNSEEYNISVDESYDQEMPCPVPPARMYLQQDELEEEEDERGPTPPVRGAASSPAAVSYSHQSTATLTPSPQEELQPMLQDCPEETGHMQHQPDRRRQPVSPPPPPRPISPPHTYGYISGPLVSDMDTDAPEEEEDEADMEVAKMQTRRLLLRGLEQTPASSVGDLESSVTGSMINGWGSASEEDNISSGRSSVSSSDGSFFTDADFAQAVAAAAEYAGLKVARRQMQDAAGRRHFHASQCPRPTSPVSTDSNMSAAVMQKTRPAKKLKHQPGHLRRETYTDDLPPPPVPPPAIKSPTAQSKTQLEVRPVVVPKLPSMDARTDRSSDRKGSSYKGREVLDGRQVVDMRTNPGDPREAQEQQNDGKGRGNKAAKRDLPPAKTHLIQEDILPYCRPTFPTSNNPRDPSSSSSMSSRGSGSRQREQANVGRRNIAEMQVLGGYERGEDNNEELEETES

SEQ ID NO: 50574 - protein, 1526 aa, Homo sapiens
MLLPSGSLFFLRIVHGRKSRPDEGVYVCVARNYLGEAVSHNASLEVAILRDDFRQNPSDVMVAVGEPAVMECQPPRGHPEPTISWKKDGSPLDDKDERITIRGGKLMITYTRKSDAGKYVCVGTNMVGERESEVAELTVLERPSFVKRPSNLAVTVDDSAEFKCEARGDPVPTVRWRKDDGELPKSRYEIRDDHTLKIRKVTAGDMGSYTCVAENMVGKAEASATLTVQVGSEPPHFVVKPRDQVVALGRTVTFQCEATGNPQPAIFWRREGSQNLLFSYQPPQSSSRFSVSQTGDLTITNVQRSDVGYYICQTLNVAGSIITKAYLEVTDVIADRPPPVIRQGPVNQTVAVDGTFVLSCVATGSPVPTILWRKDGVLVSTQDSRIKQLENGVLQIRYAKLGDTGRYTCIASTPSGEATWSAYIEVQEFGVPVQPPRPTDPNLIPSAPSKPEVTDVSRNTVTLSWQPNLNSGATPTSYIIEAFSHASGSSWQTVAENVKTETSAIKGLKPNAIYLFLVRAANAYGISDPSQISDPVKTQDVLPTSQGVDHKQVQRELGNAVLHLHNPTVLSSSSIEVHWTVDQQSQYIQGYKILYRPSGANHGESDWLVFEVRTPAKNSVVIPDLRKGVNYEIKARPFFNEFQGADSEIKFAKTLEEAPSAPPQGVTVSKNDGNGTAILVSWQPPPEDTQNGMVQEYKVWCLGNETRYHINKTVDGSTFSVVIPFLVPGIRYSVEVAASTGAGSGVKSEPQFIQLDAHGNPVSPEDQVSLAQQISDVVKQPAFIAGIGAACWIILMVFSIWLYRHRKKRNGLTSTYAGIRKVTYQRGGEAVSSGGRPGLLNISEPAAQPWLADTWPNTGNNHNDCSISCCTAGNGNSDSNLTTYSRPADCIANYNNQLDNKQTNLMLPESTVYGDVDLSNKINEMKTFNSPNLKDGRFVNPSGQPTPYATTQLIQSNLSNNMNNGSGDSGEKHWKPLGQQKQEVAPVQYNIVEQNKLNKDYRANDTVPPTIPYNQSYDQNTGGSYNSSDRGSSTSGSQGHKKGARTPKVPKQGGMNWADLLPPPPAHPPPHSNSEEYNISVDESYDQEMPCPVPPARMYLQQDELEEEEDERGPTPPVRGAASSPAAVSYSHQSTATLTPSPQEELQPMLQDCPEETGHMQHQPDRRRQPVSPPPPPRPISPPHTYGYISGPLVSDMDTDAPEEEEDEADMEVAKMQTRRLLLRGLEQTPASSVGDLESSVTGSMINGWGSASEEDNISSGRSSVSSSDGSFFTDADFAQAVAAAAEYAGLKVARRQMQDAAGRRHFHASQCPRPTSPVSTDSNMSAAVMQKTRPAKKLKHQPGHLRRETYTDDLPPPPVPPPAIKSPTAQSKTQLEVRPVVVPKLPSMDARTDRSSDRKGSSYKGREVLDGRQVVDMRTNPGDPREAQEQQNDGKGRGNKAAKRDLPPAKTHLIQEDILPYCRPTFPTSNNPRDPSSSSSMSSRGSGSRQREQANVGRRNIAEMQVLGGYERGEDNNEELEETES

SEQ ID NO: 50575 - protein, 200 aa, Homo sapiens
MGLTPLWRDSSALSSQRNSFPTSFWTSSYQPPPAPCLGGVHPDFQVTGPPGTFSAADPSPWPGHNLHQTGPAPPPAVSESWPYPLTSQVSPSYSHMHDVYMRHHHPHAHMHHRHRHHHHHHHPPAGSALDPSYGPLLMPSVHAARIPAPQCDITKTEPTTVTSATSAWAGAFHGTVDIVPSVGFDTGLQHQDKSKESPWY

SEQ ID NO: 50576 - protein, 94 aa, Homo sapiens
MLKGEKSDEDKDKEGEALEVKENSGYLKAKQYMEEENYDKIISECSKEIDAEGKYMAEALLLRATFYLLIGNANAAKPDLDKVISLKEANVKVH

SEQ ID NO: 50577 - protein, 930 aa, Homo sapiens
MDKVVRLCQNPKLQLKNSPPYILDILPDTYQHLRLILSKYDDNQKLAQLSENEYFKIYIDSLMKKSKRAIRLFKEGKERMYEEQSQDRRNLTKLSLIFSHMLAEIKAIFPNGQFQGDNFRITKADAAEFWRKFFGDKTIVPWKVFRQCLHEVHQISSGLEAMALKSTIDLTCNDYISVFEFDIFTRLFQPWGSILRNWNFLAVTHPGYMAFLTYDEVKARLQKYSTKPGSYIFRLSCTRLGQWAIGYVTGDGNILQTIPHNKPLFQALIDGSREGFYLYPDGRSYNPDLTGLCEPTPHDHIKVTQEQYELYCEMGSTFQLCKICAENDKDVKIEPCGHLMCTSCLTAWQESDGQGCPFCRCEIKGTEPIIVDPFDPRDEGSRCCSIIDPFGMPMLDLDDDDDREESLMMNRLANVRKCTDRQNSPVTSPGSSPLAQRRKPQPDPLQIPHLSLPPVPPRLDLIQKGIVRSPCGSPTGSPKSSPCMVRKQDKPLPAPPPPLRDPPPPPPERPPPIPPDNRLSRHIHHVESVPSRDPPMPLEAWCPRDVFGTNQLVGCRLLGEGSPKPGITASSNVNGRHSRVGSDPVLMRKHRRHDLPLEGAKVFSNGHLGSEEYDVPPRLSPPPPVTTLLPSIKCTGPLANSLSEKTRDPVEEDDDEYKIPSSHPVSLNSQPSHCHNVKPPVRSCDNGHCMLNGTHGPSSEKKSNIPDLSIYLKGDVFDSASDPVPLPPARPPTRDNPKHGSSLNRTPSDYDLLIPPLGEDAFDALPPSLPPPPPPARHSLIEHSKPPGSSSRPSSGQDLFLLPSDPFVDLASGQVPLPPARRLPGENVKTNRTSQDYDQLPSCSDGSQAPARPPKPRPRRTAPEIHHRKPHGPEAALENVDAKIAKLMGEGYAFEEVKRALEIAQNNVEVARSILREFAFPPPVSPRLNL

SEQ ID NO: 50578 - protein, 810 aa, Homo sapiens
MAKEYKDAFMKANPGYKWCPTTNKPVKSPTPTVNPRKKLWAFPSDSSRDLPSPKKAKTEEMPQLNFGMADPTQMGGLSMLLLAGEHALGTPEVSSGTCRPDVSESPELRQKSPLFQFAEISSSTSHSDASTKQCQTSALFQFAEISSNTSQLGGAEPVKRCGKSALFQLAEMCLASEGMKMEESKLIKAKESDGGRIKELEKGKEEKEIKMEKTDETRLQKEAEFEKSAKENLRDSKELRNFEALQIDDIMAIKMEDPKEIRKEELEEDHKCSHFPDFSYSASSKIIISDVPSRKDHMCHPHGIMIIEDPAALNKPEKLKKKKKKSKMDRHGNDKSTPKKTCKKRQSSESDIESVIYTIEAVAKGDWGIEKLGDTPRKKVRTSSSGKGSILDAKPPKKKVKSREKKMSKEKSSDTTKESRPPDFISISASKNISGETPEGIKAEPLTPMEDALPPSLSGQAKPEDSDCHRKIETCGSRKSERSCKGALYKTLVSEGMLTSLRANVDRGKRSSGKGNSSDHEGCWNEESWTFSQSGTSGSKKFKKTKPKEDCLLGSAKLDEEFEKKFNSLPQYSPVTFDRKCVPVPRKKKKTGNVSSEPTKTSKGPFQSQKKNLFHKIVSKYKHKKEKPNVPEKGSGDKWSNKQLFLDAIHPTEAIFSEDRNTMEPVHKVKNIPSIFNTPEPTTTQEPLVGSQKRKARKTKITHLVRTADGRVSPAGGTLDDKPKEQLQRSLPKATETDCNDKCSHNTEVGETRSSTPEMPAVSAFFSLAALAEVAAMENVHRGQRSTPLTHDGQPKEMPQAPVLISCADQ

SEQ ID NO: 50579 - protein, 780 aa, Homo sapiens
MAKEYKDAFMKANPGYKWCPTTNKPVKSPTPTVNPRKKLWAFPSDSSRDLPSPKKAKTEEMPQLNFGMADPTQMGGLSMLLLAGEHALGTPEVSSGTCRPDVSESPELRQKSPLFQFAEISSSTSHSDASTKQCQTSALFQFAEISSNTSQLGGAEPVKRCGKSALFQLAEMCLASEGMKMEESKLIKAKESDGGRIKELEKGKEEKEIKMEKTDETRLQKEAEFEKSAKENLRDSKELRNFEALQIDDIMAIKMEDPKEIRKEELEEDHKCSHFPDFSYSASSKIIISDVPSRKDHMCHPHGIMIIEDPAALNKPEKLKKKKKKSKMDRHGNDKSTPKKTCKKRQSSESDIESVIYTIEAVAKGDWGIEKLGDTPRKKVRTSSSGKGSILDAKPPKKKVKSREKKMSKEKSSDTTKESRPPDFISISASKNISGETPEGIKAEPLTPMEDALPPSLSGQAKPEDSDCHRKIETCGSRKSERSCKGALYKTLVSEGMLTSLRANVDRGKRSSGKGNSSDHEGCWNEESWTFSQSGTSGSKKFKKTKPKEDCLLGSAKLDEEFEKKFNSLPQYSPVTFDRKCVPVPRKKKKTGNVSSEPTKTSKGSGDKWSNKQLFLDAIHPTEAIFSEDRNTMEPVHKVKNIPSIFNTPEPTTTQEPLVGSQKRKARKTKITHLVRTADGRVSPAGGTLDDKPKEQLQRSLPKATETDCNDKCSHNTEVGETRSSTPEMPAVSAFFSLAALAEVAAMENVHRGQRSTPLTHDGQPKEMPQAPVLISCADQ

SEQ ID NO: 50580 - protein, 101 aa, Homo sapiens
MQKESQIDVLQQDELDSYPDSVKKENKNPVNNLIRKDYLEEPEKTQWNNVENLNRFERPMDYYEDLKMGMKFVSDEHYDENEDDLVSHVDGSVISRREWYV

SEQ ID NO: 50581 - protein, 1106 aa, Homo sapiens
MKPPTPLLNTTSSLSGYPLGRADFDHYTGRDSERALRLSEKPPYSKYSSRHKSHDNVYSLGGLEGRKASGSLLAMWNGSSLSDAGPPPISRSGAASMPSSPKQARKMSIQDSLALQPKLTRHKELASENINLRTRKYSSSSLSHMGAYSRSLPRLYRATENQLTPLSLPPRNSLGNSKRTKLGEKDLPHSVIDNDNYLNFSSLSSGALPYKTSASEGNPYVSSTLSVPASPRVARKMLLASTSSCASDDFDQASYVGTNPSHSLLAGESDRVFATRRNFSCGSVEFDEADLESLRQASGTPQPALRERKSSISSISGRDDLMDYHRRQREERLREQEMERLERQRLETILSLCAEYTKPDSRLSTGTTVEDVQKINKELEKLQLSDEESVFEEALMSPDTRYRCHRKDSLPDADLASCGSLSQSSASFFTPRSTRNDELLSDLTRTPPPPSSTFPKASSESSYLSILPKTPEGISEEQRSQELAAMEETRIVILNNLEELKQKIKDINDQMDESFRELDMECALLDGEQKSETTELMKEKEILDHLNRKIAELEKNIVGEKTKDADLLDVESKHFEDLEFQQLEHESRLDEEKENLTQQLLREVAEYQRNIVSRKEKISALKKQANHIVQQAQREQDHFVKEKNNLIMMLQREKENLCNLEKKYSSLSGGKGFPVNPNTLKEGYISVNEINEPCGNSTNLSPSTQFPADADAVATEPATAVLASQPQSKEHFRSLEERKKQHKEGLYLSDTLPRKKTTSSISPHFSSATMGRSITPKAHLPLGQSNSCGSVLPPSLAAMAKDSESRRMLRGYNHQQMSEGHRQKSEFYNRTASESNVYLNSFHYPDHSYKDQAFDTLSLDSSDSMETSISACSPDNISSASTSNIARIEEMERLLKQAHAEKTRLLESREREMEAKKRALEEEKRRREILEKRLQEETSQRQKLIEKEVKIRERQRAQARPLTRYLPVRKEDFDLRSHVETAGHNIDTCYHVSITEKTCRGFLIKMGGKIKTWKKRWFVFDRNKRTFSYYADKHETKLKGVIYFQAIEEVYYDHLKNANKSPNPLLTFSVKTHDRIYYMVAPSPEAMRIWMDVIVTGAEGYTHFLL

SEQ ID NO: 50582 - protein, 1149 aa, Homo sapiens
MKPPTPLLNTTSSLSGYPLGRADFDHYTGRDSERALRLSEKPPYSKYSSRHKSHDNVYSLGGLEGRKASGSLLAMWNGSSLSDAGPPPISRSGAASMPSSPKQARKMSIQDSLALQPKLTRHKELASENINLRTRKYSSSSLSHMGAYSRSLPRLYRATENQLTPLSLPPRNSLGNSKRTKLGEKDLPHSVIDNDNYLNFSSLSSGALPYKTSASEGNPYVSSTLSVPASPRVARKMLLASTSSCASDDFDQASYVGTNPSHSLLAGESDRVFATRRNFSCGSVEFDEADLESLRQASGTPQPALRERKSSISSISGRDDLMDYHRRQREERLREQEMERLERQRLETILSLCAEYTKPDSRLSTGTTVEDVQKINKELEKLQLSDEESVFEEALMSPDTRYRCHRKDSLPDADLASCGSLSQSSASFFTPRSTRNDELLSDLTRTPPPPSSTFPKASSESSYLSILPKTPEGISEEQRSQELAAMEETRIVILNNLEELKQKIKDINDQMDESFRELDMECALLDGEQKSETTELMKEKEILDHLNRKIAELEKNIVGEKTKEKVKLDAEREKLERLQELYSEQKTQLDNCPESMREQLQQQLKRDADLLDVESKHFEDLEFQQLEHESRLDEEKENLTQQLLREVAEYQRNIVSRKEKISALKKQANHIVQQAQREQDHFVKEKNNLIMMLQREKENLCNLEKKYSSLSGGKGFPVNPNTLKEGYISVNEINEPCGNSTNLSPSTQFPADADAVATEPATAVLASQPQSKEHFRSLEERKKQHKEGLYLSDTLPRKKTTSSISPHFSSATMGRSITPKAHLPLGQSNSCGSVLPPSLAAMAKDSESRRMLRGYNHQQMSEGHRQKSEFYNRTASESNVYLNSFHYPDHSYKDQAFDTLSLDSSDSMETSISACSPDNISSASTSNIARIEEMERLLKQAHAEKTRLLESREREMEAKKRALEEEKRRREILEKRLQEETSQRQKLIEKEVKIRERQRAQARPLTRYLPVRKEDFDLRSHVETAGHNIDTCYHVSITEKTCRGFLIKMGGKIKTWKKRWFVFDRNKRTFSYYADKHETKLKGVIYFQAIEEVYYDHLKNANKSPNPLLTFSVKTHDRIYYMVAPSPEAMRIWMDVIVTGAEGYTHFLL

SEQ ID NO: 50583 - protein, 415 aa, Homo sapiens
MKPPTPLLNTTSSLSGYPLGRADFDHYTGRDSERALRLSEKPPYSKYSSRHKSHDNVYSLGGLEGRKASGSLLAMWNGSSLSDAGPPPISRSGAASMPSSPKQARKMSIQDSLALQPKLTRHKELASENINLRTRKYSSSSLSHMGAYSRSLPRLYRATENQLTPLSLPPRNSLGNSKRTKLGEKDLPHSVIDNDNYLNFSSLSSGALPYKTSASEGNPYVSSTLSVPASPRVARKMLLASTSSCASDDFDQASYVGTNPSHSLLAGESDRVFATRRNFSCGSVEFDEADLESLRQASGTPQPALRERKSSISSISGRDDLMDYHRRQREERLREQEMERLVIFISTVIDLTVSLTSIYRAALEMDSRICGNIGYSCSLATAAIFLFSPAILLLPISLLIGLFGYLEGLQELMLI

SEQ ID NO: 50584 - protein, 1104 aa, Homo sapiens
MRPEVTLACLLLATAGCFADLNEVPQVTVQPASTVQKPGGTVILGCVVEPPRMNVTWRLNGKELNGSDDALGVLITHGTLVITALNNHTVGRYQCVARMPAGAVASVPATVTLANLQDFKLDVQHVIEVDEGNTAVIACHLPESHPKAQVRYSVKQEWLEASRGNYLIMPSGNLQIVNASQEDEGMYKCAAYNPVTQEVKTSGSSDRLRVRRSTAEAARIIYPPEAQTIIVTKGQSLILECVASGIPPPRVTWAKDGSSVTGYNKTRFLLSNLLIDTTSEEDSGTYRCMADNGVGQPGAAVILYNVQVFEPPEVTMELSQLVIPWGQSAKLTCEVRGNPPPSVLWLRNAVPLISSQRLRLSRRALRVLSMGPEDEGVYQCMAENEVGSAHAVVQLRTSRPSITPRLWQDAELATGTPPVSPSKLGNPEQMLRGQPALPRPPTSVGPASPQCPGEKGQGAPAEAPIILSSPRTSKTDSYELVWRPRHEGSGRAPILYYVVKHRKQVTNSSDDWTISGIPANQHRLTLTRLDPGSLYEVEMAAYNCAGEGQTAMVTFRTGRRPKPEIMASKEQQIQRDDPGASPQSSSQPDHGRLSPPEAPDRPTISTASETSVYVTWIPRGNGGFPIQSFRVEYKKLKKVGDWILATSAIPPSRLSVEITGLEKGTSYKFRVRALNMLGESEPSAPSRPYVVSGYSGRVYERPVAGPYITFTDAVNETTIMLKWMYIPASNNNTPIHGFYIYYRPTDSDNDSDYKKDMVEGDKYWHSISHLQPETSYDIKMQCFNEGGESEFSNVMICETKARKSSGQPGRLPPPTLAPPQPPLPETIERPVGTGAMVARSSDLPYLIVGVVLGSIVLIIVTFIPFCLWRAWSKQKHTTDLGFPRSALPPSCPYTMVPLGGLPGHQASGQPYLSGISGRACANGIHMNRGCPSAAVGYPGMKPQQHCPGELQQQSDTSSLLRQTHLGNGYDPQSHQITRGPKSSPDEGSFLYTLPDDSTHQLLQPHHDCCQRQEQPAAVGQSGVRRAPDSPVLEAVWDPPFHSGPPCCLGLVPVEEVDSPDSCQVSGGDWCPQHPVGAYVGQEPGMQLSPGPLVRVSFETPPLTI

SEQ ID NO: 50585 - protein, 146 aa, Homo sapiens [sequence omitted]

SEQ ID NO: 50586 - protein, 1103 aa, Homo sapiens
MRPEVTLACLLLATAGCFADLNEVPQVTVQPASTVQKPGGTVILGCVVEPPRMNVTWRLNGKELNGSDDALGVLITHGTLVITALNNHTVGRYQCVARMPAGAVASVPATVTLANLQDFKLDVQHVIEVDEGNTAVIACHLPESHPKAQVRYSVKQEWLEASRGNYLIMPSGNLQIVNASQEDEGMYKCAAYNPVTQEVKTSGSSDRLRVRRSTAEAARIIYPPEAQTIIVTKGQSLILECVASGIPPPRVTWAKDGSSVTGYNKTRFLLSNLLIDTTSEEDSGTYRCMADNGVGQPGAAVILYNVQVFEPPEVTMELSQLVIPWGQSAKLTCEVRGNPPPSVLWLRNAVPLISSQRLRLSRRALRVLSMGPEDEGVYQCMAENEVGSAHAVVQLRTSRPSITPRLWQDAELATGTPPVSPSKLGNPEQMLRGQPALPRPPTSVGPASPQCPGEKGQGAPAEAPIILSSPRTSKTDSYELVWRPRHEGSGRAPILYYVVKHRKVTNSSDDWTISGIPANQHRLTLTRLDPGSLYEVEMAAYNCAGEGQTAMVTFRTGRRPKPEIMASKEQQIQRDDPGASPQSSSQPDHGRLSPPEAPDRPTISTASETSVYVTWIPRGNGGFPIQSFRVEYKKLKKVGDWILATSAIPPSRLSVEITGLEKGTSYKFRVRALNMLGESEPSAPSRPYVVSGYSGRVYERPVAGPYITFTDAVNETTIMLKWMYIPASNNNTPIHGFYIYYRPTDSDNDSDYKKDMVEGDKYWHSISHLQPETSYDIKMQCFNEGGESEFSNVMICETKARKSSGQPGRLPPPTLAPPQPPLPETIERPVGTGAMVARSSDLPYLIVGVVLGSIVLIIVTFIPFCLWRAWSKQKHTTDLGFPRSALPPSCPYTMVPLGGLPGHQASGQPYLSGISGRACANGIHMNRGCPSAAVGYPGMKPQQHCPGELQQQSDTSSLLRQTHLGNGYDPQSHQITRGPKSSPDEGSFLYTLPDDSTHQLLQPHHDCCQRQEQPAAVGQSGVRRAPDSPVLEAVWDPPFHSGPPCCLGLVPVEEVDSPDSCQVSGGDWCPQHPVGAYVGQEPGMQLSPGPLVRVSFETPPLTI

SEQ ID NO: 50587 - protein, 3234 aa, Homo sapiens
MRAPLDPELHQESDMEFNNTTQEDVQERLAYAEQLVVELKDIIRQKDVQLQQKDEALQEERKAADNKIKKLKLHAKAKLTSLNKYIEEMKAQGGTVLPTEPQSEEQLSKHDKSSTEEEMEIEKIKHKLQEKEELISTLQAQLTQAQAEQPAQSSTEMEEFVMMKQQLQEKEEFISTLQAQLSQTQAEQAAQQVVREKDARFETQVRLHEDELLQLVTQADVETEMQQKLRVLQRKLEEHEESLVGRAQVVDLLQQELTAAEQRNQILSQQLQQMEAEHNTLRNTVETEREESKILLEKMELEVAERKLSFHNLQEEMHHLLEQFEQAGQAQAELESRYSALEQKHKAEMEEKTSHILSLQKTGQELQSACDALKDQNSKLLQDKNEQAVQSAQTIQQLEDQLQQKSKEISQFLNRLPLQQHETASQTSFPDVYNEGTQAVTEENIASLQKRVVELENEKGALLLSSIELEELKAENEKLSSQITLLEAQNRTGEADREVSEISIVDIANKRSSSAEESGQDVLENTFSQKHKELSVLLLEMKEAQEEIAFLKLQLQGKRAEEADHEVLDQKEMKQMEGEGIAPIKMKVFLEDTGQDFPLMPNEESSLPAVEKEQASTEHQSRTSEEISLNDAGVELKSTKQDGDKSLSAVPDIGQCHQDELERLKSQILELELNFHKAQEIYEKNLDEKAKEISNLNQLIEEFKKNADNNSSAFTALSEERDQLLSQVKELSMVTELRAQVKQLEMNLAEAERQRRLDYESQTAHDNLLTEQIHSLSIEAKSKDVKIEVLQNELDDVQLQFSEQSTLIRSLQSQLQNKESEVLEGAERVRHISSKVEELSQALSQKELEITKMDQLLLEKKRDVETLQQTIEEKDQQVTEISFSMTEKMVQLNEEKFSLGVEIKTLKEQLNLLSRAEEAKKEQVEEDNEVSSGLKQNYDEMSPAGQISKEELQHEFDLLKKENEQRKRKLQAALINRKELLQRVSRLEEELANLKDESKKEIPLSETERGEVEEDKENKEYSEKCVTSKCQEIEIYLKQTISEKEVELQHIRKDLEEKLAAEEQFQALVKQMNQTLQDKTNQIDLLQAEISENQAIIQKLITSNTDASDGDSVALVKETVVISPPCTGSSEHWKPELEEKILALEKEKEQLQKKLQEALTSRKAILKKAQEKERHLREELKQQKDDYNRLQEQFDEQSKENENIGDQLRQLQIQVRESIDGKLPSTDQQESCSSTPGLEEPLFKATEQHHTQPVLESNLCPDWPSHSEDASALQGGTSVAQIKAQLKEIEAEKVELELKVSSTTSELTKKSEEVFQLQEQINKQGLEIESLKTVSHEAEVHAESLQQKLESSQLQIAGLEHLRELQPKLDELQKLISKKEEDVSYLSGQLSEKEAALTKIQTEIIEQEDLIKALHTQLEMQAKEHDERIKQLQVELCEMKQKPEEIGEESRAKQQIQRKLQAALISRKEALKENKSLQEELSLARGTIERLTKSLADVESQVSAQNKEKDTVLGRLALLQEERDKLITEMDRSLLENQSLSSSCESLKLALEGLTEDKEKLVKEIESLKSSKIAESTEWQEKHKELQKEYEILLQSYENVSNEAERIQHVVEAVRQEKQELYGKLRSTEANKKETEKQLQEAEQEMEEMKEKMRKFAKSKQQKILELEEENDRLRAEVHPAGDTAKECMETLLSSNASMKEELERVKMEYETLSKKFQSLMSEKDSLSEEVQDLKHQIEGNVSKQANLEATEKHDNQTNVTEEGTQSIPGETEEQDSLSMSTRPTCSESVPSAKSANPAVSKDFSSHDEINNYLQQIDQLKERIAGLEEEKQKNKEFSQTLENEKNTLLSQISTKDGELKMLQEEVTKMNLLNQQIQEELSRVTKLKETAEEEKDDLEERLMNQLAELNGSIGNYCQDVTDAQIKNELLESEMKNLKKCVSELEEEKQQLVKEKTKVESEIRKEYLEKIQGAQKEPGNKSHAKELQELLKEKQQEVKQLQKDCIRYQEKISALERTVKALEFVQTESQKDLEITKENLAQAVEHRKKAQAELASFKVLLDDTQSEAARVLADNLKLKKELQSNKESVKSQMKQKDEDLERRLEQAEEKHLKEKKNMQEKLDALRREKVHLEETIGEIQVTLNKKDKEVQQLQENLDSTVTQLAAFTKSMSSLQDDRDRVIDEAKKWERKFSDAIQSKEEEIRLKEDNCSVLKDQLRQMSIHMEELKINISRLEHDKQIWESKAQTEVQLQQKVCDTLQGENKELLSQLEETRHLYHSSQNELAKLESELKSLKDQLTDLSNSLEKCKEQKGNLEGIIRQQEADIQNSKFSYEQLETDLQASRELTSRLHEEINMKEQKIISLLSGKEEAIQVAIAELRQQHDKEIKELENLLSQEEEENIVLEEENKKAVDKTNQLMETLKTIKKENIQQKAQLDSFVKSMSSLQNDRDRIVGDYQQLEERHLSIILEKDQLIQEAAAENNKLKEEIRGLRSHMDDLNSENAKLDAELIQYREDLNQVITIKDSQQKQLLEVQLQQNKELENKYAKLEEKLKESEEANEDLRRSFNALQEEKQDLSKEIESLKVSISQLTRQVTALQEEGTLGLYHAQLKVKEEEVHRLSALFSSSQKRIAELEEELVCVQKEAAKKVGEIEDKLKKELKHLHHDAGIMRNETETAEERVAELARDLVEMEQKLLMVTKENKGLTAQIQSFGRSMSSLQNSRDHANEELDELKRKYDASLKELAQLKEQGLLNRERDALLSETAFSMNSTEENSLSHLEKLNQQLLSKDEQLLHLSSQLEDSYNQVQSFSKAMASLQNERDHLWNELEKFRKSEEGKQRSAAQPSTSPAEVQSLKKAMSSLQNDRDRLLKELKNLQQQYLQINQEITELHPLKAQLQEYQDKTKAFQIMQEELRQENLSWQHELHQLRMEKSSWEIHERRMKEQYLMAISDKDQQLSHLQNLIRELRSSSSQTQPLKVQYQRQASPETSASPDGSQNLVYETELLRTQLNDSLKEIHQKELRIQQLNSNFSQLLEEKNTLSIQLCDTSQSLRENQQHYGDLLNHCAVLEKQVQELQAGPLNIDVAPGAPQEKNGVHRKSDPEELREPQQSFSEAQQQLCNTRQEVNELRKLLEEERDQRVAAENALSVAEEQIRRLEHSEWDSSRTPIIGSCGTQEQALLIDLTSNSCRRTRSGVGWKRVLRSLCHSRTRVPLLAAIYFLMIHVLLILCFTGHL

SEQ ID NO: 50588 - protein, 526 aa, Homo sapiens
MTSGCNLDCKAVLHAVAPYWNNGAETSWQIMANIIKKCLTTVEVLSFSSITFPMIGTGSLQFPKAVFAKLILSEVFEYSSSTRPITSPLQEVHFLVYTNDDEGCQAFLDEFTNWSRINPNKARIPMAGDTQGVVGTVSKPCFTAYEMKIGAITFQVATGDIATEQVDVIVNSTARTFNRKSGVSRAILEGAGQAVESECAVLAAQPHRDFIITPGGCLKCKIIIHVPGGKDVRKTVTSVLEECEQRKYTSVSLPAIGTGNAGKNPITVADNIIDAIVDFSSQHSTPSLKTVKVVIFQPELLNIFYDSMKKRDLSASLNFQSTFSMTTCNLPEHWTDMNHQLFCMVQLEPGQSEYNTIKDKFTRTCSSYAIEKIERIQNAFLWQSYQVKKRQMDIKNDHKNNERLLFHGTDADSVPYVNQHGFNRSCAGKNAVSYGKGTYFAVDASYSAKDTYSKPDSNGRKHMYVVRVLTGVFTKGRAGLVTPPPKNPHNPTDLFDSVTNNTRSPKLFVVFFDNQAYPEYLITFTA

SEQ ID NO: 50589 - protein, 388 aa, Homo sapiens
MLIRRKETKDYGTKRLVEGTINPGETCLIIEDVVTSGSSVLETVEVLQKEGLKVTDAIVLLDREQGGKDKLQAHGIRLHSVCTLSKMLEILEQQKKVDAETVGRVKRFIQENVFVAANHNGSPLSIKEAPKELSFGARAELPRIHPVASKLLRLMQKKETNLCLSADVSLARELLQLADALGPSICMLKTHVDILNDFTLDVMKELITLAKCHEFLIFEDRKFADIGNTVKKQYEGGIFKIASWADLVNAHVVPGSGVVKGLQEVGLPLHRGCLLIAEMSSTGSLATGDYTRAAVRMAEEHSEFVVGFISGSRVSMKPEFLHLTPGVQLEAGGDNLGQQYNSPQEVIGKRGSDIIIVGRGIISAADRLEAAEMYRKAAWEAYLSRLGV

SEQ ID NO: 50590 - protein, 775 aa, Homo sapiens [sequence omitted]

SEQ ID NO: 50591 - protein, 682 aa, Homo sapiens
MKYTNLVTGWQYRFFVLNNEAGLLEYFVNEQSRNQKPRGTLQLAGAVISPSDEDSHTFTVNAASGEQYKLRATDAKERQHWVSRLQICTQHHTEAIGKNNPPLKSRSFSLASSSNSPISQRRPSQNAISFFNVGHSKLQSLSKRTNLPPDHLVEVREMMSHAEGQQRDLIRRIECLPTSGHLSSLDQDLLMLKATSMATMNCLNDCFHILQLQHASHQKGSLPSGTTIEWLEPKISLSNHYKNGADQPFATDQSKPVAVPEEQPVAESGLLAREPEEINADDEIEDTCDHKEDDLGAVEEQRSVILHLLSQLKLGMDLTRVVLPTFILEKRSLLEMYADFMSHPDLFIAITNGATAEDRMIRFVEYYLTSFHEGRKGAIAKKPYNPIIGETFHCSWKMPKSEVASSVFSSSSTQGVTNHAPLSGESLTQVGSDCYTVRFVAEQVSHHPPVSGFYAECTERKMCVNAHVWTKSKFLGMSIGVTMVGEGILSLLEHGEEYTFSLPCAYARSILTVPWVELGGKVSVNCAKTGYSASITFHTKPFYGGKLHRVTAEVKHNITNTVVCRVQGEWNSVLEFTYSNGETKYVDLTKLAVTKKRVRPLEKQDPFESRRLWKNVTDSLRESEIDKATEHKHTLEERQRTEERHRTETGTPWKTKYFIKEGDGWVYHKPLWKIIPTTQPAE

SEQ ID NO: 50592 - protein, 396 aa, Homo sapiens
MAGRAVLLAGPPGTGKTALALAIAQELGSKVPFCPMVGSEVYSTEIKKTEVLMENFRRAIGLRIKETKEVYEGEVTELTPCETENPMGGYGKTISHVIIGLKTAKGTKQLKLDPSIFESLQKERVEAGDVIYIEANSGAVKRQGRCDTYATEFDLEAEEYVPLPKGDVHKKKEIIQDVTLHDLDVANARPQGGQDILSMMGQLMKPKKTEITDKLRGEINKVVNKYIDQGIAELVPGVLFVDEVHMLDIECFTYLHRALESSIAPIVIFASNRGNCVIRGTEDITSPHGIPLDLLDRVMIIRTMLYTPQEMKQIIKIRAQTEGINISEEALNHLGEIGTKTTLRYSVQLLTPANLLAKINGKDSIEKEHVEEISELFYDAKSSAKILADQQDKYMK

SEQ ID NO: 50593 - protein, 514 aa, Homo sapiens [sequence omitted]

SEQ ID NO: 50594 - protein, 599 aa, Homo sapiens
MANDVDKELMKQILCLVNVSHNGVSESELMELYPEMSWTFLTSLIHSLYKMCLLTYGCGLLRFQHLQAWETVRLEYLEGPTVTSSYRQKLINYFTLQLSQDRVTWRSADELPWLFQQQGSKQKLHDCLLNLFVSQNLYKRGHFAELLSYWQFVGKDKSAMATEYFDSLKQYEKNCEGEDNMSCLADLYETLGRFLKDLGLLSQAIVPLQRSLEIRETALDPDHPRVAQSLHQLASVYVQWKKFGNAEQLYKQALEISENAYGADHPYTARELEALATLYQKQNKYEQAEHFRKKSFKIHQKAIKKKGNLYGFALLRRRALQLEELTLGKDTPDNARTLNELGVLYYLQNNLETADQFLKRSLEMRERVLGPDHPDCAQSLNNLAALCNEKKQYDKAEELYERALDIRRRALAPDHPSLAYTVKHLAILYKKMGKLDKAVPLYELAVEIRQKSFGPKHPSVATALVNLAVLYSQMKKHVEALPLYERALKIYEDSLGRMHPRVGETLKNLAVLSYEGGDFEKAAELYKRAMEIKEAETSLLGGKAPSRHSSSGDTFSLKTAHSPNVFLQQGQRKVQSNLLSPEGLSNICAQEKTTRFTSS

SEQ ID NO: 50595 - protein, 143 aa, Homo sapiens
MDLFLKDYSPKLKRMCETMGYFFHAVYFPIDVENQYLTVRKWEIEKSSLVILFIHLTLPSLLLEDCEEAFLKNPEGKPRLIFHRLEDGKVSSDSVQQLIDQVSNLNKTSKAKIIDHSGDPAEGVYKTYICVEKIIKQVNMHSL

SEQ ID NO: 50596 - protein, 478 aa, Homo sapiens
MDMPQVNISVQGEVPRTLSVFRVELSCTGKVDSEVMILMQLNLTVNSSKNFTVLNFKRRKMCYKKLEEVKTSALDKNTSRTIYDPVHAAPTTSTRVFYISVGVCCAVIFLVAIILAVLHLHSMKRIELDDSISASSSSQGLSQPSTQTTQYLRADTPNNATPITSSLGYPTLRIEKNDLRSVTLLEAKGKVKDIAISRERITLKDVLQEGTFGRIFHGILIDEKDPNKEKQAFVKTVKDQASEIQVTMMLTESCKLRGLHHRNLLPITHVCIEEGEKPMVILPYMNWGNLKLFLRQCKLVEANNPQAISQQDLVHMAIQIACGMSYLARREVIHKDLAARNCVIDDTLQVKITDNALSRDLFPMDYHCLGDNENRPVRWMALESLVNNEFSSASDVWAFGVTLWELMTLGQTPYVDIDPFEMAAYLKDGYRIAQPINCPDELFAVMACCWALDPEERPKFQQLVQCLTEFHAALGAYV

SEQ ID NO: 50597 - protein, 475 aa, Homo sapiens
MDMPQVNISVQGEVPRTLSVFRVELSCTGKVDSEVMILMQLNLTVNSSKNFTVLNFKRRKMCYKKLEEVKTSALDKNTSRTIYDPVHAAPTTSTRVFYISVGVCCAVIFLVAIILAVLHLHSMKRIELDDSISASSSSQGLSQPSTQTTQYLRADTPNNATPITSYPTLRIEKNDLRSVTLLEAKGKVKDIAISRERITLKDVLQEGTFGRIFHGILIDEKDPNKEKQAFVKTVKDQASEIQVTMMLTESCKLRGLHHRNLLPITHVCIEEGEKPMVILPYMNWGNLKLFLRQCKLVEANNPQAISQQDLVHMAIQIACGMSYLARREVIHKDLAARNCVIDDTLQVKITDNALSRDLFPMDYHCLGDNENRPVRWMALESLVNNEFSSASDVWAFGVTLWELMTLGQTPYVDIDPFEMAAYLKDGYRIAQPINCPDELFAVMACCWALDPEERPKFQQLVQCLTEFHAALGAYV

SEQ ID NO: 50598 - protein, 20 aa, Homo sapiens
MKWTDLALQYLHENVPPIGN

SEQ ID NO: 50599 - protein, 222 aa, Homo sapiens
MWVMLQTLNDEVPKYRDQIPSPGLMVFPKPVTALEYTFSRSDPTSYAGYIEDLKKFLKPYTLEEQKNLTVCPDGALFEQKGPVYVACQFPISLLQACSGMNDPDFGYSQGNPCILVKMNRIIGLKPEGVPRIDCVSKNEDIPNVAVYPHNGMIDLKYFPYYGKKLHVGYLQPLVAVQVSFAPNNTGKEVTVECKIDGSANLKSQDDRDKFLGRVMFKITARA

SEQ ID NO: 50600 - protein, 202 aa, Homo sapiens
MEVWDVKNYKLISKPVASDSTYFAWCPDGEHILTATCAPRLRVNNGYKIWHYTGSILHKYDVPSNAELWQVSWQPFLDGIFPAKTITYQAVPSEVPNEEPKVATAYRPPALRNKPITNSKLHEEEPPQNMKPQSGNDKPLSKTALKNQRKHEAKKAAKQKLKAIEQLKEQAATGKQLEKNQLEKIQKETALLQELEDLELGI

SEQ ID NO: 50601 - protein, 2537 aa, Homo sapiens
MLHSNGIHTIPDKTFSDLQALQVLKMSYNKVRKLQKDTFYGLRSLTRLHMDHNNIEFINPEVFYGLNFLRLVHLEGNQLTKLHPDTFVSLSYLQIFKISFIKFLYLSDNFLTSLPQEMVSYMPDLDSLYLHGNPWTCDCHLKWLSDWIQEKPDVIKCKKDRSPSSAQQCPLCMNPRTSKGKPLAMVSAAAFQCAKPTIDSSLKSKSLTILEDSSSAFISPQGFMAPFGSLTLNMTDQSGNEANMVCSIQKPSRTSPIAFTEENDYIVLNTSFSTFLVCNIDYGHIQPVWQILALYSDSPLILERSHLLSETPQLYYKYKQVAPKPEDIFTNIEADLRADPSWLMQDQISLQLNRTATTFSTLQIQYSSDAQITLPRAEMRPVKHKWTMISRDNNTKLEHTVLVGGTVGLNCPGQGDPTPHVDWLLADGSKVRAPYVSEDGRILIDKSGKLELQMADSFDTGVYHCISSNYDDADILTYRITVVEPLVEAYQENGIHHTVFIGETLDLPCHSTGIPDASISWVIPGNNVLYQSSRDKKVLNNGTLRILQVTPKDQGYYRCVAANPSGVDFLIFQVSVKMKGQRPLEHDGETEGSGLDESNPIAHLKEPPGAQLRTSALMEAEVGKHTSSTSKRHNYRELTLQRRGDSTHRRFRENRRHFPPSARRIDPQHWAALLEKAKKNAMPDKRENTTVSPPPVVTQLPNIPGEEDDSSGMLALHEEFMVPATKALNLPARTVTADSRTISDSPMTNINYGTEFSPVVNSQILPPEEPTDFKLSTAIKTTAMSKNINPTMSSQIQGTTNQHSSTVFPLLLGATEFQDSDQMGRGREHFQSRPPITVRTMIKDVNVKMLSSTTNKLLLESVNTTNSHQTSVREVSEPRHNHFYSHTTQILSTSTFPSDPHTAAHSQFPIPRNSTVNIPLFRRFGRQRKIGGRGRIISPYRTPVLRRHRYSIFRSTTRGSSEKSTTAFSATVLNVTCLSCLPRERLTTATAALSFPSAAPITFPKADIARVPSEESTTLVQNPLLLLENKPSVEKTTPTIKYFRTEISQVTPTGAVMTYAPTSIPMEKTHKVNASYPRVSSTNEAKRDSVITSSLSGAITKPPMTIIAITRFSRRKIPWQQNFVNNHNPKGRLRNQHKVSLQKSTAVMLPKTSPALPRDKVSPFHFTTLSTSVMQIPSNTLTTAHHTTTKTHNPGSLPTKKELPFPPLNPMLPSIISKDSSTKSIISTQTAIPATTPTFPASVITYETQTERSRAQTIQREQEPQKKNRTDPNISPDQSSGFTTPTAMTPPVLTTAETSVKPSVSAFTHSPPENTTGISSTISFHSRTLNLTDVIEELAQASTQTLKSTIASETTLSSKSHQSTTTRKAIIRHSTIPPFLSSSATLMPVPISPPFTQRAVTDNVATPISGLMTNTVVKLHESSRHNAKPQQLVAEVATSPKVHPNAKFTIGTTHFIYSNLLHSTPMPALTTVKSQNSKLTPSPWAENQFWHKPYSEIAEKGKKPEVSMLATTGLSEATTLVSDWDGQKNTKKSDFDKKPVQEATTSKLLPFDSLSRYIFEKPRIVGGKAASFTIPANSDAFLPCEAVGNPLPTIHWTRVPSGLDLSKRKQNSRVQVLPNGTLSIQRVEIQDRGQYLCSASNLFGTDHLHVTLSVVSYPPRILERRTKEITVHSGSTVELKCRAEGRPSPTVTWILANQTVVSESSQGSRQAVVTVDGTLVLHNLSIYDRGFYKCVASNPGGQDSLLVKIQVIAAPPVILEQRRQVIVGTWGESLKLPCTAKGTPQPSVYWVLSDGTEVKPLQFTNSKLFLFSNGTLYIRNLASSDRGTYECIATSSTGSERRVVMLTMEERVTSPRIEAASQKRTEVNFGDKLLLNCSATGEPKPQIMWRLPSKAVVDQQHRVGSWIHVYPNGSLFIGSVTEKDSGVYLCVARNKMGDDLILMHVSLRLKPAKIDHKQYFRKQVLHGKDFQVDCKASGSPVPEISWSLPDGTMINNAMQADDSGHRTRRYTLFNNGTLYFNKVGVAEEGDYTCYAQNTLGKDEMKVHLTVITAAPRIRQSNKTNKRIKAGDTAVLDCEVTGDPKPKIFWLLPSNDMISFSIDRYTFHANGSLTINKVKLLDSGEYVCVARNPSGDDTKMYKLDVVSKPPLINGLYTNRTVIKATAVRHSKKHFDCRAEGTPSPEVMWIMPDNIFLTAPYYGSRITVHKNGTLEIRNVRLSDSADFICVARNEGGESVLVVQLEVLEMLRRPTFRNPFNEKIVAQLGKSTALNCSVDGNPPPEIIWILPNGTRFSNGPQSYQYLIASNGSFIISKTTREDAGKYRCAARNKVGYIEKLVILEIGQKPVILTYAPGTVKGISGESLSLHCVSDGIPKPNIKWTMPSGYVVDRPQINGKYILHDNGTLVIKEATAYDRGNYICKAQNSVGHTLITVPVMIVAYPPRITNRPPRSIVTRTGAAFQLHCVALGVPKPEITWEMPDHSLLSTASKERTHGSEQLHLQGTLVIQNPQTSDSGIYKCTAKNPLGSDYAATYIQVI

SEQ ID NO: 50602 - protein, 33 aa, Homo sapiens
MVHGATPATVSAATTSATSVPFAATATANQPHP

SEQ ID NO: 50603 - protein, 908 aa, Homo sapiens
MDERREEQIVQLLNSVQAKNDKESEAQISWFAPEDHGYGTEVSTKNTPCSENKLDIQEKKLINQEKKMFRIRNRSYIDRDSEYLLQENEPDGTLDQKLLEDLQKKKNDLRYIEMQHFREKLPSYGMQKELVNLIDNHQVTVISGETGCGKTTQVTQFILDNYIERGKGSACRIVCTQPRRISAISVAERVAAERAESCGSGNSTGYQIRLQSRLPRKQGSILYCTTGIILQWLQSDPYLSSVSHIVLDEIHERNLQSDVLMTVVKDLLNFRSDLKVILMSATLNAEKFSEYFGNCPMIHIPGFTFPVVEYLLEDVIEKIRYVPEQKEHRSQFKRGFMQGHVNRQEKEEKEAIYKERWPDYVRELRRRYSASTVDVIEMMEDDKVDLNLIVALIRYIVLEEEDGAILVFLPGWDNISTLHDLLMSQVMFKSVNQTQVFKRTPPGVRKIVIATNIAETSITIDDVVYVIDGGKIKETHFDTQNNISTMSAEWVSKANAKQRKGRAGRVQPGHCYHLYNGLRASLLDDYQLPEILRTPLEELCLQIKILRLGGIAYFLSRLMDPPSNEAVLLSIRHLMELNALDKQEELTPLGVHLARLPVEPHIGKMILFGALFCCLDPVLTIAASLSFKDPFVIPLGKEKIADARRKELAKDTRSDHLTVVNAFEGWEEARRRGFRYEKDYCWEYFLSSNTLQMLHNMKGQFAEHLLGAGFVSSRNPKDPESNINSDNEKIIKAVICAGLYPKVAKIRLNLGKKRKMVKVYTKTDGLVAVHPKSVNVEQTDFHYNWLIYHLKMRTSSIYLYDCTEVSPYCLLFFGGDISIQKDNDQETIAVDEWIVFQSPARIAHLVKELRKELDILLQEKIESPHPVDWNDTKSRDCAVLSAIIDLIKTQEKATPRNFPPRFQDGYYS

SEQ ID NO: 50604 - protein, 92 aa, Homo sapiens
MILFGALFCCLDPVLTIAASLSFKDPFVIPLGKEKIADARRKELAKDTRSDHLTVVNAFEGWEEARRRGFRYEKDYCWEYFLSSNTLQIMRR

SEQ ID NO: 50605 - protein, 395 aa, Homo sapiens [sequence omitted]

SEQ ID NO: 50606 - protein, 293 aa, Homo sapiens
MIYLSTQVDRLLGNTDDRTPDVIALTVAFFLFEFLAATQDIAVDGWALTMLSRENVGYASTCNSVGQTAGYFLGNVLFLALESADFCNKYLRFQPQPRGIVTLSDWFFSSRCCNRTEIGRRGSTQRTFSLIGSSNGSFADNTASDYQQIHCRSPAIKHILQSHALQVTVYSMYVSIMAFNAKVSDPLIGGTYMTLLNTVSNLGGNWPSTVALWLVDPLTVKECVGASNQNCRTPDAVELCKKLGGSCVTALDGYYVESIICVFIGFGWWFFLGPKFKKLQDEGSSSWKCKRNN

SEQ ID NO: 50607 - protein, 151 aa, Homo sapiens [sequence omitted]

SEQ ID NO: 50608 - protein, 143 aa, Homo sapiens
MIIELVSIVCFLFVALSQLFVAYRNGRVDEAVSLGFLDCWIGGDLTNFKGCYLTNQLPIQIFTAIFDMNTDVIILSQFMYYRLKNQKKKMSRSLQNLCVTWVPVCIMLSVDAVGIVEMLGFICGYVFCVFYLGSRFPQLYRNF

SEQ ID NO: 50609 - protein, 682 aa, Homo sapiens
MDSMELERQRGITIQSAATYTMWKDVNINIIDTPGHVDFTIEVERALRVLDGAVLVLCAVGGVQCQTMTVNRQMKRYNVPFLTFINKLDRMGSNPARALQQMRSKLNHNAAFMQIPMGLEGNFKGIVDLIEERAIYFDGDFGHFLRDFLPLLWNWDRRSGSQIVRYGEIPAELRAAATDHRQELIECVANSDEQLGEMFLEEKIPSISDLKLAIRRATLKRSFTPVFLGSALKNKGVQPLLDAVLEYLPNPSEVQNYAILNKEDDSKEKTKILMNSSRDNSHPFVGLAFKLEVGRFGQLTYVRSYQGELKKGDTIYNTRTRKKVRLQRLARMHADMMEDVEEVYAGDICALFGIDCASGDTFTDKANSGLSMESIHVPDPVISIAMKPSNKNDLEKFSKGIGRFTREDPTFKVYFDTENKETVISGMGELHLEIYAQRLEREYGCPCITGKPKVAFRETITAPVPFDFTHKKQSGGAGQYGKVIGVLEPLDPEDYTKLEFSDETFGSNIPKQFVPAVEKGFLDACEKGPLSGHKLSGLRFVLQDGAHHMVDSNEISFIRAGEGALKQALANATLCILEPIMAVEVVAPNEFQGQVIAGINRRHGVITGQDGVEDYFTLYADVPLNDMFGYSTELRSCTEGKGEYTMEYSRYQPCLPSTQEDVINKYLEATGQLPVKKGKAKN

SEQ ID NO: 50610 - protein, 210 aa, Homo sapiens
MTMEEMKNEAETTSMVSMPLYAVMYPVFNELERVNLSAAQTLRAAFIKAEKENPGLTQDIIMKILEKKSVEVNFTESLLRMAADDVEEYMIERPEPEFQDLNEKARALKQILSKIPDEINDRVRFLQTIKDIASAIKELLDTVNNVFKKYQYQNRRALEHQKKEFVKYSKSFSDTLKTYFKDGKAINVFVSANRLIHQTNLILQTFKTVA

SEQ ID NO: 50611 - protein, 357 aa, Homo sapiens
MIKAGVAGCREPQFIYPNIIGRAKGQSRAAQGGLELCVGDQAQDWRSSLFISYPVERGLITSWEDMEIMWKHIYDYNLKLKPCDGPVLITEPALNPLANRQQITEMFFEHLGVPAFYMSIQAVLALFAAGFTTGLVLNSGAGVTQSVPIFEGYCLPHGVQQLDLAGLDLTNYLMVLMKNHGIMLLSASDRKIVEDIKESFCYVAMNYEEEMAKKPDCLEKVYQLPDGKVIQLHDQLFSCPEALFSPCHMNLEAPGIDKICFSSIMKCDTGLRNSFFSNIILAGGSTSFPGLDKRLVKDIAKVAPANTAVQVIAPPERKISVWMGGSILASLSAFQDMWITAAEFKEVGPNIVHQRCF

SEQ ID NO: 50612 - protein, 744 aa, Homo sapiens
MEKELEESGFDQFQLDGAENQNLGHSETIDLNLDSIQPATSPKGRFQRLQEESDYITHYTRSAPKSNRCNFCHVLKILCTATILFIFGILIGYYVHTNCPSDAPSSGTVDPQLYQEILKTIQAEDIKKSFRNLVQLYKNEDDMEISKKIKTQWTSLGLEDVQFVNYSVLLDLPGPSPSTVTLSSSGQCFHPNGQPCSEEARKDSSQDLLYSYAAYSAKGTLKAEVIDVSYGMADDLKRIRKIKNVTNQIALLKLGKLPLLYKLSSLEKAGFGGVLLYIDPCDLPKTVNPSHDTFMVSLNPGGDPSTPGYPSVDESFRQSRSNLTSLLVQPISAPLVAKLISSPKARTKNEACSSLELPNNEIRVVSMQVQTVTKLKTVTNVVGFVMGLTSPDRYIIVGSHHHTAHSYNGQEWASSTAIITAFIRALMSKVKRGWRPDRTIVFCSWGGTAFGNIGSYEWGEDFKKVLQKNVVAYISLHSPIRGNSSLYPVASPSLQQLVVEKNNFNCTRRAQCPETNISSIQIQGDADYFINHLGVPIVQFAYEDIKTLEGPSFLSEARFSTRATKIEEMDPSFNLHETITKLSGEVILQIANEPVLPFNALDIALEVQNNLKGDQPNTHQLLAMALRLRESAELFQSDEMRPANDPKERAPIRIRMLNDILQDMEKSFLVKQAPPGFYRNILYHLDEKTSRFSILIEAWEHCKPLASNETLQEALSEVLNSINSAQVYFKAGLDVFKSVLDGKN

SEQ ID NO: 50613 - protein, 366 aa, Homo sapiens
MEVDGDVEIPPNKAVVLRGHESEVFICAWNPVSDLLASGSGDSTARIWNLSENSTSGSTQLVLRHCIREGGQDVPSNKDVTSLDWNSEGTLLATGSYDGFARIWTKDGNLASTLGQHKGPIFALKWNKKGNFILSAGVDKTTIIWDAHTGEAKQQFPFHSAPALDVDWQSNNTFASCSTDMCIHVCKLGQDRPIKTFQGHTNEVNAIKWDPTGNLLASCSDDMTLKIWSMKQDNCVHDLQAHNKEIYTIKWSPTGPGTNNPNANLMLASASFDSTVRLWDVDRGICIHTLTKHQEPVYSVAFSPDGRYLASGSFDKCVHIWNTQTGALVHSYRGTGGIFEVCWNAAGDKVGASASDGSVCVLDLRK

SEQ ID NO: 50614 - protein, 263 aa, Homo sapiens
MILKHKRTDSNVCRVCKESFSTNMLLIEHAKLHEEDPYICKYCDYKTVIFENLSQHIADTHFSDHLYWCEQCDVQFSSSSELYLHFQEHSCDEQYLCQFCEHETNDPEDLHSHVVNEHACKLIELSDKYNNGEHGQYSLLSKITFDKCKNFFVCQVCGFRSRLHTNVNRHVAIEHTKIFPHVCDDCGKGFSSMLEYCKHLNSHLSEGIYLCQYCEYSTGQIEDLKIHLDFKHSADLPHKCSDCLMRFGNERELISHLPVHETT

SEQ ID NO: 50615 - protein, 119 aa, Homo sapiens
MVVERDDGSTLMEIDGDKGKQGGPTYYIDTNALRVPRENMEAISPLKNGMVEDWDSFQAILDHTYKMHVKSEASLHPVLMSEAPWNTRAKREKLTELMFEHYNIPAFFLCKTAVLTAYP

SEQ ID NO: 50616 - protein, 58 aa, Homo sapiens
MVVERDDGSTLMEIDGDKGKQGGPTYYIDTNALRVPRENMEAISPLKNGMGMMFSPWN

SEQ ID NO: 50617 - protein, 134 aa, Homo sapiens
MTELGCDSIEKLKAQIPKMEQELKEPGRFKDFYQFTFNFAKNPGQKGLDLEMAIAYWNLVLNGRFKFLDLWNKFLLEHHKRSIPKDTWNLLLDFSTMIADDMSNYDEEGAWPVLIDDFVEFARPQIAGTKSTTV

SEQ ID NO: 50618 - protein, 668 aa, Homo sapiens
MDDDFGVVKEEISDDNAKLPCFNGRVVSWLVSAEGSHPDPAPFCADNPSELPPPMERTGGIGDSRPPSFHPHAGGGSQENLDNDTETDSLVSAQRERPRRRDGPEHATRLNGTAKGERRREPGGYDSSSTLMSSELETTSFFDSDEDDSTSRFSSSTEQSSASRLMRRHKRRRRKQKVSRIERSSSFSSITDSTMSLNIITVTLNMEKYNFLGISIVGQSNERGDGGIYIGSIMKGGAVAADGRIEPGDMLLQVNEINFENMSNDDAVRVLREIVHKPGPITLTVAKCWDPSPRGCFTLPRSEPIRPIDPAAWVSHTAAMTGTFPAYGMSPSLSTITSTSSSITSSIPDTERLDDFHLSIHSDMAAIVKAMASPESGLEVRDRMWLKITIPNAFIGSDVVDWLYHNVEGFTDRREARKYASNLLKAGFIRHTVNKITFSEQCYYIFGDLCGNMANLSLHDHDGSSGASDQDTLAPLPHPGAAPWPMAFPYQYPPPPHPYNPHPGFPELGYSYGGGSASSQHSEGSRSSGSNRSGSDRRKEKDPKAGDSKSGGSGSESDHTTRSSLRGPRERAPSERSGPAASEHSHRSHHSLASSLRSHHTHPSYGPPGVPPLYGPPMLMMPPPPAAMGPPGAPPGRDLASVPPELTASRQSFRMAMGNPSEFFVDVM

SEQ ID NO: 50619 - protein, 351 aa, Homo sapiens
MCDVMAAYFGKISEENIKNNFVLIYELLDEILDFGYPQNSETGALKTFITQQGIKSQHQTKEEQSQITSQVTGQIGWRREGIKYRRNELFLDVLESVNLLMSPQGQVLSAHVSGRVVMKSYLSGMPECKFGMNDKIVIEKQGKGTADETSKSGKQSIAIDDCTFHQCVRLSKFDSERSISFIPPDGEFELMRYRTTKDIILPFRVIPLVREVGRTKLEVKVVIKSNFKPSLLAQKIEVRIPTPLNTSGVQVICMKGKAKYKASENAIVWKIKRMAGMKESQISAEIELLPTNDKKKWARPPISMNFEVPFAPSGLKVRYLKVFEPKLNYSDHDVIKWVRYIGRSGIYETRC

SEQ ID NO: 50620 - protein, 349 aa, Homo sapiens
MCDVMAAYFGKISEENIKNNFVLIYELLDEILDFGYPQNSETGALKTFITQQGIKSQTKEEQSQITSQVTGQIGWRREGIKYRRNELFLDVLESVNLLMSPQGQVLSAHVSGRVVMKSYLSGMPECKFGMNDKIVIEKQGKGTADETSKSGKQSIAIDDCTFHQCVRLSKFDSERSISFIPPDGEFELMRYRTTKDIILPFRVIPLVREVGRTKLEVKVVIKSNFKPSLLAQKIEVRIPTPLNTSGVQVICMKGKAKYKASENAIVWKIKRMAGMKESQISAEIELLPTNDKKKWARPPISMNFEVPFAPSGLKVRYLKVFEPKLNYSDHDVIKWVRYIGRSGIYETRC

SEQ ID NO: 50621 - protein, 1511 aa, Homo sapiens
MIPSQISYPASQGAYYIPGQGRSTYVVPTQQYPVQPGAPGFYPGASPTEFGTYAGAYYPAQGVQQFPTGVAPTPVLMNQPPQIAPKRERKTIRIRDPNQGGKDITEEIMSGARTASTPTPPQTGGGLEPQANGETPQVAVIVRPDDRSQGAIIADRPGLPGPEHSPSESQPSSPSPTPSPSPVLEPGSEPNLAVLSIPGDTMTTIQMSVEESTPISRETGEPYRLSPEPTPLAEPILEVEVTLSKPVPESEFSSSPLQAPTPLASHTVEIHEPNGMVPSEDLEPEVESSPELAPPPACPSESPVPIAPTAQPEELLNGAPSPPAVDLSPVSEPEEQAKEVTASMAPPTIPSATPATAPSATSPAQEEEMEEEEEEEEGEAGEAGEAESEKGGEELLPPESTPIPANLSQNLEAAAATQVAVSVPKRRRKIKELNKKEAVGDLLDAFKEANPAVPEVENQPPAGSNPGPESEGSGVPPRPEEADETWDSKEDKIHNAENIQPGEQKYEYKSDQWKPLNLEEKKRYDREFLLGFQFIFASMQKPEGLPHISDVVLDKANKTPLRPLDPTRLQGINCGPDFTPSFANLGRTTLSTRGPPRGGPGGELPRGPAGLGPRRSQQGPRKEPRKIIATVLMTEDIKLNKAEKAWKPSSKRTAADKDRGEEDADGSKTQDLFRRVRSILNKLTPQMFQQLMKQVTQLAIDTEERLKGVIDLIFEKAISEPNFSVAYANMCRCLMALKVPTTEKPTVTVNFRKLLLNRCQKEFEKDKDDDEVFEKKQKEMDEAATAEERGRLKEELEEARDIARRRSLGNIKFIGELFKLKMLTEAIMHDCVVKLLKNHDEESLECLCRLLTTIGKDLDFEKAKPRMDQYFNQMEKIIKEKKTSSRIRFMLQDVLDLRGSNWVPRRGDQGPKTIDQIHKEAEMEEHREHIKVQQLMAKGSDKRRGGPPGPPISRGLPLVDDGGWNTVPISKGSRPIDTSRLTKITKPGSIDSNNQLFAPGGRLSWGKGSSGGSGAKPSDAASEAARPATSTLNRFSALQQAVPTESTDNRRVVQRSSLSRERGEKAGDRGDRLERSERGGDRGDRLDRARTPATKRSFSKEVEERSRERPSQPEGLRKAASLTEDRDRGRDAVKREAALPPVSPLKAALSEEELEKKSKAIIEEYLHLNDMKEAVQCVQELASPSLLFIFVRHGVESTLERSAIAREHMGQLLHQLLCAGHLSTAQYYQGLYEILELAEDMEIDIPHVWLYLAELVTPILQEGGVPMGELFREITKPLRPLGKAASLLLEILGLLCKSMGPKKVGTLWREAGLSWKEFLPEGQDIGAFVAEQKVEYTLGEESEAPGQRALPSEELNRQLEKLLKEGSSNQRVFDWIEANLSEQQIVSNTLVRALMTAVCYSAIIFETPLRVDVAVLKARAKLLQKYLCDEQKELQALYALQALVVTLEQPPNLLRMFFDALYDEDVVKEDAFYSWESSKDPAEQQGKGVALKSVTAFFKWLREAEEESDHN

SEQ ID NO: 50622 - protein, 1512 aa, Homo sapiens
MIPSQISYPASQGAYYIPGQGRSTYVVPTQQYPVQPGAPGFYPGASPTEFGTYAGAYYPAQGVQQFPTGVAPTPVLMNQPPQIAPKRERKTIRIRDPNQGGKDITEEIMSGARTASTPTPPQTGGGLEPQANGETPQVAVIVRPDDRSQGAIIADRPGLPGPEHSPSESQPSSPSPTPSPSPVLEPGSEPNLAVLSIPGDTMTTIQMSVEESTPISRETGEPYRLSPEPTPLAEPILEVEVTLSKPVPESEFSSSPLQAPTPLASHTVEIHEPNGMVPSEDLEPEVESSPELAPPPACPSESPVPIAPTAQPEELLNGAPSPPAVDLSPVSEPEEQAKEVTASMAPPTIPSATPATAPSATSPAQEEEMEEEEEEEEGEAGEAGEAESEKGGEELLPPESTPIPANLSQNLEAAAATQVAVSVPKRRRKIKELNKKEAVGDLLDAFKEANPAVPEVENQPPAGSNPGPESEGSGVPPRPEEADETWDSKEDKIHNAENIQPGEQKYEYKSDQWKPLNLEEKKRYDREFLLGFQFIFASMQKPEGLPHISDVVLDKANKTPLRPLDPTRLQGINCGPDFTPSFANLGRTTLSTRGPPRGGPGGELPRGPQAGLGPRRSQQGPRKEPRKIIATVLMTEDIKLNKAEKAWKPSSKRTAADKDRGEEDADGSKTQDLFRRVRSILNKLTPQMFQQLMKQVTQLAIDTEERLKGVIDLIFEKAISEPNFSVAYANMCRCLMALKVPTTEKPTVTVNFRKLLLNRCQKEFEKDKDDDEVFEKKQKEMDEAATAEERGRLKEELEEARDIARRRSLGNIKFIGELFKLKMLTEAIMHDCVVKLLKNHDEESLECLCRLLTTIGKDLDFEKAKPRMDQYFNQMEKIIKEKKTSSRIRFMLQDVLDLRGSNWVPRRGDQGPKTIDQIHKEAEMEEHREHIKVQQLMAKGSDKRRGGPPGPPISRGLPLVDDGGWNTVPISKGSRPIDTSRLTKITKPGSIDSNNQLFAPGGRLSWGKGSSGGSGAKPSDAASEAARPATSTLNRFSALQQAVPTESTDNRRVVQRSSLSRERGEKAGDRGDRLERSERGGDRGDRLDRARTPATKRSFSKEVEERSRERPSQPEGLRKAASLTEDRDRGRDAVKREAALPPVSPLKAALSEEELEKKSKAIIEEYLHLNDMKEAVQCVQELASPSLLFIFVRHGVESTLERSAIAREHMGQLLHQLLCAGHLSTAQYYQGLYEILELAEDMEIDIPHVWLYLAELVTPILQEGGVPMGELFREITKPLRPLGKAASLLLEILGLLCKSMGPKKVGTLWREAGLSWKEFLPEGQDIGAFVAEQKVEYTLGEESEAPGQRALPSEELNRQLEKLLKEGSSNQRVFDWIEANLSEQQIVSNTLVRALMTAVCYSAIIFETPLRVDVAVLKARAKLLQKYLCDEQKELQALYALQALVVTLEQPPNLLRMFFDALYDEDVVKEDAFYSWESSKDPAEQQGKGVALKSVTAFFKWLREAEEESDHN

SEQ ID NO: 50623 - protein, 46 aa, Homo sapiens
MEVDYSVSKKLRSRKIQIRNIPPHLQWEVLDGLLAQYGTVENVEQA

SEQ ID NO: 50624 - protein, 90 aa, Homo sapiens [sequence omitted]

SEQ ID NO: 50625 - protein, 117 aa, Homo sapiens [sequence omitted]

SEQ ID NO: 50626 - protein, 1074 aa, Homo sapiens
MHAYRKLLYGVNEIAVKVPSVFKLLIKEVLNPFYIFQLFSVILWSTDEYYYYALAIVVMSIVSIVSSLYSIRKQYVMLHDMVATHSTVRVSVCRVNEEIEEIFSTDLVPGDVMVIPLNGTIMPCDAVLINGTCIVNESMLTGESVPVTKTNLPNPSVDVKGIGDELYNPETHKRHTLFCGTTVIQTRFYTGELVKAIVVRTGFSTSKGQLVRSILYPKPTDFKLYRDAYLFLLCLVAVAGIGFIYTIINSILNEVQVGVIIIESLDIITITVPPALPAAMTAGIVYAQRRLKKIGIFCISPQRINICGQLNLVCFDKTGTLTEDGLDLWGIQRVENARFLSPEENVCNEMLVKSQFVACMATCHSLTKIEGVLSGDPLDLKMFEAIGWILEEATEEETALHNRIMPTVVRPPKQLLPESTPAGNQEMELFELPATYEIGIVRQFPFSSALQRMSVVARVLGDRKMDAYMKGAPEAIAGLCKPETVPVDFQNVLEDFTKQGFRVIALAHRKLESKLTWHKVQNISRDAIENNMDFMGLIIMQNKLKQETPAVLEDLHKANIRTVMVTGDSMLTAVSVARDCGMILPQDKVIIAEALPPKDGKVAKINWHYADSLTQCSHPSAIDPEAIPVKLVHDSLEDLQMTRYHFAMNGKSFSVILEHFQDLVPKLMLHGTVFARMAPDQKTQLIEALQNVDYFVGMCGDGANDCGALKRAHGGISLSELEASVASPFTSKTPSISCVPNLIREGRAALITSFCVFKFMALYSIIQYFSVTLLYSILSNLGDFQFLFIDLAIILVVVFTMSLNPAWKELVAQRPPSGLISGALLFSVLSQIIICIGFQSLGFFWVKQQPWYEVWHPKSDACNTTGSGFWNSSHVDNETELDEHNIQNYENTTVFFISSFQYLIVAIAFSKGKPFRQPCYKNYFFVFSVIFLYIFILFIMLYPVASVDQVLQIVCVPYQWRVTMLIIVLVNAFVSITVENFFLDMVLWKVVFNRDKQGEYRFSTTQPPQESVDRWGKCCLPWALGCRKKTPKAKYMYLAQELLVDPEWPPKPQTTTEAKALVKENGSCQIITIT

SEQ ID NO: 50627 - protein, 293 aa, Homo sapiens
MFILFPVCGSKFKSNSDREARERKRRRQLRASVFALALPLSLGPCWALWVAVPKASATIRGPQRRLLASLLQENTEILGYLLGSVAAFGSWASRIPPLSRICRGKTFPSIHLWTRLLSALAGLLYASAIVAHDQHPEYLLRATPWFLTSLGRAALDLAIIFLSCVMKSKMRQALGFAKEARESPDTQALLTCAEKEEENQENLDWVPLTTLSHCKSLRTMTAISRYMELTIEPVQQAAVPPGCQVTGRRAPEMRPCRTPRRTLPFRSSGPGCLPAAPLRSPPSTPTWSGTLKM

SEQ ID NO: 50628 - protein, 141 aa, Homo sapiens
MNENERYDAVQHCRYVDEVVRNAPWTLTPEFLAEHRIDFVAHDDIPYSSAGSDDVYKHIKEAGMFAPTQRTEGISTSDIITRIVRDYDVYARRNLQRGYTAKELNVSFINVSSSLTPEFPDSVGDISPPTPSQLNWLCSWL

SEQ ID NO: 50629 - protein, 507 aa, Homo sapiens
MSSTIFSTGGKDPLSANHSLKPLPSVPEEKKPRHKIISIFSGTEKGSKKKEKERPEISPPSDFEHTIHVGFDAVTGEFTGMPEQWARLLQTSNITKLEQKKNPQAVLDVLKFYDSNTVKQKYLSFTPPEKDGFPSGTPALNAKGTEAPAVVTEEEDDDEETAPPVIAPRPDHTKSIYTRSVIDPVPAPVGDSHVDGAAKSLDKQKKKTKMTDEEIMEKLRTIVSIGDPKKKYTRYEKIGQGASGTVFTATDVALGQEVAIKQINLQKQPKKELIINEILVMKELKNPNIVNFLDSYLVGDELFVVMEYLAGGSLTDVVTETCMDEAQIAAVCRECLQALEFLHANQVIHRDIKSDNVLLGMEGSVKLTDFGFCAQITPEQSKRSTMVGTPYWMAPEVVTRKAYGPKVDIWSLGIMAIEMVEGEPPYLNENPLRALYLIATNGTPELQNPEKLSPIFRDFLNRCLEMDVEKRGSAKELLQHPFLKLAKPLSSLTPLIMAAKEAMKSNR

SEQ ID NO: 50630 - protein, 75 aa, Homo sapiens [sequence omitted]

SEQ ID NO: 50631 - protein, 783 aa, Homo sapiens
MFARKHESPLLVTKSQSLTALPSSTYTPPNSYAQHSYFGSFSSLHQSVPNNGSERRSTSFPLSGPPRKPQESRGHVSPAEDQTIQAPPVSVSALARDSPLTPNEMSSSTLTSPIEASWVSSQNDSPGDASEGPEYLAIGNLDPRGRTASCQSHSSNAESSSSNLFSSSSSQKPDSAASSLGDQEGGGESQLSSVLRRSSFSEGQTLTVTSGAKKSHIRSHSDTSIASRGAPESCNDKAKLRGPLPYSGQSSEVSTPSSLYMEYEGGRYLCSGEGMFRRPSEGQSLISYLSEQDFGSCADLEKENAHFSISESLIAAIELMKCNMMSQCLEEEEVEEEDSDREIQELKQKIRLRRQQIRTKNLLPMYQEAEHGSFRVTSSSSQFSSRDSAQLSDSGSADEVDEFEIQDADIRRNTASSSKSFVSSQSFSHCFLHSTSAEAVAMGLLKQFEGMQLPAASELEWLVPEHDAPQKLLPIPDSLPISPDDGQHADIYKLRIRVRGNLEWAPPRPQIIFNVHPAPTRKIAVAKQNYRCAGCGIRTDPDYIKRLRYCEYLGKYFCQCCHENAQMAIPSRVLRKWDFSKYYVSNFSKDLLIKIWNDPLFNVQDINSALYRKVKLLNQVRLLRVQLCHMKNMFKTCRLAKELLDSFDTVPGHLTEDLHLYSLNDLTATRKGELGPRLAELTRAGATHVERCMLCQAKGFICEFCQNEDDIIFPFELHKCRTCEECKACYHKACFKSGSCPRCERLQARREALARQSLESYLSDYEEEPAEALALEAAVLEAT

SEQ ID NO: 50632 - protein, 848 aa, Homo sapiens
MSHEKCLKHVRIPCTSVAPSLVRVPVAHCFGPRGLHKRKFCAVCRKVLEAPALHCEVCELHLHPDCVPFACSDCRQCHQDGHQDHDTHHHHWREGNLPSGARCEVCRKTCGSSDVLAGVRCEWCGVQAHSLCSAALAPECGFGRLRSLVLPPACVRLLPGGFSKTQSFRIVEAAEPGEGGDGADGSAAVGPGRETQATPESGKQTLKIFDGDDAVRRSQFRLVTVSRLAGAEEVLEAALRAHHIPEDPGHLELCRLPPSSQACDAWAGGKAGSAVISEEGRSPGSGEATPEAWVIRALPRAQEVLKIYPGWLKVGVAYVSVRVTPKSTARSVVLEVLPLLGRQAESPESFQLVEVAMGCRHVQRTMLMDEQPLLDRLQDIRQMSVRQVSQTRFYVAESRDVAPHVSLFVGGLPPGLSPEEYSSLLHEAGATKATVVSVSHIYSSQGAVVLDVACFAEAERLYMLLKDMAVRGRLLTALVLPDLLHAKLPPDSCPLLVFVNPKSGGLKGRDLLCSFRKLLNPHQVFDLTNGGPLPGLHLFSQVPCFRVLVCGGDGTVGWVLGALEETRYRLACPEPSVAILPLGTGNDLGRVLRWGAGYSGEDPFSVLLSVDEADAVLMDRWTILLDAHEAGSAENDTADAEPPKIVQMSNYCGIGIDAELSLDFHQAREEEPGKFTSRLHNKGVYVRVGLQKISHSRSLHKQIRLQVERQEVELPSIEGLIFINIPSWGSGADLWGSDSDTRFEKPRMDDGLLEVVGVTGVVHMGQVQGGLRSGIRIAQGSYFRVTLLKATPVQVDGEPWVQAPGHMIISAAGPKVHMLRKAKQKPRRAGTTRDARADAAPAPESDPR

SEQ ID NO: 50633 - protein, 421 aa, Homo sapiens [sequence omitted]

SEQ ID NO: 50634 - protein, 471 aa, Homo sapiens
MAPDLRQDFNMMEQKKRVSMILQSPAFCEELESMIQEQFKKGKNPTGLLALQQIADFMTTNVPNVYPAAPQGGMAALNMSLGMVTPVNDLRGSDSIAYDKGEKLLRCKLAAFYRLADLFGWSQLIYNHITTRVNSEQEHFLIVPFGLLYSEVTASSLVKINLQGDIVDRGSTNLGVNQAGFTLHSAIYAARPDVKCVVHIHTPAGAAVSAMKCGLLPISPEALSLGEVAYHDYHGILVDEEEKVLIQKNLGPKSKVLILRNHGLVSVGESVEEAFYYIHNLVVACEIQVRTLASAGGPDNLVLLNPEKYKAKSRSPGSPVGEGTGSPPKWQIGEQEFEALMRMLDNLGYRTGYPYRYPALREKSKKYSDVEVPASVTGYSFASDGDSGTCSPLRHSFQKQQREKTRWLNSGRGDEASEEGQNGSSPKSKTKVWTNITHDHVKPLLQSLSSGVCVPSCITNCLVCAYLTVHS

SEQ ID NO: 50635 - protein, 93 aa, Homo sapiens [sequence omitted]

SEQ ID NO: 50636 - protein, 354 aa, Homo sapiens
MYLSEISPKEIRGSLGQVTAIFICIGVFTGQLLGLPELLGKESTWPYLFGVIVVPAVVQLLSLPFLPDSPRYLLLEKHNEARAVKAFQTFLGKADVSQEVEEVLAESRVQRSIRLVSVLELLRAPYVRWQVVTVIVTMACYQLCGLNAIWFYTNSIFGKAGIPPAKIPYVTLSTGGIETLAAVFSGLVIEHLGRRPLLIGGFGLMGLFFGTLTITLTLQDHAPWVPYLSIVGILAIIASFCSGPGGIPFILTGEFFQQSQRPAAFIIAGTVNWLSNFAVGLLFPFIQKSLDTYCFLVFATICITGAIYLYFVLPETKNRTYAEISQAFSKRNKAYPPEEKIDSAVTDGKINGRP

SEQ ID NO: 50637 - protein, 683 aa, Homo sapiens
MESPNHPLLNSPSNLLPGGALGAGAFSSLQSPDLPHPGGGGGGGGGGPPGGGGGGGSASPPPLPGFGTPWSVQTASPPPQPQQPPPTQPQQQPPPPQQPPQPQPQPPGSSATTPGGGSGGSLSAMPPPSPDSENGFYPGLPSSMNPAFFPSFSPVSPHGCTGLSVPTSGGGGGGFGGPFSATAVPPPPPPAMNIPQQQPPPPAAPQQPQSRRSPVSPQLQQQHQAAAAAFLQQRNSYNHHQPLLKQSPWSNHQSSGWGTGSMSWGAMHGRDHRRTGNMGIPGTMNQISPLKKPFSGNVIAPPKFTRSTPSLTPKSWIEDNVFRTDNNSNTLLPLQDRSRMYDSLNMHSLENSLIDIMRAEHDPLKGRLSYPHPGTDNLLMLNGRSSLFPIDDGLLDDGHSDQVGVLNSPTCYSAHQNGERIERFSRKVFVGGLPPDIDEDEITASFRRFGPLVVDWPHKAESKSYFPPKGYAFLLFQEESSVQALIDACIEEDGKLYLCVSSPTIKDKPVQIRPWNLSDSDFVMDGSQPLDPRKTIFVGGVPRPLRAVELAMIMDRLYGGVCYAGIDTDPELKYPKGAGRVAFSNQQSYIAAISARFVQLQHGDIDKRVEVKPYVLDDQMCDECQGARCGGKFAPFFCANVTCLQYYCEFCWANIHSRAGREFHKPLVKEGADRPRQIHFRWN

SEQ ID NO: 50638 - protein, 691 aa, Homo sapiens
MESPNHPLLNSPSNLLPGGALGAGAFSSLQSPDLPHPGGGGGGGGGGPPGGGGGGGSASPPPLPGFGTPWSVQTASPPPQPQQPPPTQPQQQPPPPQQPPQPQPQPPGSSATTPGGGSGGSLSAMPPPSPDSENGFYPGLPSSMNPAFFPSFSPVSPHGCTGLSVPTSGGGGGGFGGPFSATAVPPPPPPAMNIPQQQPPPPAAPQQPQSRRSPVSPQLQQQHQAAAAAFLQQRNSYNHHQPLLKQSPWSNHQSSGWGTGSMSWGAMHGRDHRRTGNMGIPGTMNQISPLKKPFSGNVIAPPKFTRSTPSLTPKSWIEDNVFRTDNNSNTLLPLQDRSRMYDSLNMHSLENSLIDIMRAEHDPLKGRLSYPHPGTDNLLMLNARSYGRRRGRSSLFPIDDGLLDDGHSDQVGVLNSPTCYSAHQNGERIERFSRKVFVGGLPPDIDEDEITASFRRFGPLVVDWPHKAESKSYFPPKGYAFLLFQEESSVQALIDACIEEDGKLYLCVSSPTIKDKPVQIRPWNLSDSDFVMDGSQPLDPRKTIFVGGVPRPLRAVELAMIMDRLYGGVCYAGIDTDPELKYPKGAGRVAFSNQQSYIAAISARFVQLQHGDIDKRVEVKPYVLDDQMCDECQGARCGGKFAPFFCANVTCLQYYCEFCWANIHSRAGREFHKPLVKEGADRPRQIHFRWN

SEQ ID NO: 50639 - protein, 686 aa, Homo sapiens
MESPNHPLLNSPSNLLPGGALGAGAFSSLQSPDLPHPGGGGGGGGGGPPGGGGGGGSASPPPLPGFGTPWSVQTASPPPQPQQPPPTQPQQQPPPPQQPPQPQPQPPGSSATTPGGGSGGSLSAMPPPSPDSENGFYPGLPSSMNPAFFPSFSPVSPHGCTGLSVPTSGGGGGGFGGPFSATAVPPPPPPAMNIPQQQPPPPAAPQQPQSRRSPVSPQLQQQHQAAAAAFLQQRNSYNHHQPLLKQSPWSNHQSSGWGTGSMSWGAMHGRDHRRTGNMGIPGTMNQISPLKKPFSGNVIAPPKFTRSTPSLTPKSWIEDNVFRTDNNSNTLLPLQVRMDRSRMYDSLNMHSLENSLIDIMRAEHDPLKGRLSYPHPGTDNLLMLNGRSSLFPIDDGLLDDGHSDQVGVLNSPTCYSAHQNGERIERFSRKVFVGGLPPDIDEDEITASFRRFGPLVVDWPHKAESKSYFPPKGYAFLLFQEESSVQALIDACIEEDGKLYLCVSSPTIKDKPVQIRPWNLSDSDFVMDGSQPLDPRKTIFVGGVPRPLRAVELAMIMDRLYGGVCYAGIDTDPELKYPKGAGRVAFSNQQSYIAAISARFVQLQHGDIDKRVEVKPYVLDDQMCDECQGARCGGKFAPFFCANVTCLQYYCEFCWANIHSRAGREFHKPLVKEGADRPRQIHFRWN

SEQ ID NO: 50640 - protein, 694 aa, Homo sapiens
MESPNHPLLNSPSNLLPGGALGAGAFSSLQSPDLPHPGGGGGGGGGGPPGGGGGGGSASPPPLPGFGTPWSVQTASPPPQPQQPPPTQPQQQPPPPQQPPQPQPQPPGSSATTPGGGSGGSLSAMPPPSPDSENGFYPGLPSSMNPAFFPSFSPVSPHGCTGLSVPTSGGGGGGFGGPFSATAVPPPPPPAMNIPQQQPPPPAAPQQPQSRRSPVSPQLQQQHQAAAAAFLQQRNSYNHHQPLLKQSPWSNHQSSGWGTGSMSWGAMHGRDHRRTGNMGIPGTMNQISPLKKPFSGNVIAPPKFTRSTPSLTPKSWIEDNVFRTDNNSNTLLPLQVRMDRSRMYDSLNMHSLENSLIDIMRAEHDPLKGRLSYPHPGTDNLLMLNARSYGRRRGRSSLFPIDDGLLDDGHSDQVGVLNSPTCYSAHQNGERIERFSRKVFVGGLPPDIDEDEITASFRRFGPLVVDWPHKAESKSYFPPKGYAFLLFQEESSVQALIDACIEEDGKLYLCVSSPTIKDKPVQIRPWNLSDSDFVMDGSQPLDPRKTIFVGGVPRPLRAVELAMIMDRLYGGVCYAGIDTDPELKYPKGAGRVAFSNQQSYIAAISARFVQLQHGDIDKRVEVKPYVLDDQMCDECQGARCGGKFAPFFCANVTCLQYYCEFCWANIHSRAGREFHKPLVKEGADRPRQIHFRWN

SEQ ID NO: 50641 - protein, 6 aa, Homo sapiens
MFKFIC

SEQ ID NO: 50642 - protein, 480 aa, Homo sapiens
MVRTIFDDKSADKLKTIPNDNTVSLRICTIAEHLETMLITRLQSGIDFAIQLDESTDIGSCTTLLVYVRYAWQDDFLEDFLCFLNLTSHLSGLDIFTELERRIVGQYKLNWKNCKGITSDGTATMTGKHSRVIKKLLEVTNNGAVWNHCFIHREGLASREIPQNLMEVLKNAVKVVNFIKGSSLNSRLLETFCSEIGTNHTHLLYHTKIRWLSQGKILSRVYELRNEIHFFLIEKKSHLASIFEDDTWVTKLAYLTDIFSILNELSLKLQGKNSDVFQHVERIQGFRKTLLLWQVRLKSNRPSYYMFPRFLQHIEENIINENILKEIKLEILLHLTSLSQTFNHFFPEEKFETLRENSWVKDPFAFRHPESIIELNLVPEEENELLQLSSSYTLKNDYETLSLSAFWMKVKEDFPLLSRKSVLLLLPFTTTSLCELGFSILTQLKTKERNGLNCAAVMRVALSSCVPDWNELMNRQAHPS

SEQ ID NO: 50643 - protein, 47 aa, Homo sapiens
MKVLEKRLKDMGFQYSCINDYRPVKLLQCVDHSTHPDCALKSKLWEP

SEQ ID NO: 50644 - protein, 349 aa, Homo sapiens
MVQPEYRIYEMNKRLQSRTEDSDNLWWDAFATEFFEDDATLTLSFCLEDGPKRYTIGRTLIPRYFSTVFEGGVTDLYYILKHSKESYHNSSITVDCDQCTMVTQHGKPMFTKVCTEGRLILEFTFDDLMRIKTWHFTIRQYRELVPRSILAMHAQDPQVLDQLSKNITRMGLTNFTLNYLRLCVILEPMQELMSRHKTYNLSPRDCLKTCLFQKWQRMVAPPAEPTRQPTTKRRKRKNSTSSTSNSSAGNNANSTGSKKKTTAANLSLSSQVPDVMVVGEPTLMGGEFGDEDERLITRLENTQYDAANGMDDEEDFNNSPALGNNSPWNSKPPATQETKSENPPPQASQ

SEQ ID NO: 50645 - protein, 171 aa, Homo sapiens [sequence omitted]

SEQ ID NO: 50646 - protein, 5 aa, Homo sapiens
MCVTD

SEQ ID NO: 50647 - protein, 195 aa, Homo sapiens
MTIAKQRLGDEAIGVRHFAAHEREDLVQQLERAKEQIESLEHDLQASVDELQDVKEERSSYQDKVERLNQELNHILSGHENRIIDVDALCMENRYLQERLKQLHEEVNLLKSNIAKYKNALERRKNSKGQGKSSSSALTGVLSAKQVQDLLSEDHGCSLPATPQSISDLKSLATALLETIHEKNMVIQHQRQTNK

SEQ ID NO: 50648 - protein, 626 aa, Homo sapiens [sequence omitted]

SEQ ID NO: 50649 - protein, 584 aa, Homo sapiens
MSSDSAAGSSAKVPEGVAGAPNEAALLALMERTGYSMVQENGQRKYGGPPPGWEGPHPQRGCEVFVGKIPRDVYEDELVPVFEAVGRIYELRLMMDFDGKNRGYAFVMYCHKHEAKRAVRELNNYEIRPGRLLGVCCSVDNCRLFIGGIPKMKKREEILEEIAKVTEGVLDVIVYASAADKMKNRGFAFVEYESHRAAAMARRKLMPGRIQLWGHQIAVDWAEPEIDVDEDVMETVKILYVRNLMIETTEDTIKKSFGQFNPGCVERVKKIRDYAFVHFTSREDAVHAMNNLNGTELEGSCLEVTLAKPVDKEQYSRYQKAARGGGAAEAAQQPSYVYSCDPYTLAYYGYPYNALIGPNRDYFVKAGSIRGRGRGAAGNRAPGPRGSYLGGYSAGRGIYSRYHEGKGKQQEKGYELVPNLEIPTVNPVAIKPGTVAIPAIGAQYSMFPAAPAPKMIEDGKIHTVEHMISPIAVQPDPASAAAAAAAAAAAAAAVIPTVSTPPPFQGRPITPVYTVAPNVQRIPTAGIYGASYVPFAAPATATIATLQKNAAAAAAMYGGYAGYIPQAFPAAAIQVPIPDVYQTY

SEQ ID NO: 50650 - protein, 898 aa, Homo sapiens
MRKDTDDIESPKRSIRDSGYIDCWDSERSDSLSPPRHGRDDSFDSLDSFGSRSRQTPSPDVVLRGSSDGRGSDSESDLPHRKLPDVKKDDMSARRTSHGEPKSAVPFNQYLPNKSNQTAYVPAPLRKKKAEREEYRKSWSTATSPLGGERPFRYGPRTPVSDDAESTSMFDMRCEEEAAVQPHSRARQEQLQLINNQLREEDDKWQDDLARWKSRRRSVSQDLIKKEEERKKMEKLLAGEDGTSERRKSIKTYREIVQEKERRERELHEAYKNARSQEEAEGILQQYIERFTISEAVLERLEMPKILERSHSTEPNLSSFLNDPNPMKYLRQQSLPPPKFTATVETTIARASVLDTSMSAGSGSPSKTVTPKAVPMLTPKPYSQPKNSQDVLKTFKVDGKVSVNGETVHREEEKERECPTVAPAHSLTKSQMFEGVARVHGSPLELKQDNGSIEINIKKPNSVPQELAATTEKTEPNSQEDKNDGGKSRKGNIELASSEPQHFTTTVTRCSPTVAFVEFPSSPQLKNDVSEEKDQKKPENEMSGKVELVLSQKVVKPKSPEPEATLTFPFLDKMPEANQLHLPNLNSQVDSPSSEKSPVMTPQFKFWAWDPEEERRRQEKWQQEQERLLQERYQKEQDKLKEEWEKAQKEVEEEERRYYEEERKIIEDTVVPFTVSSSSADQLSTSSSMTEGSGTMNKIDLGNCQDEKQDRRWKKSFQGDDSDLLLKTRESDRLEEKGSLTEGALAHSGNPVSKGVHEDHQLDTEAGAPHCGTNPQLAQDPSQNQQTSNPTHSSEDVKPKTLPLDKSINHQIESPSERRKSISGKKLCSSCGLPLGKGAAMIIETLNLYFHIQCFRCGICKGQLGDAVSGTDVRIRNGLLNCNDCYMRSRSAGQPTTL

SEQ ID NO: 50651 - protein, 50 aa, Homo sapiens
MTNKLDTAMWLSRLFTVYCSALFVLPLLGVQMSCFKKERSSALSILTPVN

SEQ ID NO: 50652 - protein, 345 aa, Homo sapiens
MKDVTEAQIGDTLCLHKQPVEPLPGFKSAKPMVFAGMYPLDQSEYNNLKSAIEKLTLNDSSVTVHRDSSLALGAGWRLGFLGLLHMEVFNQRLEQEYNASVILTTPTVPYKAVLSSSKLIKEHREKEITIINPAQFPDKSKVTEYLEPVVLGTIITPDEYTGKIMMLCEARRAVQKNMIFIDQNRVMLKYLFPLNEIVVDFYDSLKSLSSGYASFDYEDAGYQTAELVKMDILLNGNTVEELVTVVHKDKAHSIGKAICERLKDSLPRQLFEIAIQAAIGSKIIARETVKAYRKNVLAKCYGGDITRKMKLLKRQAEGKKKLRKIGNVEVPKDAFIKVLKTQSSK

SEQ ID NO: 50653 - protein, 60 aa, Homo sapiens
MILITGAHKAFALYKAIEEGVNHMWTVSAFQQHPRTIFVCDEDATLELRVKTVKYFKGEH

SEQ ID NO: 50654 - protein, 132 aa, Homo sapiens
MHVLEDIAKFFKAIVGKNLPDEEIFQQLNQLNSLHQETIMKCVKSRKDEIKQALSREIVAISSAQLQDFDWQVKLALSSDKIAALRMPLLSLHLDVKENGEVKPYSIEMSREELQNLIQSLEAANKVVLQLK

SEQ ID NO: 50655 - protein, 168 aa, Homo sapiens
MEKFCEDIGVEPENVVMLVLAWKLDAQNMGYFTLQEWLKGMTSLQCDTTEKLRNTLDYLRSFLNDSTNFKLIYRYAFDFAREKDQRSLDINTAKCMLGLLLGKIWPLFPVFHQFLEQSKYKVINKDQWCNVLEFSRTINLDLSNYDEDGAWPVLLDEFVEWYKDKQMS

SEQ ID NO: 50656 - protein, 133 aa, Homo sapiens [sequence omitted]

SEQ ID NO: 50657 - protein, 779 aa, Homo sapiens
MDKSTVLQKSIDFLRKHKEITAQSDASEIRQDWKPTFLSNEEFTQLMLEALDGFFLAIMTDGSIIYVSESVTSLLEHLPSDLVDQSIFNFIPEGEHSEVYKILSTHLLESDSLTPEYLKSKNQLEFCCHMLRGTIDPKEPSTYEYVKFIGNFKSLNSVSSSAHNGFEGTIQRTHRPSYEDRVCFVATVRLATPQFIKEMCTVEEPNEEFTSRHSLEWKFLFLDHRAPPIIGYLPFEVLGTSGYDYYHVDDLENLAKCHEHLMQYGKGKSCYYRFLTKGQQWIWLQTHYYITYHQWNSRPEFIVCTHTVVSYAEVRAERRRELGIEESLPETAADKSQDSGSDNRINTVSLKEALERFDHSPTPSASSRSSRKSSHTAVSDPSSTPTKIPTDTSTPPRQHLPAHEKMVQRRSSFSSQSINSQSVGSSLTQPVMSQATNLPIPQGMSQFQFSAQLGAMQHLKDQLEQRTRMIEANIHRQQEELRKIQEQLQMVHGQGLQMFLQQSNPGLNFGSVQLSSGNSSNIQQLAPINMQGQVVPTNQIQSGMNTGHIGTTQHMIQQQTLQSTSTQSQQNVLSGHSQQTSLPSQTQSTLTAPLYNTMVISQPAAGSMVQIPSSMPQNSTQSAAVTTFTQDRQIRFSQGQQLVTKLVTAPVACGAVMVPSTMLMGQVVTAYPTFATQQQQSQTLSVTQQQQQQSSQEQQLTSVQQPSQAQLTQPPQQFLQTSRLLHGNPSTQLILSAAFPLQQSTFPQSHHQQHQSQQQQQLSRHRTDSLPDPSKVQPQ

SEQ ID NO: 50658 - protein, 368 aa, Homo sapiens
MITQLLAYTPPQEQDDTPDWVARIKNLMKEAPTAYSLLIMHRDVIYAVRDPYGNRPLCIGRLIPVSDINDKEKKTSETEGWVVSSESCSFLSIGARYYREVLPGEIVEISRHNVQTLDIISRSEGNPVAFCIFEYVYFARPDSMFEDQMVYTVRYRCGQQLAIEAPVDADLVSTVPESATPAALAYAGKCGLPYVEVLCKNRYVGRTFIQPNMRLRQLGVAKKFGVLSDNFKGKRIVLVDDSIVRGNTISPIIKLLKESGAKEVHIRVASPPIKYPCFMGINIPTKEELIANKPEFDHLAEYLGANSVVYLSVEGLVSSVQEGIKFKKQKEKKHDIMIQENGNGLECFEKSGHCTACLTGKYPVELEW

SEQ ID NO: 50659 - protein, 1813 aa, Homo sapiens
MIGPPWHQSYHSSSSTSDLSNYDHAYLRRSPDQCSSQGSMESLEPSGAYPPCHLSPAKSTGSIDQLSHFHNKRDSAYSSFSTSSSILEYPHPGISGRERSGSMDNTSARGGLLEGMRQADIRYVKTVYDTRRGVSAEYEVNSSALLLQGREARASANGQGYDKWSNIPRGKGVPPPSWSQQCPSSLETATDNLPPKVGAPLPPARSDSYAAFRHRERPSSWSSLDQKRLCRPQANSLGSLKSPFIEEQLHTVLEKSPENSPPVKPKHNYTQKAQPGQPLLPTSIYPVPSLEPHFAQVPQPSVSSNGMLYPALAKESGYIAPQGACNKMATIDENGNQNGSGRPGFAFCQPLEHDLLSPVEKKPEATAKYVPSKVHFCSVPENEEDASLKRHLTPPQGNSPHSNERKSTHSNKPSSHPHSLKCPQAQAWQAGEDKRSSRLSEPWEGDFQEDHNANLWRRLEREGLGQSLSGNFGKTKSAFSSLQNIPESLRRHSSLELGRGTQEGYPGGRPTCAVNTKAEDPGRKAAPDLGSHLDRQVSYPRPEGRTGASASFNSTDPSPEEPPAPSHPHTSSLGRRGPGPGSASALQGFQYGKPHCSVLEKVSKFEQREQGSQRPSVGGSGFGHNYRPHRTVSTSSTSGNDFEETKAHIRFSESAEPLGNGEQHFKNGELKLEEASRQPCGQQLSGGASDSGRGPQRPDARLLRSQSTFQLSSEPEREPEWRDRPGSPESPLLDAPFSRAYRNSIKDAQSRVLGATSFRRRDLELGAPVASRSWRPRPSSAHVGLRSPEASASASPHTPRERHSVTPAEGDLARPVPPAARRGARRRLTPEQKKRSYSEPEKMNEVGIVEEAEPAPLGPQRNGMRFPESSVADRRRLFERDGKACSTLSLSGPELKQFQQSALADYIQRKTGKRPTSAAGCSLQEPGPLRERAQSAYLQPGPAALEGSGLASASSLSSLREPSLQPRREATLLPATVAETQQAPRDRSSSFAGGRRLGERRRGDLLSGANGGTRGTQRGDETPREPSSWGARAGKSMSAEDLLERSDVLAGPVHVRSRSSPATADKRQDVLLGQDSGFGLVKDPCYLAGPGSRSLSCSERGQEEMLPLFHHLTPRWGGSGCKAIGDSSVPSECPGTLDHQRQASRTPCPRPPLAGTQGLVTDTRAAPLTPIGTPLPSAIPSGYCSQDGQTGRQPLPPYTPAMMHRSNGHTLTQPPGPRGCEGDGPEHGVEEGTRKRVSLPQWPPPSRAKWAHAAREDSLPEESSAPDFANLKHYQKQQSLPSLCSTSDPDTPLGAPSTPGRISLRISESVLRDSPPPHEDYEDEVFVRDPHPKATSSPTFEPLPPPPPPPPSQETPVYSMDDFPPPPPHTVCEAQLDSEDPEGPRPSFNKLSKVTIARERHMPGAAHVVGSQTLASRLQTSIKGSEAESTPPSFMSVHAQLAGSLGGQPAPIQTQSLSHDPVSGTQGLEKKVSPDPQKSSEDIRTEALAKEIVHQDKSLADILDPDSRLKTTMDLMEGLFPRDVNLLKENSVKRKAIQRTVSSSGCEGKRNEDKEAVSMLVNCPAYYSVSAPKAELLNKIKEMPAEVNEEEEQADVNEKKAELIGSLTHKLETLQEAKGSLLTDIKLNNALGEEVEALISELCKPNEFDKYRMFIGDLDKVVNLLLSLSGRLARVENVLSGLGEDASNEERSSLYEKRKILAGQHEDARELKENLDRRERVVLGILANYLSEEQLQDYQHFVKMKSTLLIEQRKLDDKIKLGQEQVKCLLESLPSDFIPKAGALALPPNLTSEPIPAGGCTFSGIFPTLTSPL

SEQ ID NO: 50660 - protein, 318 aa, Homo sapiens [sequence omitted]

SEQ ID NO: 50661 - protein, 394 aa, Homo sapiens
MNSSGSHKDLAGKYRQILEKAIQLSGAEQLEALKAFVEAMVNENVSLVISRQLLTDFCTHLPNLPDSTAKEIYHFTLEKIQPRVISFEEQVASIRQHLASIYEKEEDWRNAAQVLVGIPLETGQKQYNVDYKLETYLKIARLYLEDDDPVQAEAYINRASLLQNESTNEQLQIHYKVCYARVLDYRRKFIEAAQRYNELSYKTIVHESERLEALKHALHCTILASAGQQRSRMLATLFKDERCQQLAAYGILEKMYLDRIIRGNQLQEFAAMLMPHQKATTADGSSILDRAVIEHNLLSASKLYNNITFEELGALLEIPAAKAEKIASQMITEGRMNGFIDQIDGIVHFETREALPTWDKQIQSLCFQVNNLLEKISQTAPEWTAQAMEAQMAQ

SEQ ID NO: 50662 - protein, 408 aa, Homo sapiens
MNSSGSHKDLAGKYRQILEKAIQLSGAEQLEALKAFVEAMVNENVSLVISRQLLTDFCTHLPNLPDSTAKEIYHFTLEKIQPRVISFEEQVASIRQHLASIYEKEEDWRNAAQVLVGIPLETGQKQYNVDYKLETYLKIARLYLEDDDPVQAEAYINRASLLQNESTNEQLQIHYKVCYARVLDYRRKFIEAAQRYNELSYKTIVHESERLEALKHALHCTILASAGQQRSRMLATLFKDERCQQLAAYGILEKMYLDRIIRGNQLQEFAAMLMPHQKATTADGSSILDRAVIEHNLLSASKLYNNITFEELGALLEIPAAKAEKIASQMITEGRMNGFIDQIDGIVHFETSGNHQSIFCLWIYLVWIVHINGIIQYVTCDLLADSTQHSIFRVHPCHGSTRSPANVG

SEQ ID NO: 50663 - protein, 261 aa, Homo sapiens
MLSLFGTGAILMRGAGCTINDMWDQDYDKKVTRTANRPIAAGDISTFQSFVFLGGQLTLALGVLLCLNYYSIALGAGSLLLVITYPLMKRISYWPQLALGLTFNWGALLGWSAIKGSCDPSVCLPLYFSGVMWTLIYDTIYAHQDKRDDVLIGLKSTALRFGENTKPWLSGFSVAMLGALSLVGVNSGQTAPYYAALGAVGAHLTHQIYTLDIHRPEDCWNKFISNRTLGLIVFLGIVLGNLWKEKKTDKTKKGIENKIEN

SEQ ID NO: 50664 - protein, 218 aa, Homo sapiens
MLSLFGTGAILMRGAGCTINDMWDQDYDKKVTRTANRPIAAGDISTFQSFVFLGGQLTLALGVLLCLNYYSIALGAGSLLLVITYPLMKRISYWPQLALGLTFNWGALLGWSAIKGSCDPSVCLPLYFSGVMWTLIYDTIYAHQDKRDDVLIGLKSTALRFGENTKPWLSGFSVAMLGALSLVGVNSGQTAPYYAALGAVGAHLTHQKWGLEILPRLV

SEQ ID NO: 50665 - protein, 293 aa, Homo sapiens
MPTRPVPSYIQRPDYADHPLGMSESEQALKGTSQIKLLSSEDIEGMRLVCRLAREVLDVAAGMIKPGVTTEEIDHAVHLACIARNCYPSPLNYYNFPKSCCTSVNEVICHGIPDRRPLQEGDIVNVDITLYRNGYHGDLNETFFVGEVDDGARKLVQTTYECLMQAIDAVKPGVRYRELGNIIQKHAQANGFSVVRSYCGHGIHKLFHTAPNVPHYAKNKAVGVMKSGHVFTIEPMICEGGWQDETWPDGWTAVTRDGKRSAQFEHTLLVTDTGCEILTRRLDSARPHFMSQF

SEQ ID NO: 50666 - protein, 234 aa, Homo sapiens [sequence omitted]

SEQ ID NO: 50667 - protein, 115 aa, Homo sapiens
MANEVIKCKAAVAWEAGKPLSIEEIEVAPPKAHEVRIKIIATAVCHTDAYTLSGADPEGCFPVILGHEGAGIVESVGEGVTKLKAGDTVIPLYIPQCGECKFCLNPKTNLCQKIR

SEQ ID NO: 50668 - protein, 190 aa, Homo sapiens
MSLMSTATFLTSKDEGLKATTTDVRKNDSIISNVTVTSVTLPNAVSTLQSSKPKTETQSSIKTTEIPGSVLQPDASPSKTGTLTSIPVTIPENTSQSQVIGTEGGKNASTSATSRSYSSIILPVVIALIVITLSVFVLVGLYRMCWKADPGTPENGNDQPQSDKESVKLLTVKTISHESGEHSAQGKTKN

SEQ ID NO: 50669 - protein, 413 aa, Homo sapiens
MKLFEVGGSPANTRYLFLGDYVDRGYFSIECVLYLWALKILYPKTLFLLRGNHECRHLTEYFTFKQECKIKYSERVYDACMDAFDCLPLAALMNQQFLCVHGGLSPEINTLDDIRKLDRFKEPPAYGPMCDILWSDPLEDFGNEKTQEHFTHNTVRGCSYFYSYPAVCEFLQHNNLLSILRAHEAQDAGYRMYRKSQTTGFPSLITIFSAPNYLDVYNNKAAVLKYENNVMNIRQFNCSPHPYWLPNFMDVFTWSLPFVGEKVTEMLVNVLNICSDDELGSEEDGFDGATAAARKEVIRNKIRAIGKMARVFSVLREESESVLTLKGLTPTGMLPSGVLSGGKQTLQSAIKGFSPQHKITSFEEAKGLDRINERMPPRRDAMPSDANLNSINKALTSETNGTDSNGSNSSNIQ

SEQ ID NO: 50670 - protein, 406 aa, Homo sapiens
MGAASRVGVPEPGQLHFNQCLTAEEIFSLHGFSNATQITSSKFSVICPAVLQQLNFHPCEDRPKHKTRPSHSEVWGYGFLSVTIINLASLLGLILTPLIKKSYFPKILTFFVGLAIGTLFSNAIFQLIPEAFGFDPKVDSYVEKAVAVFGGFYLLFFFERMLKMLLKTYGQNGHTHFGNDNFGPQEKTHQPKALPAINGVTCYANPAVTEANGHIHFDNVSVVSLQDGKKEPSSCTCLKGPKLSEIGTIAWMITLCDALHNFIDGLAIGASCTLSLLQGLSTSIAILCEEFPHELGDFVILLNAGMSTRQALLFNFLSACSCYVGLAFGILVGNNFAPNIIFALAGGMFLYISLADMFPEMNDMLREKVTGRKTDFTFFMIQNAGMLTGFTAILLITLYAGEIELE

SEQ ID NO: 50671 - protein, 252 aa, Homo sapiens
MEKGIEVMFSPHPCPTWTLDWNVLPAAVSPKEGKMSSDRALRKQQQLNNLVYVVTNQAKPGDRIVDFCSGGGHVGIVLAHMLPSCQVTLIENKELSLIRAKKRSDELGLSNIWFIQANMEYFTGMFNIGVALHACGVATDMVIEHCIKTRASFVTCPCCYGFIQNTSKFNFPKSEQFKKTLSYKEHMILCRFADQTAVQLPPQRRLIGKQCMCLVDLDRARAAEECGYSVQVISMEPESCSPKNNMIVGVPI

SEQ ID NO: 50672 - protein, 111 aa, Homo sapiens
MQNRMVILLCNLKPAKMRGVLSQAMVMCASSPEKIEILAPPNGSVPGDRITFDAFPGEPDKELNPKKKIWEQIQPDLHTNDECVATYKGVPFEVKGKGVCRAQTMSNSGIK

SEQ ID NO: 50673 - protein, 948 aa, Homo sapiens
MVDARGGAMRGCRHNGLRIIIPPRKCTAPTRVTCRLVKRHRLATMPPMVEGEGLASRLIEVGPSGAQFLGPVIVEIPHFAALRGKERELVVLRSENGDSWKEHFCDYTEDELNEILNGMDEVLDSPEDLEKKRICRIITRDFPQYFAVVSRIKQDSNLIGPEGGVLSSTVVPQVQAVFPEGALTKRIRVGLQAQPMHSELVKKILGNKATFSPIVTLEPRRRKFHKPITMTIPVPKASSDVMLNGFGGDAPTLRLLCSITGGTTPAQWEDITGTTPLTFVNECVSFTTNVSARFWLIDCRQIQESVTFASQVYREIICVPYMAKFVVFAKSHDPIEARLRCFCMTDDKVDKTLEQQENFAEVARSRDVEVLEGKPIYVDCFGNLVPLTKSGQHHIFSFFAFKENRLPLFVKVRDTTQEPCGRLSFMKEPKSTRGLVHQAICNLNITLPIYTKIDMTSEKNPQDEQERIEERLAYIADHLGFSWTELARELDFTEEQIHQIRIENPNSLQDQSHALLKYWLERDGKHATDTNLVECLTKINRMDIVHLMETNTEPLQERISHSYAEIEQTITLDHSEGFSVLQEELCTAQHKQKEEQAVSKESETCDHPPIVSEEDISVGYSTFQDGVPKTEGDSSATALFPQTHKEQVQQDFSGKMQDLPEESSLEYQQEYFVTTPGTETSETQKAMIVPSSPSKTPEEVSTPAEEEKLYLQTPTSSERGGSPIIQEPEEPSEHREESSPRKTSLVIVESADNQPETCERLDEDAAFEKELTEELGELEASSDEEAMVTTRVVRRRVIIQGDDMPEIPPETVTEEEYIDEHGHTVVKKVTRKIIRRYVSSEGTEKEEIMVQGMPQEPVNIEEGDGYSKVIKRVVLKSDTEQSEVTLCEPSILSSTSQFQAEPVEGRRVSKVVKTTVVLGERMEKHLGDSSLATDLPSAKDDFEEDNNE

SEQ ID NO: 50674 - protein, 107 aa, Homo sapiens [sequence omitted]

SEQ ID NO: 50675 - protein, 931 aa, Homo sapiens
MCTSKSCITHQKFAMTLYEQCVCRSCGASSDPLPFTEFVRYISTTALCNEVERMLERHERFKPEMFAELLQAANTTDDYRKCPSNCGQKIKIRRVLMNCPEIVTIGLVWDSEHSDLTEAVVRNLATHLYLPGLFYRVTDENAKNSELNLVGMICYTSQHYCAFAFHTKSSKWVFFDDANVKEIGTRWKDVVSKCIRCHFQPLLLFYANPDGTAVSTEDALRQVISWSHYKSVAENMGCEKPVIHKSDNLKENGFGDQAKQRENQKFPTDNISSSNRSHSHTGVGKGPAKLSHIDQREKIKDISRECALKAIEQKNLLSSQRKDLEKGQRKDLGRHRDLVDEDLSHFQSGSPPAPNGFKQHGNPHLYHSQGKGSYKHDRVVPQSRASAQIISSSKSQILAPGEKITGKVKSDNGTGYDTDSSQDSRDRGNSCDSSSKSRNRGWKPMRETLNVDSIFSESEKRQHSPRHKPNISNKPKSSKDPSFSNWPKENPKQKGLMTIYEDEMKQEIGSRSSLESNGKGAEKNKGLVEGKVHGDNWQMQRTESGYESSDHISNGSTNLDSPVIDGNGTVMDISGVKETVCFSDQITTSNLNKERGDCTSLQSQHHLEGFRKELRNLEAGYKSHEFHPESHLQIKNHLIKRSHVHEDNGKLFPSSSLQIPKDHNAREHIHQSDEQKLEKPNECKFSEWLNIENSERTGLPFHVDNSASGKRVNSNEPSSLWSSHLRTVGLKPETAPLIQQQNIMDQCYFENSLSTECIIRSASRSDGCQMPKLFCQNLPPPLPPKKYAITSVPQSEKSESTPDVKLTEVFKATSHLPKHSLSTASEPSLEVSTHMNDERHKETFQVRECFGNTPNCPSSSSTNDFQANSGAIDAFCQPELDSISTCPNETVSLTTYFSVDSCMTDTYRLKYHQRPKLSFPESSGFCNNSLS

SEQ ID NO: 50676 - protein, 4911 aa, Homo sapiens
MSIRIQDGFIIFRWWKMYNPKQKQHDPKAETRLYITVNDFEFHVYNRSDLYGRLQELFGLEPTIIPPKKDDDKTREIGRTRTQSKIERVKVKTESQDPTSSWRSLIPVIKVNVSTGRLAFGNHYQPQTLCINFDDAFLTYTTKPPSSHLDQFMHIVKGKLENVRVMLVPSPRYVGLQNDEPPRLMGEGFVVMQSNDVDIYYYMDEPGLVPEETEENIEGEMSSEDCKLQDLPPCWGLDIVCGKGTDFNYGPWADRQRDCLWKFFFPPDYQVLKVSEIAQPGRPRQILAFELRMNIIADATIDLLFTKNRETNAVHVNVGAGSYLEINIPMTVEENGYTPAIKGQLLHVDATTSMQYRTLLEAEMLAFHINASYPRIWNMPQTWQCELEVYKATYHFIFAQKNFFTDLIQDWSSDSPPDIFSFVPYTWNFKIMFHQFEMIWAANQHNWIDCSTKQQENVYLAACGETLNIDFSLPFTDFVPATCNTKFSLRGEDVDLHLFLPDCHPSKYSLFMLVKNCHPNKMIHDTGIPAECQSGQKTVKPKWRNVTQEKSGWVECWTVPSVMLTIDYTWHPIYPQKADEQLKQSLSEMEETMLSVLRPSQKTSDRVVSSPSTSSRPPIDPSELPPDKLHVEMELSPDSQITLYGPLLNAFLCIKENYFGEDDMYMDFEEVISSPVLSLSTSSSSGWTAVGMENDKKENEGSAKSIHPLALRPWDITVLVNLYKVHGRLPVHGTTDGPECPTAFLERLCFEMKKGFRETMLQLILSPLNVFVSDNYQQRPPVDEVLREGHINLSGLQLRAHAMFSAEGLPLGSDSLEYAWLIDVQAGSLTAKVTAPQLACLLEWGQTFVFHVVCREYELERPKSVIICQHGIDRRFCESKLSCIPGPCPTSDDLKYTMIRLAVDGADIYIVEHGCATNIKMGAIRVANCNLHNQSVGEGISAAIQDFQVRQYIEQLNNCRIGLQPAVLRRAYWLEAGSANLGLITVDIALAADHHSKHEAQRHFLETHDARTKRLWFLWPDDILKNKRCRNKCGCLGGCRFFGGTVTGLDFFKLEELTPSSSSAFSSTSAESDMYYGQSLLQPGEWIITKEIPKIIDGNVNGMKRKEWENKSVGIEVERKTQHLSLQVPLRSHSSSSSSEENSSSSAAQPLLAGEKESPSSVADDHLVQKEFLHGTKRDDGQASIPTEISGNSPVSPNTQDKSVGQSPLRSPLKRQASVCSTRLGSTKSLTAAFYGDKQPVTVGVQFSSDVSRSDENVLDSPKQRRSFGSFPYTPSADSNSFHQYRSMDSSMSMADSEAYFSAAEEFEPISSDEGPGTYPGRKKKKKQTQQIDYSRGSIYHSVEGPLTGHGESIQDSRTLPFKTHPSQASFVSALGGEDDVIEHLYIVEGEKTVESEQITPQQPVMNCYQTYLTQFQVINWSVKHPTNKRTSKSSLHRPLDLDTPTSEESSSSFEQLSVPTFKVIKQGLTANSLLDRGMQLSGSTSNTPYTPLEKKLADNTDDETLTEEWTLDQPVSQTRTTAIVEVKGTVDIVLTPLVAEALDRYIEAMVHCASTRHPAAIVDDLHAKVLREAVQNSKTTFSENLSSKQDIRGTKTEQSTIGTTNQGQAQTNLTMKQDNVTIKGLQTNVSIPKVNLCLLQASVEESPTTAPSRSVTHVSLVALCFDRIATQVRMNRGVVEETSNNAEPGRTSNFDRYVHATKMQPQSSGSLRSNAGAEKGKEIAAKLNIHRVHGQLRGLDTTDIGTCAITAIPFEKSKVLFTLEELDEFTFVDETDQQAVPDVTRIGPSQEKWGWIMFECGLENLTIKGGRQSGAVLYNSFGIMGKASDTERGGVLTSNNSSDSPTGSGYNTDVSDDNLPCDRTSPSSDLNGNSVSDEQDEGVESDDLKKDLPLMPPPPDSCSMKLTIKEIWFSFAAPTNVRSHTHAFSRQLNLLSTATPAVGAWLVPIDQLKSSLNKLETEGTLRICAVMGCIMTEALENKSVHFPLRSKYNRLTKVARFLQENPSCLLCNILHHYLHQANYSIIDDATMSDGLPALVTLKKGLVALARQWMKFIVVTPAFKGVSLHRPAQPLKPQIAMDHEHEDGLGLDNGGGLQSDTSADGAEFEFDAATVSEHTMLLEGTANRPPPGSSGPVTGAEIMRKLSKTHTHSDSALKIKGIHPYHSLSYTSGDTATDSPVHVGRAGMPVKDSPRKESLLSYLTGSFPSLHNLLEGTPQRSSAAVKSSSLTRTGNTVATDMLSEHPLLSEPSSVSFYNWMSNAVGNRGSVLQESPVTKSGHNSLPTGVAPNLPTIPSASDFNTVLSSDQNTLDGTHSQHSTSQDDVAGVEEANQGFPAVQLADAQVVFKPLLSHTGIQSQDTMPFCYRMYFGEHLSFSGTLDCLRADIVDSDTAKERKGKRARRQGHVNLPPLEFKPALMLGTFSISAVVMEKSVCTPQNSTSALSFHDLSKRYYNTFHCNFTISCQSISQHVDMALVRLIHQFSTMIDDIKATQTDIKLSRYTAGSASPTPTFKTRKHRDFRSSDFSRSSRGSLNGGNRVNNAKNKRTNNENNKKESRNKNSLGRSERRTSKVSRKGSKDVVDHMTIHMDDSDSITVSEQSEPSAECWQNMYKLLNFYSLISDPTGILEKSSETFGPAGVRSPTEPTCKVVFENEQDNSSLTKTQRKRSLVTSEPQHVTLIVFGIGMVNRTHLEADIGGLTMESELKRIHGSFTLKEKMKDVLHQKMTETCATAHIGGVNIVLLEGITPNIQLEDFPTSPTSTAKQEFLTVVKCSIAKSQALYSAQRGLKTNNAAVFKVGAISINIPQHPATLHSMMVRSSHQLSKQISDLIRQPSTAPQPVKEDIATPLPSEKTPTSVNQTPVETNEFPQLPEGLEKKPIVLKFSAMLDGIAIGAALLPSLKAEYKMGRMRSHGMTGAQTRFTFELPNHRLRFTSKVSATDMSTIPPSASLNLPPVTMSGKYIMEEHDSYSDQVWSIDELPSKQGYYLQGNYLRCVAEVGSFEHNLTTDLLNHLVFVQKVFMKEVNEVIQKVSGGEQPIPLWNEHDGTADGDKPKILLYSLNLQFKGIQVTATTPSMRAVRFETGLIELELSNRLQTKASPGSSSYLKLFGKCQVDLNLALGQIVKHQVYEEAGSDFHQVAYFKTRIGLRNALREEISGSSDREAVLITLNRPIVYAQPVAFDRAVLFWLNYKAAYDNWNEQRMALHKDIHMATKEVVDMLPGIQQTSAQAFGTLFLQLTVNDLGICLPITNTAQSNHTGDLDTGSALVLTIESTLITACSSESLVSKGHFKNFCIRFADGFETSWDDWKPEIHGDLVMNACVVPDGTYEVCSRTTGQAAAESSSAGTWTLNVLWKMCGIDVHMDPNIGKRLNALGNTLTTLTGEEDIDDIADLNSVNIADLSDEDEVDTMSPTIHTEATDYRRQAASASQPGELRGRKIMKRIVDIRELNEQAKVIDDLKKLGASEGTINQEIQRYQQLESVAVNDIRRDVRKKLRRSSMRAASLKDKWGLSYKPSYSRSKSISASGRPPLKRMERASSRVGETEELPEIRVDAASPGPRVTFNIQDTFPEETELDLLSVTIEGPSHYSSNSEGSCSVFSSPKTPGGFSPGIPFQTEEGRRDDSLSSTSEDSEKDEKDEDHERERFYIYRKPSHTSRKKATGFAAVHQLFTERWPTTPVNRSLSGTATERNIDFELDIRVEIDSGKCVLHPTTLLQEHDDISLRRSYDRSSRSLDQDSPSKKKKFQTNYASTTHLMTGKKVPSSLQTKPSDLETTVFYIPGVDVKLHYNSKTLKTESPNASRGSSLPRTLSKESKLYGMKDSATSPPSPPLPSTVQSKTNTLLPPQPPPIPAAKGKGSGGVKTAKLYAWVALQSLPEEMVISPCLLDFLEKALETIPITPVERNYTAVSSQDEDMGHFEIPDPMEESTTSLVSSSTSAYSSFPVDVVVYVRVQPSQIKFSCLPVSRVECMLKLPSLDLVFSSNRGELETLGTTYPAETLSPGGNATQSGTKTSASKTGIPGSSGLGSPLGRSRHSSSQSDLTSSSSSSSGLSFTACMSDFSLYVFHPYGAGKQKTAVSGLTPGSGGLGNVDEEPTSVTGRKDSLSINLEFVKVSLSRIRRSGGASFFESQSVSKSASKMDTTLINISAVCDIGSASFKYDMRRLSEILAFPRAWYRRSIARRLFLGDQTINLPTSGPGTPDSIEGVSQHLSPESSRKAYCKTWEQPSQSASFTHMPQSPNVFNEHMTNSTMSPGTVGQSLKSPASIRSRSVSDSSVPRRDSLSKTSTPFNKSNKAASQQGTPWETLVVFAINLKQLNVQMNMSNVMGNTTWTTSGLKSQGRLSVGSNRDREISMSVGLGRSQLDSKGGVVGGTIDVNALEMVAHISEHPNQQPSHKIQITMGSTEARVDYMGSSILMGIFSNADLKLQDEWKVNLYNTLDSSITDKSEIFVHGDLKWDIFQVMISRSTTPDLIKIGMKLQEFFTQQFDTSKRALSTWGPVPYLPPKTMTSNLEKSSQEQLLDAAHHRHWPGVLKVVSGCHISLFQIPLPEDGMQFGGSMSLHGNHMTLACFHGPNFRSKSWALFHLEEPNIAFWTEAQKIWEDGSSDHSTYIVQTLDFHLGHNTMVTKPCGALESPMATITKITRRRHENPPHGVASVKEWFNYVTATRNEELNLLRNVDANNTENSTTVKNSSLLSGFRGGSSYNHETETIFALPRMQLDFKSIHVQEPQEPSLQDASLKPKVECSVVTEFTDHICVTMDAELIMFLHDLVSAYLKEKEKAIFPPRILSTRPGQKSPIIIHDDNSSDKDREDSITYTTVDWRDFMCNTWHLEPTLRLISWTGRKIDPVGVDYILQKLGFHHARTTIPKWLQRGVMDPLDKVLSVLIKKLGTALQDEKEKKGKDKEEH

SEQ ID NO: 50677 - protein, 189 aa, Homo sapiens
MKSGQVLIGDVLVAVNDVDVTTENIERVLSCIPGPMQVKLTFENAYDVKRETSHPRQKKTQSNTSDLVKLLWGEEVEGIQQSGLNTPHIIMYLTLQLDSETSKEEQEILYHYPMSEASQKLKSVRGIFLTLCDMLENVTGTQVTSSSLLLNGKQIHVAYWKESDKLLLIGLPAEEIELPSSAHTHGERN

SEQ ID NO: 50678 - protein, 427 aa, Homo sapiens [sequence omitted]

SEQ ID NO: 50679 - protein, 323 aa, Homo sapiens
MYYYDDGTGVQVYPVEEALLKEYIKRQIEYYFSVENLERDFFLRGKMDEQGFLPISLIAGFQRVQALTTNLNLILEALKDSTEVEIVDEKMRKKIEPEKWPIPGPPPRSVPPTDFSQLIDCPEFVPGQAFCSHTESAPNSPRIGSPLSPKKNSETSILQAMSRGLSTSLPDLDSEPWIEVKKRHQPAPVKLRESVSVPEGSLNQLCSSEEPEQEELDFLFDEEIEQIGRKNTFTDWSDNDSDYEIDDQDLNKILIVTQTPPYVKKHPGGDRTGTHMSRAKITSELAKVINDGLYYYEQDLWMEEDENKHTAIKVTILRTPFLV

SEQ ID NO: 50680 - protein, 589 aa, Homo sapiens [sequence omitted]

SEQ ID NO: 50681 - protein, 676 aa, Homo sapiens
MRIREQMSESILSFHIPKELISLHIKEDLCRNQEIKELGELSPHWDNLRKNVLTHCDQMVNMYQDILTELSKETGSSFKSSSSKGEKTLEFVPINLHLQRMQVHSPHLKDALYDVITVGAPAAHFQGFKNGGLRKLLHRFETERRNTGYQFIYYSPENTAKAKEVLSNINQLQPLIATHADLLLNSASQHSPDSLKNSLKMLSEKTELFVHAFKDQLVRSALLALYTARPGGILKKPPSPKSSTEESSPQDQPPVMRGQDSIPHHSDYDEEEWDRVWANVGKSLNCIIAMVDKLIERDGGSEGSGGNNDGEKEPSLTDAIPSHPREDWYEQLYPLILTLKDCMGEVVNRAKQSLTFVLLQELAYSLPQCLMLTLRRDIVFSQALAGLVCGFIIKLQTSLYDPGFLQQLHTVGLIVQYEGLLSTYSDEIGMLEDMAVGISDLKKVAFKIIEAKSNDVLPVITGRREHYVVEVKLPARMFESLPLQIKEGQLLHVYPVLFNVGINEQQTLAERFGDVSLQESINQENFELLQEYYKIFMEKMPPDYISHFQEQNDLKALLENLLQNIQSKKRKNVEIMWLAATICRKLNGIRFTCCKSAKDRTSMSVTLEQCSILRDEHQLHKDFFIRALDCMRREGCRIENVLKNIKCRKYAFNMLQLMAFPKYYRPPEGTYGKADT

SEQ ID NO: 50682 - protein, 50 aa, Homo sapiens
MIQIAVLANHQNGRDTHMRQIKIYTPVEESSIGKFPRCTTIDFMMYRSIR

SEQ ID NO: 50683 - protein, 342 aa, Homo sapiens
MGFTIIRKCISAVETRGINDQGLYRVVGVSSKVQRLLSMLMDVKTCNEVDLENSADWEVKTITSALKQYLRSLPEPLMTYELHGDFIVPAKSGSPESRVNAIHFLVHKLPEKNKEMLDILVKHLTNVSNHSKQNLMTVANLGVVFGPTLMRPQEETVAALMDLKFQNIVVEILIENHEKIFRTPPDTTFPEPTCLSASPPNAPPRQSKRQGQRTKRPVAVYNLCLELEDGDNPYPSKEDTPTSSLDSLSSPSPVTTAVPGPPGPDKNHLLADGGSFGDWASTIIRSRKARAVYPCEAEHSSELSFEIGAIFEDVQTSREPGWLEGTLNGKRGLIPQNYVKLL

SEQ ID NO: 50684 - protein, 658 aa, Homo sapiens
MDVLQRTPGSNAEESSILETVTAVAAGKPLSCPNHDGNVMEFYCQSCETAMCRECTEGEHAEHPTVPLKDVVEQHKASLQVQLDAVNKRLPEIDSALQFISEIIHQLTNQKASIVDDIHSTFDELQKTLNVRKSVLLMELEVNYGLKHKVLQSQLDTLLQGQESIKSCSNFTAQALNHGTETEVLLVKKQMSEKLNELADQDFPLHPRENDQLDFIVETEGLKKSIHNLGTILTTNAVASETVATGEGLRQTIIGQPMSVTITTKDKDGELCKTGNAYLTAELSTPDGSVADGEILDNKNGTYEFLYTVQKEGDFTLSLRLYDQHIRGSPFKLKVIRSADVSPTTEGVKRRVKSPGSGHVKQKAVKRPASMYSTGKRKENPIEDDLIFRVGTKGRNKGEFTNLQGVAASTNGKILIADSNNQCVQIFSNDGQFKSRFGIRGRSPGQLQRPTGVAVHPSGDIIIADYDNKWVSIFSSDGKFKTKIGSGKLMGPKGVSVDRNGHIIVVDNKACCVFIFQPNGKIVTRFGSRGNGDRQFAGPHFAAVNSNNEIIITDFHNHSVKVFNQEGEFMLKFGSNGEGNGQFNAPTGVAVDSNGNIIVADWGNSRIQVFDGSGSFLSYINTSADPLYGPQGLALTSDGHVVVADSGNHCFKVYRYLQ

SEQ ID NO: 50685 - protein, 1391 aa, Homo sapiens
MQAETTNTSLLQVQLECSLHNKVCQQLKGCYLESDDVLRLQMSIMVTMENFSKEFEENTQHLLDHLSIVYVATDESETSDDSAVNMYILHSGNSLIWIQDIRHFSQRDALSLQFEPVLLPTSTTNFTKIASFTCKATSCDSGIIEDVKKTTHTPTLKACLFSSVAQGYFRMDSSATQFHIETHENTSGLWSIWYRNHFDRSVVLNDVFLSKETKHMLKILNFTGPLFLPPGCWNIFSLKLAVKDIAINLFTNVFLTTNIGAIFAIPLQIYSAPTKEGSLGFEVIAHCGMHYFMGKSKAGNPNWNGSLSLDQSTWNVDSELANKLYERWKKYKNGDVCKRNVLGTTRFAHLKKSKESESFVFFLPRLIAEPGLMLNFSATALRSRMIKYFVVQNPSSWPVSLQLLPLSLYPKPEALVHLLHRWFGTDMQMINFTTGEFQLTEACPYLGTHSEESRFGILHLHLQPLEMKRVGVVFTPADYGKVTSLILIRNNLTVIDMIGVEGFGARELLKVGGRLPGAGGSLRFKVPESTLMDCRRQLKDSKQILSITKNFKVENIGPLPITVSSLKINGYNCQGYGFEVLDCHQFSLDPNTSRDISIVFTPDFTSSWVIRDLSLVTAADLEFRFTLNVTLPHHLLPLCADVVPGPSWEESFWRLTVFFVSLSLLGVILIAFQQAQYILMEFMKTRQRQNASSSSQQNNGPMDVISPHSYKSNCKNFLDTYGPSDKGRGKNCLPVNTPQSRIQNAAKRSPATYGHSQKKHKCSVYYSKHKTSTAAASSTSTTTEEKQTSPLGSSLPAAKEDICTDAMRENWISLRYASGINVNLQKNLTLPKNLLNKEENTLKNTIVFSNPSSECSMKEGIQTCMFPKETDIKTSENTAEFKERELCPLKTSKKLPENHLPRNSPQYHQPDLPEISRKNNGNNQQVPVKNEVDHCENLKKVDTKPSSEKKIHKTSREDMFSEKQDIPFVEQEDPYRKKKLQEKREGNLQNLNWSKSRTCRKNKKRGVAPVSRPPEQSDLKLVCSDFERSELSSDINVRSWCIQESTREVCKADAEIASSLPAAQREAEGYYQKPEKKCVDKFCSDSSSDCGSSSGSVRASRGSWGSWSSTSSSDGDKKPMVDAQHFLPAGDSVSQNDFPSEAPISLNLSHNICNPMTVNSLPQYAEPSCPSLPAGPTGVEEDKGLYSPGDLWPTPPVCVTSSLNCTLENGVPCVIQESAPVHNSFIDWSATCEGQFSSAYCPLELNDYNAFPEENMNYANGFPCPADVQTDFIDHNSQSTWNTPPNMPAAWGHASFISSPPYLTSTRSLSPMSGLFGSIWAPQSDVYENCCPINPTTEHSTHMENQAVVCKEYYPGFNPFRAYMNLDIWTTTANRNANFPLSRDSSYCGNV

SEQ ID NO: 50686 - protein, 1392 aa, Homo sapiens
MQAETTNTSLLQVQLECSLHNKVCQQLKGCYLESDDVLRLQMSIMVTMENFSKEFEENTQHLLDHLSIVYVATDESETSDDSAVNMYILHSGNSLIWIQDIRHFSQRDALSLQFEPVLLPTSTTNFTKIASFTCKAATSCDSGIIEDVKKTTHTPTLKACLFSSVAQGYFRMDSSATQFHIETHENTSGLWSIWYRNHFDRSVVLNDVFLSKETKHMLKILNFTGPLFLPPGCWNIFSLKLAVKDIAINLFTNVFLTTNIGAIFAIPLQIYSAPTKEGSLGFEVIAHCGMHYFMGKSKAGNPNWNGSLSLDQSTWNVDSELANKLYERWKKYKNGDVCKRNVLGTTRFAHLKKSKESESFVFFLPRLIAEPGLMLNFSATALRSRMIKYFVVQNPSSWPVSLQLLPLSLYPKPEALVHLLHRWFGTDMQMINFTTGEFQLTEACPYLGTHSEESRFGILHLHLQPLEMKRVGVVFTPADYGKVTSLILIRNNLTVIDMIGVEGFGARELLKVGGRLPGAGGSLRFKVPESTLMDCRRQLKDSKQILSITKNFKVENIGPLPITVSSLKINGYNCQGYGFEVLDCHQFSLDPNTSRDISIVFTPDFTSSWVIRDLSLVTAADLEFRFTLNVTLPHHLLPLCADVVPGPSWEESFWRLTVFFVSLSLLGVILIAFQQAQYILMEFMKTRQRQNASSSSQQNNGPMDVISPHSYKSNCKNFLDTYGPSDKGRGKNCLPVNTPQSRIQNAAKRSPATYGHSQKKHKCSVYYSKHKTSTAAASSTSTTTEEKQTSPLGSSLPAAKEDICTDAMRENWISLRYASGINVNLQKNLTLPKNLLNKEENTLKNTIVFSNPSSECSMKEGIQTCMFPKETDIKTSENTAEFKERELCPLKTSKKLPENHLPRNSPQYHQPDLPEISRKNNGNNQQVPVKNEVDHCENLKKVDTKPSSEKKIHKTSREDMFSEKQDIPFVEQEDPYRKKKLQEKREGNLQNLNWSKSRTCRKNKKRGVAPVSRPPEQSDLKLVCSDFERSELSSDINVRSWCIQESTREVCKADAEIASSLPAAQREAEGYYQKPEKKCVDKFCSDSSSDCGSSSGSVRASRGSWGSWSSTSSSDGDKKPMVDAQHFLPAGDSVSQNDFPSEAPISLNLSHNICNPMTVNSLPQYAEPSCPSLPAGPTGVEEDKGLYSPGDLWPTPPVCVTSSLNCTLENGVPCVIQESAPVHNSFIDWSATCEGQFSSAYCPLELNDYNAFPEENMNYANGFPCPADVQTDFIDHNSQSTWNTPPNMPAAWGHASFISSPPYLTSTRSLSPMSGLFGSIWAPQSDVYENCCPINPTTEHSTHMENQAVVCKEYYPGFNPFRAYMNLDIWTTTANRNANFPLSRDSSYCGNV

SEQ ID NO: 50687 - protein, 353 aa, Homo sapiens [sequence omitted]

SEQ ID NO: 50688 - protein, 44 aa, Homo sapiens [sequence omitted]

SEQ ID NO: 50689 - protein, 246 aa, Homo sapiens
MSEVFAFHLDRILGLNRTLPSVSRKAEFIQDGRPCPIILWDASLSSASNDTHSSVKLTWGTYQQLLKQKCWQNGRVPKPESGCTEIHHHEWSKMALFDFLLQIYNRLDTNCCGFRPRKEDACVQNGLRPKCDDQGSAALAHIIQRKHDPRHLVFIDNKGFFDRSEDNLNFKLLEGIKEFPASAVSVLKSQHLRQKLLQSLFLDKVYWESQGGRQGIEKLIDVIEHRAKILITYINAHGVKVLPMNE

SEQ ID NO: 50690 - protein, 978 aa, Homo sapiens
MLGEMMFGSVAMSYKGSTLKIHYIRSPPQLMISKVFSARMGSFCGSTNNLQDSFEYINQDPNLGKLNTNQNSLGPCRTGSNLAHSTPVDMPSRGQNEDRDSGIARSASLSSLLITPFPSPSSSTSSSSSYQRRWLRSQTTSLENGIIPRRSTDETFSLAEETCSSNPAMVRRKKIAISIIFSLCEKEEAQRNFQDFFFSHFPLFESHMNRLKSAIEKAMISCRKIAESSLRVQFYVSRLMEALGEFRGTIWNLYSVPRIAEPVWLTMMSGTLEKNQLCQRFLKEFTLLIEQINKNQFFAALLTAVLTYHLAWVPTVMPVDHPPIKAFSEKRTSQSVNMLAKTHPYNPLWAQLGDLYGAIGSPVRLTRTVVVGKQKDLVQRILYVLTYFLRCSELQENQLTWSGNHGEGDQVLNGSKIITALEKGEVEESEYVVITVRNEPALVPPILPPTAAERHNPWPTGFPECPEGTDSRDLGLKPDKEANRRPEQGSEACSAGCLGPASDASWKPQNAFCGDEKNKEAPQDGSSRLPSCEVLGAGMKMDQQAVCELLKVEMPTRLPDRSVAWPCPDRHLREKPSLEKVTFQIGSFASPESDFESRMKKMEERVKACGPSLEASEAADVAQDPQVSRSPFKPGFQENVCCPQNRLSEGDEGESDKGFAEDRGSRNDMAADIAGQLSHAADLGTASHGAGGTGGRRLEATRGLYVKAAEGPVLEPVAPRCVQRGPGLVAGANIPCGDDNKKANFRTEGDIPRNESSDSALGDSDDEACASAMLDLGHGGDRTGGSLEVELPLPRSQSISTQNVRNFGRSLLAGYCPTYMPDLVLHGTGSDEKLKQCLVADLVHTVHHPVLDEPIAEAVCIIADTDKWSVQVATSQRKVTDNMKLGQDVLVSSQVSSLLQSILQLYKLHLPADFCIMHLEDRLQEMYLKSKMLSEYLRGHTRVHVKELGVVLGIESNDLPLLTAIASTHSPYVAQILL

SEQ ID NO: 50691 - protein, 320 aa, Homo sapiens
MKNLVLKIISGSFPPVSLHYSYDLRSLVSQLFKRNPRDRPSVNSILEKGFIAKRIEKFLSPQLIAEEFCLKTFSKFGSQPIPAKRPASGQNSISVMPAQKITKPAAKYGIPLAYKKYGDKKLHEKKPLQKHKQAHQTPEKRVNTGEERRKISEEAARKRRLEFIEKEKKQKDQIISLMKAEQMKRQEKERLERINRAREQGWRNVLSAGGSGEVKAPFLGSGGTIAPSSFSSRGQYEHYHAIFDQMQQQRAEDNEAKWKREIYGRGLPERGILPGVRPGFPYGAAGHHHFPDADDIRKTLKRLKAVSKQANANRLDCDDP

SEQ ID NO: 50692 - protein, 350 aa, Homo sapiens
MTVLYPEYWKMYKCQLRKGGWQHNREQANLNSRTEETIKFAAAHYNTEILKSIDNEWRKTQCMPREVCIDVGKEFGVATNTFFKPPCVSVYRCGGCCNSEGLQCMNTSTSYLSKTLFEITVPLSQGPKPVTISFANHTSCRCMSKLDVYRQVHSIIRRSLPATLPQCQAANKTCPTNYMWNNHICRCLAQEDFMFSSDAGDDSTDGFHDICGPNKELDEETCQCVCRAGLRPASCGPHKELDRNSCQCVCKNKLFPSQCGANREFDENTCQCVCKRTCPRNQPLNPGKCACECTESPQKCLLKGKKFHHQTCSCYRRPCTNRQKACEPGFSYSEEVCRCVPSYWKRPQMS

SEQ ID NO: 50693 - protein, 13 aa, Homo sapiens
MCQCDWKLRCCLQ

SEQ ID NO: 50694 - protein, 89 aa, Homo sapiens [sequence omitted]

SEQ ID NO: 50695 - protein, 2574 aa, Homo sapiens
MSPEHAMRLWGRGVKSGRSSCLSSRSNSALTLTDTEHENKSDSENEQPASNQGQSTLQPLPPSHKQHSAQHHPSITSLNRNSLTNRRNQSPAPPAALPAELQTTPESVQLQDSWVLGSNVPLESRHFLFKTGTGTTPLFSTATPGYTMASGSVYSPPTRPLPRNTLSRSAFKFKKSSKYCSWKCTALCAVGVSVLLAILLSYFIAMHLFGLNWQLQQTENDTFENGKVNSDTMPTNTVSLPSGDNGKLGGFTQENNTIDSGELDIGRRAIQEIPPGIFWRSQLFIDQPQFLKFNISLQKDALIGVYGRKGLPPSHTQYDFVELLDGSRLIAREQRSLLETERAGRQARSVSLHEAGFIQYLDSGIWHLAFYNDGKNAEQVSFNTIVIESVVECPRNCHGNGECVSGTCHCFPGFLGPDCSRAACPVLCSGNGQYSKGRCLCFSGWKGTECDVPTTQCIDPQCGGRGICIMGSCACNSGYKGESCEEADCIDPGCSNHGVCIHGECHCSPGWGGSNCEILKTMCPDQCSGHGTYLQESGSCTCDPNWTGPDCSNEICSVDCGSHGVCMGGTCRCEEGWTGPACNQRACHPRCAEHGTCKDGKCECSQGWNGEHCTIEGCPGLCNSNGRCTLDQNGWHCVCQPGWRGAGCDVAMETLCTDSKDNEGDGLIDCMDPDCCLQSSCQNQPYCRGLPDPQDIISQSLQSPSQQAAKSFYDRISFLIGSDSTHVIPGESPFNKSLASVIRGQVLTADGTPLIGVNVSFFHYPEYGYTITRQDGMFDLVANGGASLTLVFERSPFLTQYHTVWIPWNVFYVMDTLVMKKEENDIPSCDLSGFVRPNPIIVSSPLSTFFRSSPEDSPIIPETQVLHEETTIPGTDLKLSYLSSRAAGYKSVLKITMTQSIIPFNLMKVHLMVAVVGRLFQKWFPASPNLAYTFIWDKTDAYNQKVYGLSEAVVSVGYEYESCLDLTLWEKRTAILQGYELDASNMGGWTLDKHHVLDVQNGILYKGNGENQFISQQPPVVSSIMGNGRRRSISCPSCNGQADGNKLLAPVALACGIDGSLYVGDFNYVRRIFPSGNVTSVLELSSNPAHRYYLATDPVTGDLYVSDTNTRRIYRPKSLTGAKDLTKNAEVVAGTGEQCLPFDEARCGDGGKAVEATLMSPKGMAVDKNGLIYFVDGTMIRKVDQNGIISTLLGSNDLTSARPLTCDTSMHISQVRLEWPTDLAINPMDNSIYVLDNNVVLQITENRQVRIAAGRPMHCQVPGVEYPVGKHAVQTTLESATAIAVSYSGVLYITETDEKKINRIRQVTTDGEISLVAGIPSECDCKNDANCDCYQSGDGYAKDAKLSAPSSLAASPDGTLYIADLGNIRIRAVSKNKPLLNSMNFYEVASPTDQELYIFDINGTHQYTVSLVTGDYLYNFSYSNDNDITAVTDSNGNTLRIRRDPNRMPVRVVSPDNQVIWLTIGTNGCLKSMTAQGLELVLFTYHGNSGLLATKSDETGWTTFFDYDSEGRLTNVTFPTGVVTNLHGDMDKAITVDIESSSREEDVSITSNLSSIDSFYTMVQDQLRNSYQIGYDGSLRIIYASGLDSHYQTEPHVLAGTANPTVAKRNMTLPGENGQNLVEWRFRKEQAQGKVNVFGRKLRVNGRNLLSVDFDRTTKTEKIYDDHRKFLLRIAYDTSGHPTLWLPSSKLMAVNVTYSSTGQIASIQRGTTSEKVDYDGQGRIVSRVFADGKTWSYTYLEKSMVLLLHSQRQYIFEYDMWDRLSAITMPSVARHTMQTIRSIGYYRNIYNPPESNASIITDYNEEGLLLQTAFLGTSRRVLFKYRRQTRLSEILYDSTRVSFTYDETAGVLKTVNLQSDGFICTIRYRQIGPLIDRQIFRFSEDGMVNARFDYSYDNSFRVTSMQGVINETPLPIDLYQFDDISGKVEQFGKFGVIYYDINQIISTAVMTYTKHFDAHGRIKEIQYEIFRSLMYWITIQYDNMGRVTKREIKIGPFANTTKYAYEYDVDGQLQTVYLNEKIMWRYNYDLNGNLHLLNPSNSARLTPLRYDLRDRITRLGDVQYRLDEDGFLRQRGTEIFEYSSKGLLTRVYSKGSGWTVIYRYDGLGRRVSSKTSLGQHLQFFYADLTYPTRITHVYNHSSSEITSLYYDLQGHLFAMEISSGDEFYIASDNTGTPLAVFSSNGLMLKQIQYTAYGEIYFDSNIDFQLVIGFHGGLYDPLTKLIHFGERDYDILAGRWTTPDIEIWKRIGKDPAPFNLYMFRNNNPASKIHDVKDYITDVNSWLVTFGFHLHNAIPGFPVPKFDLTEPSYELVKSQQWDDIPPIFGVQQQVARQAKAFLSLGKMAEVQVSRRRAGGAQSWLWFATVKSLIGKGVMLAVSQGRVQTNVLNIANEDCIKVAAVLNNAFYLENLHFTIEGKDTHYFIKTTTPESDLGTLRLTSGRKALENGINVTVSQSTTVVNGRTRRFADVEMQFGALALHVRYGMTLDEEKARILEQARQRALARAWAREQQRVRDGEEGARLWTEGEKRQLLSAGKVQGYDGYYVLSVEQYPELADSANNIQFLRQSEIGRR

SEQ ID NO: 50696 - protein, 1094 aa, Homo sapiens
MLKDYLSVAQDALRTQKELYHVKEQRLALALDEYVRLNDAYKEKSSSHTSLFSGSSSSTKYDPDILKAEISTTRLRVKKLKRELSQMKQELLYKEQGFETLQQIDKKMSGGQSGYELSEAKAILTELKSIRKAISSGEKEKQDLMQSLAKLQERFHLDQNIGRSEPDLRCSPVNSHLCLSRQTLDAGSQTSISGDIGVRSRSNLAEKVRLSLQYEEAKRSMANLKIELSKLDSEAWPGALDIEKEKLMLINEKEELLKELQFVTPQKRTQDELERLEAERQRLEEELLSVRGTPSRALAERLRLEERRKELLQKLEETTKLTTYLHSQLKSLSASTLSMSSGSSLGSLASSRGSLNTSSRGSLNSLSSTELYYSSQSDQIDVDYQYKLDFLLQEKSGYIPSGPITTIHENEVVKSPSQPGQSGLCGVAAAATGHTPPLAEAPKSVASLSSRSSLSSLSPPGSPLVLEGTFPMSSSHDASLHQFTADFEDCELSSHFADISLIENQILLDSDSGGASQSLSEDKDLNECAREPLYEGTADVEKSLPKRRVIHLLGEKTTCVSAAVSDESVAGDSGVYEAFVKQPSEMEDVTYSEEDVAIVETAQVQIGLRYNAKSSSFMVIIAQLRNLHAFLIPHTSKVYFRVAVLPSSTDVSCLFRTKVHPPTESILFNDVFRVAISQTALQQKTLRVDLCSVSKHRREECLAGTQISLADLPFSSEVFTLWYNLLPSKQMPCKKNEENEDSVFQPNQPLVDSIDLDAVSALLARTSAELLAVEQELAQEEEEESGQEEPRGPDGDWLTMLREASDEIVAEKEAEVKLPEDSSCTEDLSSCTSVPEMNEDGNRKESNCAKDLRSQPPTRIPTLVDKETNTDEAANDNMAVRPKERSSLSSRQHPFVRSSVIVRSQTFSPGERNQYICRLNRSDSDSSTLAKKSLFVRNSTERRSLRVKRTVCQSVLRRTTQECPVRTSLDLELDLQASLTRQSRLNDELQALRDLRQKLEELKAQGETDLPPGVLEDERFQRLLKQAEKQAEQSKEEQKQGLNAEKLMRQVSKDVCRLREQSQKVPRQVQSFREKIAYFTRAKISIPSLPADDV

SEQ ID NO: 50697 - protein, 7 aa, Homo sapiens
MSHGKWD

SEQ ID NO: 50698 - protein, 289 aa, Homo sapiens
MGEKHLFVDLGVYTRNRNFRLYKSSKIGKRVALEVTEDNKFFPIQSKDVSDEYQYFLSSLVSNVRFSDTLRILTCEPSQNKQKGVGYFNSIGTSVETIEGFQCSPYPEVDHFVLSLVNKDGIKGGIRRWNYFFPEELLVYDICKYRWCENIGRAHKSNNIMILVDLKNEVWYQKCHDPVCKAENFKSDCFPLPAEVCLLFLFKEEEEFTTDEADETRSNETQNPHKPSPSRLSTGASADAVWDNGIDDAYFLEATEDAELAEAAENSLLSYNSEVDEIPDELIIEVLQE

SEQ ID NO: 50699 - protein, 749 aa, Homo sapiens
MVQSEISEILNKSIIEVENPQFSSEKNLVFGTRIEKDLPTENQEENLSMEKSHHFEDSKTLHSVEEKLSGDSVNSLPQSVNVPSQIHSEDTLTLRTSTDNLSSNIIIHPSENSDILKNYNNFYRFLPTAPPNVMSQADTVILDKSKITVPFLKHGFCENLDDICHSIKQMKEELQKSHDGEVALTNELQTLQTDPDVHRNGKYDMSPIHQDKMNFIKEENLDGNLNEDIKSKRISELEALVKKLLPFRETVSKFHVHFCRKCKKLSKSEMHRGKKNEKNNKEIPITGKNITDLKFHSRVPRYTLSFLDQTKHEMKDKERQPFLVKQGSIISENEKTSKVNSVTEQCVAKIQYLQNYLKESVQIQKKVMELESENLNLKSKMKPLIFTTQSLIQKVETYEKQLKNLVEEKSTIQSKLSKTEEYSKECLKEFKKIISKYNVLQGQNKTLEEKNIQLSLEKQQMMEALDQLKSKEHKTQSDMAIVNNENNRMSIEMEAMKTNILLIQDEKEMLEKKTHQLLKEKSSLGNELKESQLEIIQLKEKERLAKTEQETLLQIIETVKDEKLNLETTLQESTAARQIMEREIENIQTYQSTAEENFLQEIKNAKSEASIYKNSLSEIGKECEMLSKMVMETKTDNQILKEELKKHSQENIKFENSISRLTEDKILLENYVRSIENERDTLEFEMRHLQREYLSLSDKICNQHNDPSKTTYISRREKFHFDNYTHEDTSSPQSRPLASDLKDLSLEQM

SEQ ID NO: 50700 - protein, 135 aa, Homo sapiens
MFKQIHMVHKPDDDTDMYNTPYTYNAGLYNPPYSAQSHPAAKTQTYRPLSKSHSDNSPNAFKDASSPVPPPHVPPPVPPLRPRDRSSTEKHDWDPPDRKVDTRKFRSEPRSIFEYEPGKSSILQHERPVTKPQAS

SEQ ID NO: 50701 - protein, 118 aa, Homo sapiens
MFKQIHMVHKPGLYNPPYSAQSHPAAKTQTYRPLSKSHSDNSPNAFKDASSPVPPPHVPPPVPPLRPRDRSSTEKHDWDPPDRKVDTRKFRSEPRSIFEYEPGKSSILQHERPVSTCH

SEQ ID NO: 50702 - protein, 7 aa, Homo sapiens
MKCLDLD

SEQ ID NO: 50703 - protein, 479 aa, Homo sapiens
MRPIPTVARAYPLVGHALLMKPDGREFFQQIIEYTEEYRHMPLLKLWVGPVPMVALYNAENVEVILTSSKQIDKSSMYKFLEPWLGLGLLTSTGNKWRSRRKMLTPTFHFTILEDFLDIMNEQANILVKKLEKHINQEAFNCFFYITLCALDIICETAMGKNIGAQSNDDSEYVRAVYRMSEMIFRRIKMPWLWLDLWYLMFKEGWEHKKSLQILHTFTNSVIAERANEMNANEDCRGDGRGSAPSKNKRRAFLDLLLSVTDDEGNRLSHEDIREEVDTFMFEGHDTTAAAINWSLYLLGSNPEVQKKVDHELDDVFGKSDRPATVEDLKKLRYLECVIKETLRLFPSVPLFARSVSEDCEVAGYRVLKGTEAVIIPYALHRDPRYFPNPEEFQPERFFPENAQGRHPYAYVPFSAGPRNCIGQKFAVMEEKTILSCILRHFWIESNQKREELGLEGQLILRPSNGIWIKLKRRNADER

SEQ ID NO: 50704 - protein, 443 aa, Homo sapiens
MIIKHPMDFGTMKDKIVANEYKSVTEFKADFKLMCDNAMTYNRPDTVYYKLAKKILHAGFKMMSKERLLALKRSMSFMQDMDFSQQAALLGNEDTAVEEPVPEVVPVQVETAKKSKKPSREVISCMFEPEGNACSLTDSTAEEHVLALVEHAADEARDRINRFLPGGKMGYLKRNGDGSLLYSVVNTAEPDADEEETHPVDLSSLSSKLLPGFTTLGFKDERRNKVTFLSSATTALSMQNNSVFGDLKSDEMELLYSAYGDETGVQCALSLQEFVKDAGSYSKKVVDDLLDQITGGDHSRTLFQLKQRRNVPMKPPDEAKVGDTLGDSSSSVLEFMSMKSYPDVSVDISMLSSLGKVKKELDPDDSHLNLDETTKLLQDLHEAQAERGGSRPSSNLSSLSNASERDQHHLGSPSRLSVGEQPDVTHDPYEFLQSPEPAASAKT

SEQ ID NO: 50705 - protein, 59 aa, Homo sapiens
MDSHLLGARTLPPSLPPASITTSLARLPSQPSLAANPSSIPQQAPLPAPQLLHGRRVRS

SEQ ID NO: 50706 - protein, 75 aa, Homo sapiens
MLRCRRGSLVDIGSGDGRIVIAAAKKGFTAVGYELNPWLVWYSRYRAWREGYFFAVLERCYFRCASDDAAVGEET

SEQ ID NO: 50707 - protein, 184 aa, Homo sapiens
MTTSLYSPAVAIVCQTVCPESPPSVGKRRLAVQEILAARAARGPQAQEEDEVGGAGQRGRTGQEDADSREGSPRAGLPPALGSRGPAAPAPRKASLLPLQRLRRRSVRPGVVVPRVRVSKAPAPTFQPERPARKGSTKDSGHLQIPKWRYKEAKEEKRKAEEAEKKRQAEAQKERRTAPWKKRT

SEQ ID NO: 50708 - protein, 427 aa, Homo sapiens
MSDFKNVGLVFVNSKRDRTKAVLCMVVAGAIAAVFHTLIAYSDLGYYIINKLHHVDESVGSKTRRAFLYLAAFPFMDAMAWTHAGILLKHKYSFLVGCASISDVIAQVVFVAILLHSHLECREPLLIPILSLYMGALVRCTTLCLGYYKNIHDIIPDRSGPELGGDATIRKMLSFWWPLALILATQRISRPIVNLFVSRDLGGSSAATEAVAILTATYPVGHMPYGWLTEIRAVYPAFDKNNPSNKLVSTSNTVTAAHIKKFTFVCMALSLTLCFVMFWTPNVSEKILIDIIGVDFAFAELCVVPLRIFSFFPVPVTVRAHLTGWLMTLKKTFVLAPSSVLRIIVLIASLVVLPYLGVHGATLGVGSLLAGFVGESTMVAIAACYVYRKQKKKMENESATEGEDSAMTDMPPTEEVTDIVEMREENE

SEQ ID NO: 50709 - protein, 490 aa, Homo sapiens
MFDTLKDWCWELERTKGNMKYKAVSVNEGYKVCERLPAYFVVPTPLPEENVQRFQGHGIPIWCWSCHNGSALLKMSALPKEQDDGILQIQKSFLDGIYKTIHRPPYEIVKTEDLSSNFLSLQEIQTAYSKFKQLFLIDNSTEFWDTDIKWFSLLESSSWLDIIRRCLKKAIEITECMEAQNMNVLLLEENASDLCCLISSLVQLMMDPHCRTRIGFQSLIQKEWVMGGHCFLDRCNHLRQNDKEEVPVFLLFLDCVWQLVHQHPPAFEFTETYLTVLSDSLYIPIFSTFFFNSPHQKDTNMHQRQLSLPLTQSKSSPKRGFFREETDHLIKNLLGKRISKLINSSDELQDNFREFYDSWHSKSTDYHGLLLPHIEGPEIKVWAQRYLRWIPEAQILGGGQVATLSKLLEMMEEVQSLQEKIDERHHSQQAPQAEAPCLLRNSARLSSLFPFALLQRHSSKPVLPTSGWKALGDEDDLAKREDEFVDLGDV

SEQ ID NO: 50710 - protein, 544 aa, Homo sapiens
MFDTLKDWCWELERTKGNMKYKAVSVNEGYKVCERLPAYFVVPTPLPEENVQRFQGHGIPIWCWSCHNGSALLKMSALPKEQDDGILQIQKSFLDGIYKTIHRPPYEIVKTEDLSSNFLSLQEIQTAYSKFKQLFLIDNSTEFWDTDIKWFSLLESSSWLDIIRRCLKKAIEITECMEAQNMNVLLLEENASDLCCLISSLVQLMMDPHCRTRIGFQSLIQKEWVMGGHCFLDRCNHLRQNDKEEVPVFLLFLDCVWQLVHQHPPAFEFTETYLTVLSDSLYIPIFSTFFFNSPHQKDTNMGREGQDTQSKPLNLLTVWDWSVQFEPKAQTLLKNPLYVEKPKLDKGQRKGMRFKHQRQLSLPLTQSKSSPKRGFFREETDHLIKNLLGKRISKLINSSDELQDNFREFYDSWHSKSTDYHGLLLPHIEGPEIKVWAQRYLRWIPEAQILGGGQVATLSKLLEMMEEVQSLQEKIDERHHSQQAPQAEAPCLLRNSARLSSLFPFALLQRHSSKPVLPTSGWKALGDEDDLAKREDEFVDLGDV

SEQ ID NO: 50711 - protein, 119 aa, Homo sapiens
MLKEWEKFQEEAKNRDHRKIGRDQELYFFHELSPGSCFFLPKGAYIYNALIEFIRSEYRKRGFQEVVTPNIFNSRLWMTSGHWQHYSENMFSFEVEKELFALKPMNCPGHWYSAALNFY

SEQ ID NO: 50712 - protein, 1337 aa, Homo sapiens
MIEYHGSENVESYILTIMNMVTGLFHNPSIGNAIHIVVVRLILLEEEEQGLKIVHHAEKTLSSFCKWQKSINPKSDLNPVHHDVAVLLTRKDICAGFNRPCETLGLSHLSGMCQPHRSCNINEDSGLPLAFTIAHELGHSFGIQHDGKENDCEPVGRHPYIMSRQLQYDPTPLTWSKCSEEYITRFLDRGWGFCLDDIPKKKGLKSKVIAPGVIYDVHHQCQLQYGPNATFCQEVENVCQTLWCSVKGFCRSKLDAAADGTQCGEKKWCMAGKCITVGKKPESIPGGWGRWSPWSHCSRTCGAGVQSAERLCNNPEPKFGGKYCTGERKRYRLCNVHPCRSEAPTFRQMQCSEFDTVPYKNELYHWFPIFNPAHPCELYCRPIDGQFSEKMLDAVIDGTPCFEGGNSRNVCINGICKMVGCDYEIDSNATEDRCGVCLGDGSSCQTVRKMFKQKEGSGYVDIGLIPKGARDIRVMEIEGAGNFLAIRSEDPEKYYLNGGFIIQWNGNYKLAGTVFQYDRKGDLEKLMATGPTNESVWIQLLFQVTNPGIKYEYTIQKDGLDNDVEQQMYFWQYGHWTECSVTCGTGIRRQTAHCIKKGRGMVKATFCDPETQPNGRQKKCHEKACPPRWWAGEWEACSATCGPHGEKKRTVLCIQTMVSDEQALPPTDCQHLLKPKTLLSCNRDILCPSDWTVGNWSECSVSCGGGVRIRSVTCAKNHDEPCDVTRKPNSRALCGLQQCPSSRRVLKPNKGTISNGKNPPTLKPVPPPTSRPRMLTTPTGPESMSTSTPAISSPSPTTASKEGDLGGKQWQDSSTQPELSSRYLISTGSTSQPILTSQSLSIQPSEENVSSSDTGPTSEGGLVATTTSGSGLSSSRNPITWPVTPFYNTLTKGPEMEIHSGSGEEREQPEDKDESNPVIWTKIRVPGNDAPVESTEMPLAPPLTPDLSRESWWPPFSTVMEGLLPSQRPTTSETGTPRVEGMVTEKPANTLLPLGGDHQPEPSGKTANRNHLKLPNNMNQTKSSEPVLTEEDATSLITEGFLLNASNYKQLTNGHGSAHWIVGNWSECSTTCGLGAYWRRVECSTQMDSDCAAIQRPDPAKRCHLRPCAGWKVGNWSKCSRNCSGGFKIREIQCVDSRDHRNLRPFHCQFLAGIPPPLSMSCNPEPCEAWQVEPWSQCSRSCGGGVQERGVFCPGGLCDWTKRPTSTMSCNEHLCCHWATGNWDLCSTSCGGGFQKRTVQCVPSEGNKTEDQDQCLCDHKPRPPEFKKCNQQACKKSADLLCTKDKLSASFCQTLKAMKKCSVPTVRAECCFSCPQTHITHTQRQRRQRLLQKSKEL

SEQ ID NO: 50713 - protein, 163 aa, Homo sapiens
MLFLEEGGVVTVCKINTQEPEETLDFDFCSTNVINKIILQSEGLREAFSELDMTSEVLQITMSPDKPYFRLSTFGNAGSSHLDYPKDSDLMEAFHCNQTQVNRYKISLLKPSTKALVLSCKVSIRTDNRGFLSLQYMIRNEDGQICFVEYYCCPDEEVPESES

SEQ ID NO: 50714 - protein, 276 aa, Homo sapiens
MQDLRMLMPHSKADTKMDRKDKLFVINEVCEMKNCNKCIYFEAKKKQDLYMWLSNSPHGPSAKFLVQNIHTLAELKMTGNCLKGSRPLLSFDPAFDELPHYALLKELLIQIFSTPRYHPKSQPFVDHVFTFTILDNRIWFRNFQIIEEDAALVEIGPRFVLNLIKIFQGSFGGPTLYENPHYQSPNMHRRVIRSITAAKYREKQQVKDVQKLRKKEPKTLLPHDPTADVFVTPAEEKPIEIQWVKPEPKVDLKARKKRIYKRQRKMKQRMDSGKTK

SEQ ID NO: 50715 - protein, 450 aa, Homo sapiens [sequence omitted]

SEQ ID NO: 50716 - protein, 171 aa, Homo sapiens
MVFSLLQVVSGESGYAQNGDLEDAELDDYSFSCYSQLEVNGSQHSLTCAFEDPDVNITNLEFEICGALVEVKCLNFRKLQEIYFIETKKFLLIGKSNICVKVGEKSLTCKKIDLTTIVKPEAPFDLSVVYREGANDFVVTFNTSHLQKKYVKVLMHDVAYRQEKDENKWTD

SEQ ID NO: 50717 - protein, 373 aa, Homo sapiens
MGTDPEPAMRNKADQQLVEIDKKYAGFIHMKAVAGMKMSYQVQQAINTCLKDPVRGFRQDESSSALCSHLYSMIRGNRQHRRAFLISLLNLFDDTAKTDVTMLLYIADNLACFPYQTQEEPLFIMHHIDITLSVSGSNLLQSFKESMVKDKRKERKSSPSKENESSDSEEEVSRPRKSRKRVDSDSDSDSEDDINSVMKCLPENSAPLIEFANVSQGILLLLMLKQHLKNLCGFSDSKIQKYSPSESAKVYDKAINRKTGVHFHPKQTLDFLRSDMANSKITEEVKRSIVKQYLDFKLLMEHLDPDEEEEEGEVSASTNARNKAITSLLGGGSPKNNTAAETEDDESDGEDRGGGTSGVRRRRSQRISQRITH

SEQ ID NO: 50718 - protein, 707 aa, Homo sapiens
MKVQARDVTARDSILSHKVLDEDSKEDLLAGVENLEIRDIQTINPLDVLCATMLCSDSSLQRQVMSNMYQCQFALPLLLPDAENNKSILMLGAMKDIVKKQSTQFSGGPTEDTEKFLTLMKMPVISFVRLGYCSFSKSRILNTLLSPAQLKLHKIFLHQDLPLLVLPRQISDGLVEITWCFPDSDDRKENPFFQKPVALANLRGNLESFWTQFGFLMEVSSAVFFFTDCLGEKEWDLLMFLGEAAIERCYFVLSSQARESEEAQIFQRILNLKPAQLLFWERGDAGDRRKNMEGLQAALQEVMFSSCLRCVSVEDMAALARELGIQVDEDFENTQRIQVSSGENMAGTAEGEGQQRHSQLKSSSKSQALMPIQEPGTQCELSQNLQNLYGTPVFRPVLENSWLFPTRIGGNFNHVSLKASWVMGRPFGSEQRPKWFHPLPFQNAGAQGRGKSFGIQSFHPQIFYSGERFMKFSRVARGCHSNGTFGRLPRPICQHVQACPERPQMMGTLERSRAVASKIGHSYSLDSQPARAVGKPWPQQACTRVTELTEATGKLIRTSHIGKPHPQSFQPAAATQKLRPASQQGVQMKTQGGASNPALQIGSHPMCKSSQFKSDQSNPSTVKHSQPKPFHSVPSQPKSSQTKSCQSQPSQTKPSPCKSTQPKPSQPWPPQSKPSQPRPPQPKSSSTNPSQAKAHHSKAGQKRGGKH

SEQ ID NO: 50719 - protein, 360 aa, Homo sapiens
MWHTYNLVQVGDSLRASTIRKVQTESSTGSVGSNRVRTTLTLCVEAIDFDSQACQLRVKGTNIQENEYVKMGAYHTIELEPNRQFTLAKKQWDSVVLERIEQACDPAWSADVAAVVMQEGLAHICLVTPSMTLTRAKVEVNIPRKRKGNCSQHDRALERFYEQVVQAIQRHIHFDVVKCILVASPGFVREQFCDYLFQQAVKTDNKLLLENRSKFLQVHASSGHKYSLKEALCDPTVASRLSDTKAAGEVKALDDFYKMLQHEPDRAFYGLKQVEKANEAMAIDTLLISDELFRHQDVATRSRYVRLVDSVKENAGTVRIFSSLHVSGEQLSQLTGVAAILRFPVPELSDQEGDSSSEED

SEQ ID NO: 50720 - protein, 1143 aa, Homo sapiens [sequence omitted]

SEQ ID NO: 50721 - protein, 27 aa, Homo sapiens
MHFTLFNIGQSSRQASSSLSTRDQKIF

SEQ ID NO: 50722 - protein, 1225 aa, Homo sapiens
MTNTLLYGGDLHSALDWLCLNLSDDALPEGFSQEFEEQQPKSRPKFQSPQIQATISPPLQPKTKTYEEDPKSKPKKEEKNMEVNMKEWILRYAEQQNEEEKNENSKSLEEEEKFDPNERYLHLAAKLLDAKEQAATFKLEKNKQGQKEAQEKIRKFQREMETLEDHPVFNPAMKISHQQNERKKPPVATEGESALNFNLFEKSAAATEEEKDKKKEPHDVRNFDYTARSWTGKSPKQFLIDWVRKNLPKSPNPSFEKVPVGRYWKCRVRVIKSEDDVLVVCPTILTEDGMQAQHLGATLALYRLVKGQSVHQLLPPTYRDVWLEWSDAEKKREELNKMETNKPRDLFIAKLLNKLKQQQQQQQQHSENKRENSEDPEESWENLVSDEDFSALSLESANVEDLEPVRNLFRKLQSTPKYQKLLKERQQLPVFKHRDSIVETLKRHRVVVVAGETGSGKSTQVPHFLLEDLLLNEWEASKCNIVCTQPRRISAVSLANRVCDELGCENGPGGRNSLCGYQIRMESRACESTRLLYCTTGVLLRKLQEDGLLSNVSHVIVDEVHERSVQSDFLLIILKEILQKRSDLHLILMSATVDSEKFSTYFTHCPILRISGRSYPVEVFHLEDIIEETGFVLEKDSEYCQKFLEEEEEVTINVTSKAGGIKKYQEYIPVQTGAHADLNPFYQKYSSRTQHAILYMNPHKINLDLILELLAYLDKSPQFRNIEGAVLIFLPGLAHIQQLYDLLSNDRRFYSERYKVIALHSILSTQDQAAAFTLPPPGVRKIVLATNIAETGITIPDVVFVIDTGRTKENKYHESSQMSSLVETFVSKASALQRQGRAGRVRDGFCFRMYTRERFEGFMDYSVPEILRVPLEELCLHIMKCNLGSPEDFLSKALDPPQLQVISNAMNLLRKIGACELNEPKLTPLGQHLAALPVNVKIGKMLIFGAIFGCLDPVATLAAVMTEKSPFTTPIGRKDEADLAKSALAMADSDHLTIYNAYLGWKKARQEGGYRSEITYCRRNFLNRTSLLTLEDVKQELIKLVKAAGFSSSTTSTSWEGNRASQTLSFQEIALLKAVLVAGLYDNVGKIIYTKSVDVTEKLACIVETAQGKAQVHPSSVNRDLQTHGWLLYQEKIRYARVYLRETTLITPFPVLLFGGDIEVQHRERLLSIDGWIYFQAPVKIAVIFKQLRVLIDSVLRKKLENPKMSLENDKILQIITELIKTENN

SEQ ID NO: 50723 - protein, 831 aa, Homo sapiens
MTGDVTINPTASCLVMTTEILRSMLYRGSEVMREVAWVIFDEIHYMRDSERGVVWEETIILLPDNVHYVFLSATIPNARQFAEWICHLHKQPCHVIYTDYRPTPLQHYIFPAGGDGLHLVVDENGDFREDNFNTAMQVLRDAGDLAKGDQKGRKGGTKGPSNVFKIVKMIMERNFQPVIIFSFSKKDCEAYALQMTKLDFNTDEEKKMVEEVFSNAIDCLSDEDKKLPQVEHVLPLLKRGIGIHHGGLLPILKETIEILFSEGLIKALFATETFAMGINMPARTVLFTNARKFDGKDFRWISSGEYIQMSGRAGRRGMDDRGIVILMVDEKMSPTIGKQLLKGSADPLNSAFHLTYNMVLNLLRVEEINPEYMLEKSFYQFQHYRAIPGVVEKVKNSEEQYNKIVIPNEESVVIYYKIRQQLAKLGKEIEEYIHKPKYCLPFLQPGRLVKVKNEGDDFGWGVVVNFSKKSNVKPNSGELDPLYVVEVLLRCSKESLKNSATEAAKPAKPDEKGEMQVVPVLVHLLSAISSVRLYIPKDLRPVDNRQSVLKSIQEVQKRFPDGIPLLDPIDDMGIQDQGLKKVIQKVEAFEHRMYSHPLHNDPNLETVYTLCEKKAQIAIDIKSAKRELKKARTVLQMDELKCRKRVLRRLGFATSSDVIEMKGRVACEISSADELLLTEMMFNGLFNDLSAEQATALLSCFVFQENSSEMPKLTEQLAGPLRQMQECAKRIAKVSAEAKLEIDEETYLSSFKPHLMDVVYTWATGATFAHICKMTDVFEGSIIRCMRRLEELLRQMCQAAKAIGNTELENKFAEGITKIKRDIVFAASLYL

SEQ ID NO: 50724 - protein, 95 aa, Homo sapiens
MGLLTLYCCYRVVKSRTMMFSLDTTSWEYPDVCRHYFGSFGQWSSLLFSLVSLIGAMIVYWVLMSNFLFNTGKFIFSKYLYHMLLTQYFQILLPL

SEQ ID NO: 50725 - protein, 13 aa, Homo sapiens
MVGFGLGYSISEV

SEQ ID NO: 50726 - protein, 565 aa, Homo sapiens [sequence omitted]

SEQ ID NO: 50727 - protein, 248 aa, Homo sapiens
MSPVSTKHCLVAVGTRGPKVQLCDLKSGSCSHILQGHRQEILAVSWSPRYDYILATASADSRVKLWDVRRASGCLITLDQHNGKKSQAVESANTAHNGKVNGLCFTSDGLHLLTVGTDNRMRLWNSSNGENTLVNYGKVCNNSKKGLKFTVSCGCSSEFVFVPYGSTIAVYTVYSGEQITMLKGHYKTVDCCVFQSNFQELYSGSRDCNILAWVPSLYEPVPDDDETTTKSQLNPAFEDAWSSSDEEG

SEQ ID NO: 50728 - protein, 480 aa, Homo sapiens
MINMLKLGYFPGQCEWIYCPGDAISSVAASEKSTGKIFIYDGRGDNQPLHIFDKLHTSPLTQIRLNPVYKAVVSSDKSGMIEYWTGPPHEYKFPKNVNWEYKTDTDLYEFAKCKAYPTSVCFSPDGKKIATIGSDRKVRIFRFVTGKLMRVFDESLSMFTELQQMRQQLPDMEFGRRMAVERELEKVDAVRLINIVFDETGHFVLYGTMLGIKVINVETNRCVRILGKQENIRVMQLALFQGIAKKHRAATTIEMKASENPVLQNIQADPTIVCTSFKKNRFYMFTKREPEDTKSADSDRDVFNEKPSKEEVMAATQAEGPKRVSDSAIIHTSMGDIHTKLFPVECPKTVENFCVHSRNGYYNGHTFHRIIKGFMIQTGDPTGTGMGGESIWGGEFEDEFHSTLRHDRPYTLSMANAGSNTNGSQFFITVVPTPWLDNKHTVFGRVTKGMEVVQRISNVKVNPKTDKPYEDVSIINITVK

SEQ ID NO: 50729 - protein, 188 aa, Homo sapiens [sequence omitted]

SEQ ID NO: 50730 - protein, 98 aa, Homo sapiens [sequence omitted]

SEQ ID NO: 50731 - protein, 18 aa, Homo sapiens
MQRTKISLWGSINLDRFL

SEQ ID NO: 50732 - protein, 236 aa, Homo sapiens
MKDQHLRGFFSDSTSFNILMDMLFIKGKYKSALQVLIEMKNQDVKFTKDTYVLAFAICYKLNSPESFKICTTLREEALLKGEILSRRASCFAVALALNQNEMAKAVSIFSQIMNPESIACINLNIIIHIQSNMLENLIKTLKNAAEGNLSKFVKRHVFSEEVLAKVREKVKDVPALVAKFDEIYGTLHITGQVTTDSLDAVLCHTPRDRKSHTLLLNKRMVSRRTFQPLSQSLLAE

SEQ ID NO: 50733 - protein, 267 aa, Homo sapiens
MVLKVAGPACAVVGLGAVILARSRAQLQLRAGLQRGQQMDPDRAFICGESRQFAQCLIFGFLFLTSGMLISVLGIWVPGCGSNWAQEPLNETDTGDSEPRMCGFLSLQIMGPLIVLVGLCFFVVAHVKKRNTLNAGQDASEREEGQIQIMEPVQVTVGDSVIIFPPPPPPYFPESSASAVAESPGTNSLLPNENPPSYYSIFNYGTPTSEGAASERDCESIYTISGTNSSSEASHTPHLPSELPPRYEEKENAAATFLPLSSEPSPP

SEQ ID NO: 50734 - protein, 268 aa, Homo sapiens [sequence omitted]

SEQ ID NO: 50735 - protein, 168 aa, Homo sapiens
MRQKGFGTDFKKLESFYIQKVLDIIATINKGSIVWQEVFDDKAKLAPGTIVEVWKDSAYPEELSRVTASGFPVILSAPWYLDLISYGQDWRKYYKVEPLDFGGTQKQKQLFIGGEACLWGEYVDATNLTPRLWPRASAVGERLWSSKDVRDMDDAYDRLTRHRCRMVE

SEQ ID NO: 50736 - protein, 359 aa, Homo sapiens
MVKREDSWQKRLDKETEKKRRTEEAYKNAMTELKKKSHFGGPDYEEGPNSLINEEEFFDAVEAALDRQDKIEEQSQSEKVRLHWPTSLPSGDAFSSVGTHRFVQKPYSRSSSMSSIDLVSASDDVHRFSSQVEEMVQNHMTYSLQDVGGDANWQLVVEEGEMKVYRREVEENGIVLDPLKATHAVKGVTGHEVCNYFWNVDVRNDWETTIENFHVVETLADNAIIIYQTHKRVWPASQRDVLYLSVIRKIPALTENDPETWIVCNFSVDHDSAPLNNRCVRAKINVAMICQTLVSPPEGNQEISRDNILCKITYVANVNPGGWAPASVLRAVAKREYPKFLKRFTSYVQEKTAGKPILF

SEQ ID NO: 50737 - protein, 333 aa, Homo sapiens [sequence omitted]

SEQ ID NO: 50738 - protein, 46 aa, Homo sapiens
MVKREDSWQKRLDKETEKKRRTEEAYKNAMTELKKKSHFGGPDYEV

SEQ ID NO: 50739 - protein, 399 aa, Homo sapiens
MKKKAKIGIHHKNSPPKVTVPTSGNTIESPLHENISNSTSFKDEKIMETDSEPEEGEITDSQTEDSYDEAITSEGNVTAEDSEDEDEDKIWPPCIRVIVIRSPVLQIGSLFIITAVNPATIGREKDMEHTLRIPEVGVSKFHAEIYFDHDLQSYVLVDQGSQNGTIVNGKQILQPKTKCDPYVLEHGDEVKIGETVLSFHIHPGSDTCDGCEPGQVRAHLRLDKKDESFVGPTLSKEEKELERRKELKKIRVKYGLQNTEYEDEKTLKNPKYKDRAGKRREQVGSEGTFQRDDAPASVHSEITDSNKGRKMLEKMGWKKGEGLGKDGGGMKTPIQLQLRRTHAGLGTGKPSSFEDVHLLQNKNKKNWDKARERFTENFPETKPQKDDPGTMPWVKGTLE

SEQ ID NO: 50740 - protein, 149 aa, Homo sapiens [sequence omitted]

SEQ ID NO: 50741 - protein, 153 aa, Homo sapiens
MYYLWMFHAVTLFLNIFGCLAWFCVDSARAVDFGLSILWFLLFTPCSFVCWYRPLYGAFSGWISSLTGLNQNIPVGIMMIIIAALFTASAVISLVMFKKVHGLYRTTGASFEKAQQEFATGVMSNKTVQTAAANAASTAASSAAQNAFKGNQI

SEQ ID NO: 50742 - protein, 364 aa, Homo sapiens
MSTTVAHKMKEHIPFFEDMCKGIKAGDTCEKLVGYSAVYRVCFGMACFFFIFCLLTLKINNSKSCRAHIHNGFWFFKLLLLGAMCSGAFFIPDQDTFLNAWRYVGAVGGFLFIGIQLLLLVEFAHKWNKNWTAGTASNKLWYASLALVTLIMYSIATGGLVLMAVFYTQKDSCMENKILLGVNGGLCLLISLVAISPWVQNRQPHSGLLQSGVISCYVTYLTFSALSSKPAEVVLDEHGKNVTICVPDFGQDLYRDENLVTILGTSLLIGCILYSCLTSTTRSSSDALQGRYAAPELEIARCCFCFSPGGEDTEEQQPGKEGPRVIYDEKKGTVYIYSYFHFVFFLASLYVMMTVTNWFKNYQC

SEQ ID NO: 50743 - protein, 408 aa, Homo sapiens
MSTTVAHKMKEHIPFFEDMCKGIKAGDTCEKLVGYSAVYRVCFGMACFFFIFCLLTLKINNSKSCRAHIHNGFWFFKLLLLGAMCSGAFFIPDQDTFLNAWRYVGAVGGFLFIGIQLLLLVEFAHKWNKNWTAGTASNKLWYASLALVTLIMYSIATGGLVLMAVFYTQKDSCMENKILLGVNGGLCLLISLVAISPWVQNRQPHSGLLQSGVISCYVTYLTFSALSSKPAEVVLDEHGKNVTICVPDFGQDLYRDENLVTILGTSLLIGCILYSCLTSTTRSSSDALQGRYAAPELEIARCCFCFSPGGEDTEEQQPGKEGPRVIYDEKKGTVYIYSYFHFVFFLASLYVMMTVTNWFNYESANIESFFSGSWSIFWVKMASCWICVLLYLCTLVAPLCCPTREFSV

SEQ ID NO: 50744 - protein, 677 aa, Homo sapiens
MGNLVHATNSEEDIKKLLPDDFKSNADSLIGLDLSSVSDTPCVSSTDHDSDTVREQQNDISSELQNREIGGIKELGIKVDTTLSDSYNYSGTENLKDKKIFNQLESIVDFNMSSALTRQSSKMFHAKDKLQHKSQPCGLLKDVGLVKEEVDVAVITAAECLKEEGKTSALTCSLPKNEDLCLNDSNSRDENFKLPDFSFQEDKTVIKQSAQEDSKSLDLKDNDVIQDSSSALHVSSKDVPSSLSCLPASGSMCGSLIESKARGDFLPQHEHKDNIQDAVTIHEEIQNSVVLGGEPFKENDLLKQEKCKSILLQSLIEGMEDRKIDPDQTVIRAESLDGGDTSSTVVESQEGLSGTHVPESSDCCEGFINTFSSNDMDGQDLDYFNIDEGAKSGPLISDAELDAFLTEQYLQTTNIKSFEENVNDSKSQMNQIDMKGLDDGNINNIYFNAEAGAIGESHGINIICEIVDKQNTIENGLSLGEKSTIPVQQGLPTSKSEITNQLSVSDINSQSVGGARPKQLFSLPSRTRSSKDLNKPDVPDTIESEPSTADTVVPITCAIDSTADPQVSFNSNYIDIESNSEGGSSFVTANEDSVPENTCKEGLVLGQKQPTWVPDSEAPNCMNCQVKFTFTKRRHHCRACGKVFCGVCCNRKCKLQYLEKEARVCVVCYETISKGEY

SEQ ID NO: 50745 - protein, 114 aa, Homo sapiens
MRALGFDVKKADVLKILKDYDREATGKITFEDFNEVVTDWILERDPHEEILKAFKLFDDDDSGKISLRNLRRVARELGENMSDEELRAMIEEFDKDGDGEINQEEFIAIMTGDI

SEQ ID NO: 50746 - protein, 138 aa, Homo sapiens
MRALGFDVKKADVLKILKDYDREATGKITFEDFNEVVTDWILERDPHEEILKAFKLFDDDDSGKISLRNLRRVARELGENMSDEELRAMIEEFDKDGDGEILKNILLLPIWSRCLSLNREFFSEVNQEEFIAIMTGDI

SEQ ID NO: 50747 - protein, 1121 aa, Homo sapiens
MDVKSMWDDIRLHLRRFLVSKLQSHNEINNSQQKILLKKQCLQQLLFLYPESEVIIKYQNIQNKLLANLLWNCFPSYNRDSNLDVIAHGYQSTMLKLYSVIKEDFNTLCEILAPSSMVKFIKETYLDTVTEEMAKFLENFCELQFRENAVRVVKTSKSSSKHRGAVHALVTTECPQKGRNFSLPLDKVEFLSQLIKSFMKLEKGVQELFDEILLSLKITRDTSGILEKSDREVVMEKPRANETNIPSEQSLPGKEATLLDFGWRSAFKEVSLPMAHCVVTAIEGFSTKILQQEQNERSSAVSYAMNLVNVQQVWQDSHMFPEEEQPKKIGKFCSDIMEKLDTMLPLALACRDDSFQEIRANLVEACCKVATAVLQRLQERAKEVPSKAPLKNLHTYLSTAVYVFQHFKRYDNLMKEMTKKPIFLVLVQRYQEFINTLQFQVTNYCVRVCATSILQDAESHHWDDYKAFYEGERCSFSIQMWHYFCWSLHYDLWTILPPKLAQEILVEVLEKSLSLLASRYARAHPSRKRTPQLRLDVTTILICTENMLWSVCTSVQKLLNPHQHTDDKIFKIHTHCNNLFTTLVILTSPLTELYKTFQHGLDESASDSLKSFFKQPLYWVSCISHFYPSLLRTPSAGGLKAEGQLKLLLSQPRCNWNLLLETLLHHDGLLLRILLKSSKQVSDTENNLNQGPSLMEAIFKILYHCSFSPQTFANVFVSYMEEEQLWDFLYNIPVSTCVEYELEVIRCLRLALTDAIKDTVQQIVSVMSSRRNCETNLNKHIVPDCLLESMPKEWNYSPKETNRKESCKSFTRLTAQAVSIVISKLPTVIACLPPPVKYFFFLSERKMSKKFVELKKAGLLVWNLIVIICRIFEDGNTVELLTGASLDRWSKEKLGLICMCLKSIMGDQTSIHNQMIQKVIQSIEQQKPNWIERQLLKARKLSTECAFMTIEKSTALQEGDVALELTEQKINTMVLDLCHKPGGREYLRQIYHIMQLNEEYLKEQLFSMNSSEEKPLPIRPLKTTLRSIEDQPSAFNPFHVYKAFSENMLDQSAITKWNWNWAKLLPNYLRLDKMTFSVLLKNRWEMKKDETLEEEEKAILEHLKQICTPQNSSASDNIEEQ

SEQ ID NO: 50748 - protein, 955 aa, Homo sapiens [sequence omitted]

SEQ ID NO: 50749 - protein, 143 aa, Homo sapiens
MFNGNYMEAKSVLIPVYGVSKETFLSFLEYLYTDSCCPAGIFQAMCLLICAEMYQVSRLQHICELFIITQLQSMPSRELASMNLDIVDLLKKAKFHHSDCLSTWLLHFIATNYLIFSQKPEFQDLSGRLLISVLKRKLYVLCS

SEQ ID NO: 50750 - protein, 33 aa, Homo sapiens
MRNTLLFKMAIQIILNTVYLFYLDYQQRLKHEM

SEQ ID NO: 50751 - protein, 936 aa, Homo sapiens
MSFLLSSLLALLTVSTPSWCQSTEASPKRSDGTPFPWNKIRLPEYVIPVHYDLLIHANLTTLTFWGTTKVEITASQPTSTIILHSHHLQISRATLRKGAGERLSEEPLQVLEHPRQEQIALLAPEPLLVGLPYTVVIHYAGNLSETFHGFYKSTYRTKEGELRILASTQFEPTAARMAFPCFDEPAFKASFSIKIRREPRHLAISNMPLVKSVTVAEGLIEDHFDVTVKMSTYLVAFIISDFESVSKITKSGVKVSVYAVPDKINQADYALDAAVTLLEFYEDYFSIPYPLPKQDLAAIPDFQSGAMENWGLTTYRESALLFDAEKSSASSKLGITMTVAHELAHQWFGNLVTMEWWNDLWLNEGFAKFMEFVSVSVTHPELKVGDYFFGKCFDAMEVDALNSSHPVSTPVENPAQIREMFDDVSYDKGACILNMLREYLSADAFKSGIVQYLQKHSYKNTKNEDLWDSMASICPTDGVKGMDGFCSRSQHSSSSSHWHQEGVDVKTMMNTWTLQKGFPLITITVRGRNVHMKQEHYMKGSDGAPDTGYLWHVPLTFITSKSDMVHRFLLKTKTDVLILPEEVEWIKFNVGMNGYYIVHYEDDGWDSLTGLLKGTHTAVSSNDRASLINNAFQLVSIGKLSIEKALDLSLYLKHETEIMPVFQGLNELIPMYKLMEKRDMNEVETQFKAFLIRLLRDLIDKQTWTDEGSVSERMLRSQLLLLACVHNYQPCVQRAEGYFRKWKESNGNLSLPVDVTLAVFAVGAQSTEGWDFLYSKYQFSLSSTEKSQIEFALCRTQNKEKLQWLLDESFKGDKIKTQEFPQILTLIGRNPVGYPLAWQFLRKNWNKLVQKFELGSSSIAHMVMGTTNQFSTRTRLEEVKGFFSSLKENGSQLRCVQQTIETIEENIGWMDKNFDKIRVWLQSEKLEHDPEADATG

SEQ ID NO: 50752 - protein, 929 aa, Homo sapiens [sequence omitted]

SEQ ID NO: 50753 - protein, 541 aa, Homo sapiens
MSRDDFRVLTAVEMGMKNHEIVPGSLIASIASLKHGGCNKVLRELVKHKLIAWERTKTVQGYRLTNAGYDYLALKTLSSRQVVESVGNQMGVGKESDIYIVANEEGQQFALKLHRLGRTSFRNLKNKRDYHKHRHNVSWLYLSRLSAMKEFAYMKALYERKFPVPKPIDYNRHAVVMELINGYPLCQIHHVEDPASVYDEAMELIVKLANHGLIHGDFNEFNLILDESDHITMIDFPQMVSTSHPNAEWYFDRDVKCIKDFFMKRFSYESELFPTFKDIRREDTLDVEVSASGYTKEMQADDELLHPLGPDDKNIETKEGSEFSFSDGEVAEKAEVYGSENESERNCLEESEGCYCRSSGDPEQIKEDSLSEESADARSFEMTEFNQALEEIKGQVVENNSVTEFSEEKNRTENYNRQDGQRVQGGVPAGSDEYEDECPHLIALSSLNREFRPFRDEENVGAMNQYRTRTLSITSSGSAVSCSTIPPELVKQKVKRQLTKQQKSAVRRRLQKGEANIFTKQRRENMQNIKSSLEAASFWGE

SEQ ID NO: 50754 - protein, 463 aa, Homo sapiens
MSRDDFRVLTAVEMGMKNHEIVPGSLIASIASLKHGGCNKVLRELVKHKLIAWERTKTVQGYRLTNAGYDYLALKTLSSRQVVESVGNQMGVGKESDIYIVANEEGQQFALKLHRLGRTSFRNLKNKRDYHKHRHNVSWLYLSRLSAMKEFAYMKALYERKFPVPKPIDYNRHAVVMELINGYPLCQIHHVEDPASVYDEAMELIVKLANHGLIHGDFNEFNLILDESDHITMIDFPQMVSTSHPNAEWYFDRDVKCIKDFFMKRFSYESELFPTFKDIRREDTLDVEVSASGYTKEMQADDELLHPLGPDDKNIETKEGSEFSFSDGEVAEKAEVYGSENESERNCLEESEGCYCRSSGDPEQIKEDSLSEESADARSFEMTEFNQALEEIKGQVVENNSVTEFSEEKNRTENYNRQDGQRVQGGVPAGSDEYEDECPHLIALSSLNREFRPFRYRLLSIAF

SEQ ID NO: 50755 - protein, 322 aa, Homo sapiens [sequence omitted]

SEQ ID NO: 50756 - protein, 589 aa, Homo sapiens
MEAKHAVSFMTCTQNVAPDMFRTIPPEANIPIPVKSDMVMMHEHHKETEYKDKIPLLQQPKREEEEVLDQGDFYSLLSKLLGEREDVVHVHKYNPTEKAESESDLVAEIANVVQKKDLGRSDAREGAEHERGNAILVRDRIHKFHRLVSTLRPPESRVFSLQQPPPGEGTWEPEHTGDFHMEEALDWPGVYLLPGQVSGVALDPKNNLVIFHRGDHVWDGNSFDSKFVYQQIGLGPIEEDTILVIDPNNAAVLQSSGKNLFYLPHGLSIDKDGNYWVTDVALHQVFKLDPNNKEGPVLILGRSMQPGSDQNHFCQPTDVAVDPGTGAIYVSDGYCNSRIVQFSPSGKFITQWGEESSGSSPLPGQFTVPHSLALVPLLGQLCVADRENGRIQCFKTDTKEFVREIKHSSFGRNVFAISYIPGLLFAVNGKPHFGDQEPVQGFVMNFSNGEIIDIFKPVRKHFDMPHDIVASEDGTVYIGDAHTNTVWKFTLTEKLEHRSVKKAGIEVQEIKADSEHKLETSSGRVLGRFRGKGSGGLNLGNFFASRKGYSRKGFDRLSTEGSDQEKEDDGSESEEEYSAPLPALAPSSS

SEQ ID NO: 50757 - protein, 40 aa, Homo sapiens [sequence omitted]

SEQ ID NO: 50758 - protein, 185 aa, Homo sapiens
MRERFDRFLHEKNCMTDLLAKLEAKTGVNRSFIALGVIGLVALYLVFGYGASLLCNLIGFGYPAYISIKAIESPNKEDDTQWLTYWVVYGVFSIAEFFSDIFLSWFPFYYMLKCGFLLWCMAPSPSNGAELLYKRIIRPFFLKHESQMDSVVKDLKDKAKETADAITKEAKKATVNLLGEEKKST

SEQ ID NO: 50759 - protein, 209 aa, Homo sapiens
MTPKSKLGLAPNKFFMAIPFIRPLRDWLSRRFGDSSDSDNGFSSTGSTPAKPTVEKLSRTKFRHSQQLFPDGSPGDQWVKHRQPLQQKPYNNHSEMSDLLKGKNQSMRGNGRKQYQDSPNQKKRTNGLQPAKQQNSLMKCEKKLHPRKLQDNFETDAVYDLPSSSEDQLLEHAEGQPVACNGHCKFPFSSRAFLSFKFDHNAIMKILDL

SEQ ID NO: 50760 - protein, 128 aa, Homo sapiens
MILCWGEGHGSSIHDHTNSHCFLKMLQGNLKETLFAWPDKKSNEMVKKSERVLRENQCAYINDSIGLHRVENISHTEPAVSLHLYSPPFDTCHAFDQRTGHKNKVTMTFHSKFGIRTPNATSGSLENN

SEQ ID NO: 50761 - protein, 537 aa, Homo sapiens [sequence omitted]

SEQ ID NO: 50762 - protein, 30 aa, Homo sapiens
MCSNCCKTRGNGIWNLAIFIFSIKFYFRGG

SEQ ID NO: 50763 - protein, 795 aa, Homo sapiens
MSVTIAFATQLEQLIPCTMKLPERQPEFFFYYSLLGNDVTNEPFNDLINPNFEPERASVRIRSSVEILRVYLALQSKLQIHLCCGDQSLGSTEIPLTGLLKKGSTEINQHPVTVEGAFTLDPPNRAKQKLAPIPVELAPTVGVSVALQREGIDSQSLIELKTQNEHEPEHSKKKVLTPIKEKTLTGPKSPTVSPVPSHNQSPPTKDDATESEVESLQYDKDTKPNPKASSSVPASLAQLVTTSNASEVASGQKIAVPATSHHFCFSIDLRSIHALEIGFPINCILRYSYPFFGSAAPIMTNPPVEVRKNMEVFLPQSYCAFDFATMPHQLQDTFLRIPLLVELWHKDKMSKDLLLGIARIQLSNILSSEKTRFLGSNGEQCWRQTYSESVPVIAAQGSNNRIADLSYTVTLEDYGLVKMREIFISDSSQGVSAVQQKPSSLPPAPCPSEIQTEPRETLEYKAALELEMWKEMQEDIFENQLKQKELAHMQALAEEWKKRDRERESLVKKKVAEYTILEGKLQKTLIDLEKREQQLASVESELQREKKELQSERQRNLQELQDSIRRAKEDCIHQVELERLKIKQLEEDKHRLQQQLNDAENKYKILEKEFQQFKDQQNNKPEIRLQSEINLLTLEKVELERKLESATKSKLHYKQQWGRALKELARLKQREQESQMARLKKQQEELEQMRLRYLAAEEKDTVKTERQELLDIRNELNRLRQQEQKQYQDSTEIASGKKDGPHGSVLEEGLDDYLTRLIEERDTLMRTGVYNHEDRIISELDRQIREILAKSNASN

SEQ ID NO: 50764 - protein, 1233 aa, Homo sapiens
MLVKKEEEEEESHRRIKKLKTEKVDPLFTVPAPPPPISSSLTPQILPSYFSPSSSNIAAPVEQLLVRTRSVGVNTCEVGVVTEPECLGPCEPGTSVNLEGIVWHETEEGVLVVNVTWRNKTYVGTLLDCTKHDWAPPRFCESPTSDLEMRGGRGRGKRARSAAAAPGSEASFTESRGLQNKNRGGANGKGRRGSLNASGRRTPPNCAAEDIKASPSSTNKRKNKPPMELDLNSSSEDNKPGKRVRTNSRSTPTTPQGKPETTFLDQGCSSPVLIDCPHPNCNKKYKHINGLRYHQAHAHLDPENKLEFEPDSEDKISDCEEGLSNVALECSEPSTSVSAYDQLKAPASPGAGNPPGTPKGKRELMSNGPGSIIGAKAGKNSGKKKGLNNELNNLPVISNMTAALDSCSAADGSLAAEMPKLEAEGLIDKKNLGDKEKGKKATNCKTDKNLSKLKSARPIAPAPAPTPPQLIAIPTATFTTTTTGTIPGLPSLTTTVVQATPKSPPLKPIQPKPTIMGEPITVNPALVSLKDKKKKEKRKLKDKEGKETGSPKMDAKLGKLEDSKGASKDLPGHFLKDHLNKNEGLANGLSESQESRMASIKAEADKVYTFTDNAPSPSIGSASRLECSTLVNGQAPMAPLHVLTQNGAESSAAKTSSPAYSDISDAADDGGSDSRSEGMRSKASSPSDIISSKDSVVKGHSSTTAQSSQLKESHSPYYHSYDPYYSPSYMHPGQVGAPAAGNSGSTQGMKIKKESEEDAEKKDKAEQLDSKKVDHNSASLQPQHQSVITQRHPALAQSLYYGQYAYGLYMDQKSLMATSPAYRQQYEKYYEDQRLAEQKMAQTGRGDCERKSELPLKELGKEETKQKNMPSATISKAPSTPEPNKNHSKLGPSVPNKTEETGKSQLLSNHQQQLQADSFKAKQMENHQLIKEAVEMKSVMDSMKQTGVDPTSRFKQDPDSRTWHHYVYQPKYLDQQKSEELDREKKLKEDSPRKTPNKESGVPSLPVSLTSIKEEPKEAKHPDSQSMEESKLKNDDRKTPVNWKDSRGTRVAVSSPMSQHQSYIQYLHAYPYPQMYDPSHPAYRAVSPVLMHSYPGAYLSPGFHYPVYGKMSGREETEKVNTSPSVNTKTTTESKALDLLQQHANQYRSKSPAPVEKATAEREREAERERDRHSPFGQRHLHTHHHTHVGMGYPLIPGQYDPFQGLTSAALVASQQVAAQASASGMFPGQRRE

SEQ ID NO: 50765 - protein, 502 aa, Homo sapiens
MGSPGRGAGLYFSSSQGLGLIPSPGLSMWRLPRALCVHAAKTSKLSGPWSRPAAFMSTLLINQPQYAWLKELGLREENEGVYNGSWGGRGEVITTYCPANNEPIARVRQASVADYEETVKKAREAWKIWADIPAPKRGEIVRQIGDALREKIQVLGSLVSLEMGKILVEGVGEVQEYVDICDYAVGLSRMIGGPILPSERSGHALIEQWNPVGLVGIITAFNFPVAVYGWNNAIAMICGNVCLWKGAPTTSLISVAVTKIIAKVLEDNKLPGAICSLTCGGADIGTAMAKDERVNLLSFTGSTQVGKQVGLMVQERFGRSLLELGGNNAIIAFEDADLSLVVPSALFAAVGTAGQRCTTARRLVMDRPGNYVEPTIVTGLGHDASIAHTETFAPILYVFKFKNEEEVFAWNNEVKQGLSSSIFTKDLGRIFRWLGPKGSDCGIVNVNIPTSGAEIGGAFGGEKHTGGGRESGSDAWKQYMRRSTCTINYSKDLPLAQGIKFQ

SEQ ID NO: 50766 - protein, 102 aa, Homo sapiens
MATGNPYLPSSSDLDLLHKIVLKVGNLSPHLQNIFSKSPIFAGVVLPQVQHPKNARKKYPKLNGLLADIVHACLQIDPADRISSSDLLHHEYFTRDGFIEKK

SEQ ID NO: 50767 - protein, 155 aa, Homo sapiens
MLKDDRLGQHVPTLHPTSEELTIAGMTFTTFDLGGHVQARRVWKNYLPAINGIVFLVDCADHERLLESKEELDSLMTDETIANVPILILGNKIDRPEAISEERLREMFGLYGQTTGKGSISLKELNARPLEVFMCSVLKRQGYGEGFRWMAQYID

SEQ ID NO: 50768 - protein, 810 aa, Homo sapiens
MSRSVGYSYPSLPPGYQNTTPPGATGVPPSSLNYPSGPQAFTQTPLGANHLTTSMSGLSLQPEGLRVVNLLQERNMLPSTPLKPPVPNLHEDIQKLNCNPELFRCTLTSIPQTQALLNKAKLPLGLLLHPFKDLVQLPVVTSSTIVRCRSCRTYINPFVSFLDQRRWKCNLCYRVNDVPEEFLYNPLTRVYGEPHRRPEVQNATIEFMAPSEYMLRPPQPPVYLFVFDVSHNAVETGYLNSVCQSLLDNLDLLPGNTRTKIGFITFDSTIHFYGLQESLSQPQMLIVSDIEDVFIPMPENLLVNLNESKELVQDLLKTLPQMFTKTLETQSALGPALQAAFKLMSPTGGRMSVFQTQLPTLGVGALKPREEPNHRSSAKDIHMTPSTDFYKKLALDCSGQQVAVDLFLLSGQYSDLASLGCISRYSAGSVYYYPSYHHQHNPVQVQKLQKELQRYLTRKIGFEAVMRIRCTKGLSIHTFHGNFFVRSTDLLSLPNVNPDAGYAVQMSVEESLTDTQLVSFQSALLYTSSKGERRIRVHTLCLPVVSTLNDVFLGADVQAISGLLANMAVDRSMTASLSDARDALVNAVIDSLSAYRSSVLSNQQPGLMVPFSLRLFPLFVLALLKQKSFQTGTNARLDERIFAMCQVKNQPLVYLMLTTHPSLYRVDNLSDEGALNISDRTIPQPPILQLSVEKLSRDGAFLMDAGSVLMLWVGKNCTQNFLSQVLGVQNYASIPQPMTDLPELDTPESARIIAFISWLREQRPFFPILYVIRDESPMKANFLQNMIEDRTESALSYYEFLLHIQQQVNK

SEQ ID NO: 50769 - protein, 268 aa, Homo sapiens
MLSVIPGEAEDKVSSEPSGVTCGAGGAEDSRCNVRESLFSLDGAGAHFPDREEEYYTEPEVAESDAAPTEDSNNTESLKSPKVNCEERNITGLENFTLKILNMSQDLMDFLNPNGSDCTLVLFYTPWCRFSASLAPHFNSLPRAFPALHFLALDASQHSSLSTRFGTVAVPNILLFQGAKPMARFNHTDRTLETLKIFIFNQTGIEAKKNVVVTQADQIGPLPSTLIKSVDWLLVFSLFFLISFIMYATIRTESIRWLIPGQEQEHVE

SEQ ID NO: 50770 - protein, 288 aa, Homo sapiens [sequence omitted]

SEQ ID NO: 50771 - protein, 591 aa, Homo sapiens
MVPVAVTAAVAPVLSINSDFSDLREIKKQLLLIAGLTRERGLLHSSKWSAELAFSLPALPLAELQPPPPITEEDAQDMDAYTLAKAYFDVKEYDRAAHFLHGCNSKKAYFLYMYSRYLSGEKKKDDETVDSLGPLEKGQVKNEALRELRVELSKKHQARELDGFGLYLYGVVLRKLDLVKEAIDVFVEATHVLPLHWGAWLELCNLITDKEMLKFLSLPDTWMKEFFLAHIYTELQLIEEALQKYQNLIDVGFSKSSYIVSQIAVAYHNIRDIDKALSIFNELRKQDPYRIENMDTFSNLLYVRSMKSELSYLAHNLCEIDKYRVETCCVIGNYYSLRSQHEKAALYFQRALKLNPRYLGAWTLMGHEYMEMKNTSAAIQAYRHAIEVNKRDYRAWYGLGQTYEILKMPFYCLYYYRRAHQLRPNDSRMLVALGECYEKLNQLVEAKKCYWRAYAVGDVEKMALVKLAKLHEQLTESEQAAQCYIKYIQDIYSCGEIVEHLEESTAFRYLAQYYFKCKLWDEASTCAQKCCAFNDTREEGKALLRQILQLRNQGETPTTEVPAPFFLPASLSANNTPTRRVSPLNLSSVTP

SEQ ID NO: 50772 - protein, 145 aa, Homo sapiens
MVPVAVTAAVAPVLSINSDFSDLREIKKQLLLIAGLTRERGLLHSSKWSAELAFSLPALPLAELQPPPPITEEDAQDMDAYTLAKAYFDVKEYDRAAHFLHGCNSKKAYFLYMYSRYLVRAILKCHSAFSETSIFRTNGKVKSFK

SEQ ID NO: 50773 - protein, 88 aa, Homo sapiens
MNQKPYSGGLCLQETAREGSSISPPWFMACSPPPLSASCSPTGGSSQVLSESEEEEEGAVRWGRQALSKRTLCQRDFGDLDLNLIEEN

SEQ ID NO: 50774 - protein, 1707 aa, Homo sapiens
MSGAVPQDLAIFVEFDGCNWKQHSWVKVHAEEVIVLLLEGSLVWAPREDPVLLQGIRVSIAQWPALTFTPLVDKLGLGSVVPVEYLLDRELRFLSDANGLHLFQMGTDSQNQILLEHAALRETVNALISDQKLQEIFSRGPYSVQGHRVKIYQPEGEEGWLYGVVSHQDSITRLMEVSVTESGEIKSVDPRLIHVMLMDNSAPQSEGGTLKAVKSSKGKKKRESIEGKDGRRRKSASDSGCDPASKKLKGDRGEVDSNGSDGGEASRGPWKGGNASGEPGLDQRAKQPPSTFVPQINRNIRFATYTKENGRTLVVQDEPVGGDTPASFTPYSTATGQTPLAPEVGGAENKEAGKTLEQVGQGIVASAAVVTTASSTPNTVRISDTGLAAGTVPEKQKGSRSQASGENSRNSILASSGFGAPLPSSSQPLTFGSGRSQSNGVLATENKPLGFSFGCSSAQEAQKDTDLSKNLFFQCMSQTLPTSNYFTTVSESLADDSSSRDSFKQSLESLSSGLCKGRSVLGTDTKPGSKAGSSVDRKVPAESMPTLTPAFPRSLLNARTPENHENLFLQPPKLSREEPSNPFLAFVEKVEHSPFSSFASQASGSSSSATTVTSKVAPSWPESHSSADSASLAKKKPLFITTDSSKLVSGVLGSALTSGGPSLSAMGNGRSSSPTSSLTQPIEMPTLSSSPTEERPTVGPGQQDNPLLKTFSNVFGRHSGGFLSSPADFSQENKAPFEAVKRFSLDERSLACRQDSDSSTNSDLSDLSDSEEQLQAKTGLKGIPEHLMGKLGPNGERSAELLLGKSKGKQAPKGRPRTAPLKVGQSVLKDVSKVKKLKQSGEPFLQDGSCINVAPHLHKCRECRLERYRKFKEQEQDDSTVACRFFHFRRLIFTRKGVLRVEGFLSPQQSDPDAMNLWIPSSSLAEGIDLETSKYILANVGDQFCQLVMSEKEAMMMVEPHQKVAWKRAVRGVREMCDVCETTLFNIHWVCRKCGFGVCLDCYRLRKSRPRSETEEMGDEEVFSWLKCAKGQSHEPENLMPTQIIPGTALYNIGDMVHAARGKWGIKANCPCISRQNKSVLRPAVTNGMSQLPSINPSASSGNETTFSGGGGPAPVTTPEPDHVPKADSTDIRSEEPLKTDSSASNSNSELKAIRPPCPDTAPPSSALHWLADLATQKAKEETKEAGSLRSVLNKESHSPFGLDSFNSTAKVSPLTPKLFNSLLLGPTASNNKTEGSSLRDLLHSGPGKLPQTPLDTGIPFPPVFSTSSAGVKSKASLPNFLDHIIASVVENKKTSDASKRACNLTDTQKEVKEMVMGLNVLDPHTSHSWLCDGRLLCLHDPSNKNNWKIFRECWKQGQPVLVSGVHKKLKSELWKPEAFSQEFGDQDVDLVNCRNCAIISDVKVRDFWDGFEIICKRLRSEDGQPMVLKLKDWPPGEDFRDMMPTRFEDLMENLPLPEYTKRDGRLNLASRLPSYFVRPDLGPKMYNAYGLITAEDRRVGTTNLHLDVSDAVNVMVYVGIPIGEGAHDEEVLKTIDEGDADEVTKQRIHDGKEKPGALWHIYAAKDAEKIRELLRKVGEEQGQENPPDHDPIHDQSWYLDQTLRKRLYEEYGVQGWAIVQFLGDAVFIPAGAPHQVHNLYSCIKVAEDFVSPEHVKHCFRLTQEFRHLSNTHTNHEDKLQVKNIIYHAVKDAVGTLKAHESKLARS

SEQ ID NO: 50775 - protein, 93 aa, Homo sapiens
MWMENEEEFNRQIEEELWEEEFIERCFQEMLEEEEEHEWFIPARDLPQTMDQIQDQFNDLVISDGSSLEDLVVKSNLNPNAKEFVPGVKYGNI

SEQ ID NO: 50776 - protein, 80 aa, Homo sapiens
MWMENEEEFNRQIEEELWEEEFIERCFQEMLEEEEEHEWFIPARDLPQTMDQIQDQFNDLVISDGSSLEDLVVKSYFSSF

SEQ ID NO: 50777 - protein, 226 aa, Homo sapiens [sequence omitted]

SEQ ID NO: 50778 - protein, 126 aa, Homo sapiens [sequence omitted]

SEQ ID NO: 50779 - protein, 86 aa, Homo sapiens
MALDPAKKLLLTASGDGCLGIFNIKRRRFELLSEPQSGDLTSVTLMKVQLVMVGWRGVCWGLSLRQLPHCFLYFPAVGEEGSLWLQ

SEQ ID NO: 50780 - protein, 369 aa, Homo sapiens [sequence omitted]

SEQ ID NO: 50781 - protein, 885 aa, Homo sapiens
MASKDREDLLEVNLQNGILFVNSRIDREELCGRSAECSIHLEVIVDRPLQVFHVDVEVRDINDNPPLFPVEEQRVLIYESRLPDSVFPLEGASDADVGSNSILTYKLSSSEYFGLDVKINSDDNKQIGLLLKKSLDREEAPAHNLFLTATDGGKPELTGTVQLLVTVLDVNDNAPTFEQSEYEVRIFENADNGTTVIRLNASDRDEGANGAISYSFNSLVAAMVIDHFSIDRNTGEIVIRGNLDFEQENLYKILIDATDKGHPPMAGHCTVLVRILDKNDNVPEIALTSLSLPVREDAQFGTVIALISVNDLDSGANGQVNCSLTPHVPFKLVSTFKNYYSLVLDSALDRESVSAYELVVTARDGGSPSLWATASLSVEVADMNDNAPAFAQPEYTVFVKENNPPGCHIFTVSARDADAQENALVSYSLVERRVGERALSSYISVHAESGKVYALQPLDHEELELLQFQVSARDAGVPPLGSNVTLQVFVLDENDNAPALLAPRVGGTGGAVSELVPRSLGAGQVVAKVRAVDADSGYNAWLSYELQPPASSARFPFRVGLYTGEISTTRVLDEADSPRHRLLVLVKDHGEPALTATATVLVSLVESGQAPKASSRASVGAAGPEAALVDVNVYLIIAICAVSSLLVLTLLLYTALRCSAPPTEGACTADKPTLVCSSAVGSWSYSQQRRQRVCSGEGPPKMDLMAFSPSLSPCPIMMGKAENQDLNEDHDAKPRQPNPDWRYSASLRAGMHSSVHLEEAGILRAGPGGPDQQWPTVSSATPEPEAGEVSPPVGAGVNSNSWTFKYGPGNPKQSGPGELPDKFIIPGSPAIISIRQEPTNSQIDKSDFITFGKKEETKKKKKKKKGNKTQEKKEKGNSTTDNSDQ

SEQ ID NO: 50782 - protein, 659 aa, Homo sapiens
MHLKILESTLPGTVIPLGNAEDLDVGRNSLQNYTITPNSHFHVLTRSRRDGRKYPELVLDKALDPEEQPELSLTLTALDGGSPPRSGTAQINIQVLDINDNAPEFAQPLYEVAVLENTPVNSVIVTVSASDLDTGSFGTISYAFFHASEEIRKTFQLNPITGDMQLVKYLNFEAINSYEVDIEAKDGGGLSGKSTVIVQVVDVNDNPPELTLSSVNSPIPENSGETVLAVFSVSDLDSGDNGRVMCSIENNLPFFLKPSVENFYTLVSEGALDRETRSEYNITITITDLGTPRLKTKYNITVLVSDVNDNAPAFTQISYTLFVRENNSPALHIGSVSATDRDSGTNAQVTYSLLPPQDPHLPLSSLVSINADNGHLFALRSLDYEALQAFEFRVGATDRGSPALSSEALVRVLVLDANDNSPFVLYPLQNGSAPCTELVPRAAEPGYLVTKVVAVDGDSGQNAWLSYQLLKATEPGLFGVWAHNGEVRTARLLSERDAAKHRLVVLVKDNGEPPRSATATLHVLLVDGFSQPYLPLPEAAPAQAQADLLTVYLVVALASVSSLFLFSVLLFVAVRLCRRSRAASVGRCSVPEGPFPGQMVDVSGTGTLSQSYQYEVCLTGGSGTNEFKFLKPIIPNFVAQGAERVSEANPSFRKSFEFS

SEQ ID NO: 50783 - protein, 489 aa, Homo sapiens
MDINDNPPTFPHASYSAYIPENNPRGASILSMTAQDPDSGDNARITYSLAEDTFQGAPLSSYVSINSNTGILYALCSFDYEQFRDLQLLMTASDSGDPPLSSNVSLSLFVLDQNDNVPEILYPTFPTDGSTGVELAPRSADSGYLVTKVVAVDRDSGQNAWLSYSLLKSSEPGLFAVGLHTGEVRTARALLDRDALKQRLVVVVQDHGQPPLSATVTLTVAVADSIPDVLADLGSLKPSADPDDSGLTLYLVVAVAAVSCVFLAFVTVLLALKLRRWHKSRLLHAEGSRLAGVPASHFVGVDGVRAFLQTYSHEVSLTADSRKSHLIFSQPSYADTLISRESCEKSEPLLITQDLLETKGDPNLQQAPPNTDWRFSQAQRPGTSGSQNGDDTGTWPNNQFDTEMLQAMILASASEAADGSSTLGGGAGTMGLSARYGPQFTLQHVPDYRQNVYIPGSNATLTNAAGKRDGKAPAGGNGNKKKSGKKEKK

SEQ ID NO: 50784 - protein, 799 aa, Homo sapiens [sequence omitted]

SEQ ID NO: 50785 - protein, 387 aa, Homo sapiens
MSLSLFVLDQNDNAPEILYPALPTDGSTGVELAPRSAERGYLVTKVVAVDRDSGQNAWLSYRLLKASEPGLFSVGLHTGEVRTARALLDRDALKQSLVVAVQDHGQPPLSATVTLTVAVADSIPEVLTELGSLKPSVDPNDSSLTLYLVVAVAAISCVFLAFVAVLLGLRLRRWHKSRLLQDSGGRLVGVPASHFVGVEEVQAFLQTYSQEVSLTADSRKSHLIFPQPNYADMLISQEGCEKNDSLLTSVDFHEYKNEADHGQQAPPNTDWRFSQAQRPGTSGSQNGDDTGTWPNNQFDTEMLQAMILASASEAADGSSTLGGGAGTMGLSARYGPQFTLQHVPDYRQNVYIPGSNATLTNAAGKRDGKAPAGGNGNKKKSGKKEKK

SEQ ID NO: 50786 - protein, 780 aa, Homo sapiens
MGTILESAEDPDISMNSLSKYQLSPNEYFSLVEKDNPDGGKYPELVLQKTLDRETQSAHHLVLTALDGGDPPRSGTAQIRILVIDANDNPPVFSQDVYRVSLREDVPPGTSILRVKATDQDEGINSEITYSFFGVADKAQHVFSLDYTTGNILTQQPLDFEEVERYTINIEAKDRGSLSTRCKVIVEVVDENDNSPEIIITSLSDQIMEDSPPGVVVALFKTRDQDSGENGEVRCSLSRGVPFKIHSSSNNYYKLVTDEALDREQTPEYNVTIAATDRGKPPLSSSKTITLHITDVNDNAPVFGQSAYLVHVPENNQPGASIAQVSASDPDFGLNGRVSYSLIASDLESRTLSSYVSVSAQSGVVFAQRAFDHEQLRTFELTLQARDQGSPALSANVSLRVLVGDRNDNAPRVLYPALGPDGSALFDTVPRAAQPGYLVTKVVAVDADSGHNAWLSYHVVQASEPGLFSLGLRTGEVRMVRALGDKDSVRQRLLVAVRDGGQPPLSATATLHLVFADSLQEVLPDFSDHPTPSDSQAEMQFYLVVALALISVLFLLAVILAIALRLRQSFSPTAGDCFESVLCSKSGPVGPPNYSEGTLPYAYNFCVPGDQMNPEFNFFTSVDHCPATQDNLNKDSMLLASILTPSVEADKKILKQQAPPNTDWRFSQAQRPGTSGSQNGDDTGTWPNNQFDTEMLQAMILASASEAADGSSTLGGGAGTMGLSARYGPQFTLQHVPDYRQNVYIPGSNATLTNAAGKRDGKAPAGGNGNKKKSGKKEKK

SEQ ID NO: 50787 - protein, 6 aa, Homo sapiens
MDTHRS

SEQ ID NO: 50788 - protein, 98 aa, Homo sapiens
MAFLFNWIGFFLSFCLTTSAAGRYGAISGFGLSLIKWILIVRFSTYFPGYFDGQYWLWWVFLVLGFLLFLRGFINYAKVRKMPETFSNLPRTRVLFIY

SEQ ID NO: 50789 - protein, 693 aa, Homo sapiens
MGLYMGETETKVMGNDLGFPQQGQISLSSGETDLKLLEESIANLNRSTSVPENPKSSASTAVSAAPTEKEFPKTHSDVSSEQQHLKGQTGTNGGNVKLYTTDQSTFDILQDLEFSSGSPGKETNESPWRSDLLIDENCLLSPLAGEDDSFLLEGNSNEDCKPLILPDTKPKIKDNGDLVLSSPSNVTLPQVKTEKEDFIELCTPGVIKQEKLGTVYCQASFPGANIIGNKMSAISVHGVSTSGGQMYHYDMNTASLSQQQDQKPIFNVIPPIPVGSENWNRCQGSGDDNLTSLGTLNFPGRTVFSNGYSSPSMRPDVSSPPSSSSTATTGPPPKLCLVCSDEASGCHYGVLTCGSCKVFFKRAVEGRQHNYLCAGRNDCIIDKIRRKNCPACRYRKCLQAGMNLEARKTKKKIKGIQQATTGVSQETSENPGNKTIVPATLPQLTPTLVSLLEVIEPEVLYAGYDSSVPDSTWRIMTTLNMLGGRQVIAAVKWAKAIPGFRNLHLDDQMTLLQYSWMFLMAFALGWRSYRQSSANLLCFAPDLIINEQRMTLPCMYDQCKHMLYVSSELHRLQVSYEEYLCMKTLLLLSSVPKDGLKSQELFDEIRMTYIKELGKAIVKREGNSSQNWQRFYQLTKLLDSMHEVVENLLNYCFQTFLDKTMSIEFPEMLAEIITNQIPKYSNGNIKKLLFHQK

SEQ ID NO: 50790 - protein, 692 aa, Homo sapiens
MGLYMGETETKVMGNDLGFPQQGQISLSSGETDLKLLEESIANLNRSTSVPENPKSSASTAVSAAPTEKEFPKTHSDVSSEQQHLKGQTGTNGGNVKLYTTDQSTFDILQDLEFSSGSPGKETNESPWRSDLLIDENCLLSPLAGEDDSFLLEGNSNEDCKPLILPDTKPKIKDNGDLVLSSPSNVTLPQVKTEKEDFIELCTPGVIKQEKLGTVYCQASFPGANIIGNKMSAISVHGVSTSGGQMYHYDMNTASLSQQQDQKPIFNVIPPIPVGSENWNRCQGSGDDNLTSLGTLNFPGRTVFSNGYSSPSMRPDVSSPPSSSSTATTGPPPKLCLVCSDEASGCHYGVLTCGSCKVFFKRAVEGQHNYLCAGRNDCIIDKIRRKNCPACRYRKCLQAGMNLEARKTKKKIKGIQQATTGVSQETSENPGNKTIVPATLPQLTPTLVSLLEVIEPEVLYAGYDSSVPDSTWRIMTTLNMLGGRQVIAAVKWAKAIPGFRNLHLDDQMTLLQYSWMFLMAFALGWRSYRQSSANLLCFAPDLIINEQRMTLPCMYDQCKHMLYVSSELHRLQVSYEEYLCMKTLLLLSSVPKDGLKSQELFDEIRMTYIKELGKAIVKREGNSSQNWQRFYQLTKLLDSMHEVVENLLNYCFQTFLDKTMSIEFPEMLAEIITNQIPKYSNGNIKKLLFHQK

SEQ ID NO: 50791 - protein, 375 aa, Homo sapiens
MFSPKRDTANDLAKDSKGRFFIDRDGFLFRYILDYLRDRQVVLPDHFPEKGRLKREAEYFQLPDLVKLLTPDEIKQSPDEFCHSDFEDASQGSDTRICPPSSLLPADRKWGFITVGYRGSCTLGREGQADAKFRRVPRILVCGRISLAKEVFGETLNESRDPDRAPERYTSRFYLKFKHLERAFDMLSECGFHMVACNSSVTASFINQYTDDKIWSSYTEYVFYREPSRWSPSHCDCCCKNGKGDKEGESGTSCNDLSTSSCDSQSEASSPQETVICGPVTRQTNIQTLDRPIKKGPVQLIQQSEMRRKSDLLRTLTSGSRESNMSSKKKAVKEKLSIEEELEKCIQDFLKIKIPDRFPERKHPWQSELLRKYHL

SEQ ID NO: 50792 - protein, 603 aa, Homo sapiens [sequence omitted]

SEQ ID NO: 50793 - protein, 592 aa, Homo sapiens
MLGELLEESQMEATRLRQKAEELVKDNELLPPPSPSLGSFDPLAELTGKDSNVTASPTAPACPSDKPAPVQKPPSSGTSSEFEVVTPEEQNSPESSSHANAMALGPLPREDGNLMLHLQRLETTLSVCAEEPDHGQLFTHLGRMALEFNRLASKVHKNEQRTSILQTLCEQLRKENEALKAKLDKGLEQRDQAAERLREENLELKKLLMSNGNKEGASGRPGSPKMEGTGKKAVAGQQQASVTAGKVPEVVALGAAEKKVKMLEQQRSELLEVNKQWDQHFRSMKQQYEQKITELRQKLADLQKQVTDLEAEREQKQRDFDRKLLLAKSKIEMEETDKEQLTAEAKELRQKVKYLQDQLSPLTRQREYQEKEIQRLNKALEEALSIQTPPSSPPTAFGSPEGAGALLRKQELVTQNELLKQQVKIFEEDFQRERSDRERMNEEKEELKKQVEKLQAQVTLSNAQLKAFKDEEKAREALRQQKRKAKASGERYHVEPHPEHLCGAYPYAYPPMPAMVPHHGFEDWSQIRYPPPPMAMEHPPPLPNSRLFHLPEYTWRLPCGGVRNPNQSSQVMDPPTARPTEPEPADLRLPRN

SEQ ID NO: 50794 - protein, 576 aa, Homo sapiens
MLGELLEESQMEATRLRQKAEELVKDNELLPPPSPSLGSFDPLAELTGKDSNVTASPTAPACPSDKPAPVQKPPSSGTSSEFEVVTPEEQNSPESSSHANAMALGPLPREDGNLMLHLQRLETTLSVCAEEPDHGQLFTHLGRMALEFNRLASKVHKNEQRTSILQTLCEQLRKENEALKAKLDKGLEQRDQAAERLREENLELKKLLMSNGNKEGASGRPGSPKMEGTGKKAVAGQQQASVTAGKVPEVVALGAAEKKVKMLEQQRSELLEVNKQWDQHFRSMKQQYEQKITELRQKLADLQKQVTDLEAEREQKQRDFDRKLLLAKSKIEMEETDKEQLTAEAKELRQKVKYLQDQLSPLTRQREYQEKEIQRLNKALEEALSIQTPPSSPPTAFGSPEGAGALLRKQELVTQNELLKQQVKIFEEDFQRERSDRERMNEEKEELKKQVEKLQAQVTLSNAQLKAFKDEEKAREALRQQKRKAKASGERYHVEPHPEHLCGAYPYAYPPMPAMVPHHGFEDWSQIRYPPPPMAMEHPPPLPNSRLFHLHQFCRSRNTPGVYPVEGFEIQIRAPK

SEQ ID NO: 50795 - protein, 404 aa, Homo sapiens
MALFPSVRILRTKKREGLIRTRMLGASVATGDVITFLDSHCEANVNWLPPLLDRIARNRKTIVCPMIDVIDHDDFRYETQAGDAMRGAFDWEMYYKRIPIPPELQKADPSDPFESPVMAGGLFAVDRKWFWELGGYDPGLEIWGGEQYEISFKVWMCGGRMEDIPCSRVGHIYRKYVPYKVPAGVSLARNLKRVAEVWMDEYAEYIYQRRPEYRHLSAGDVAVQKKLRSSLNCKSFKWFMTKIAWDLPKFYPPVEPPAAAWGEIRNVGTGLCADTKHGALGSPLRLEGCVRGRGEAAWNNMQVFTFTWREDIRPGDPQHTKKFCFDAISHTSPVTLYDCHSMKGNQLWKYRKDKTLYHPVSGSCMDCSESDHRIFMNTCNPSSLTQQWLFEHTNSTVLEKFNRN

SEQ ID NO: 50796 - protein, 167 aa, Homo sapiens
MALFPSVRILRTKKREGLIRTRMLGASVATGDVITFLDSHCEANVNWLPPLLDRIARNRKTIVCPMIDVIDHDDFRYETQAGDAMRGAFDWEMYYKRIPIPPELQKADPSDPFESPVMAGGLFAVDRKWFWELGGYDPGLEIWGGEQYEISFKVSQLSRRPVLGTAS

SEQ ID NO: 50797 - protein, 245 aa, Homo sapiens
MMGTREESLEDVLGPPPDNDDVVNDFDIEDEVVEVENREENLLKISRRVKEYKVEILNPPREGKKLLVLDVDYTLFDHRSCAETGVELMRPYLHEFLTSAYEDYDIVIWSATNMKWIEAKMKELGVSTNANYKITFMLDSAAMITVHTPRRGLIDVKPLGVIWGKFSEFYSKKNTIMFDDIGRNFLMNPQNGLKIRPFMKAHLNRDKDKELLKLTQYLKEIAKLDDFLDLNHKYWERYLSKKQGQ

SEQ ID NO: 50798 - protein, 455 aa, Homo sapiens
MSERVQESMSSEMLALQIELTEMESMKTTLKEEVNELQYRQEQLELLITNLMRQVDRLKEEKEEREKEAVSYYNALEKARVANQDLQVQLDQALQQALDPNSKGNSLFAEVEDRRAAMERQLISMKVKYQSLKKQNVFNREQMQRMKLQIATLLQMKGSQTEFEQQERLLAMLEQKNGEIKHLLGEIRNLEKFKNLYDSMESKPSVDSGTLEDNTYYTDLLQMKLDNLNKEIESTKGELSIQRMKALFESQRALDIERKLFANERCLQLSESENMKLRAKLDELKLKYEPEETVEVPVLKKRREVLPVDITTAKDACVNNSALGGEVYRLPPQKEETQSCPNSLEDNNLQLEKSVSIYTPVVSLSPHKNLPVDMQLKKEKKCVKLIGVPADAEALSERSGNTPNSPRLAAESKLQTEVKEGKETSSKLEKETCKKLHPILYVSSKSTPETQCPQQ

SEQ ID NO: 50799 - protein, 12 aa, Homo sapiens
MEAADVAHRAHM

SEQ ID NO: 50800 - protein, 381 aa, Homo sapiens
MLWKKLIERMVRTDPLWKGLSERRGWDQYLFKNRPTDGPPNSFYRSLYPKIIQDIETIESNWRCGRHNLQRIQCRSENSKGVYCLQYDDEKIISGLRDNSIKIWDKTSLECLKVLTGHTGSVLCLQYDERVIVTGSSDSTVRVWDVNTGEVLNTLIHHNEAVLHLRFSNGLMVTCSKDRSIAVWDMASATDITLRRVLVGHRAAVNVVDFDDKYIVSASGDRTIKVWSTSTCEFVRTLNGHKRGIACLQYRDRLVVSGSSDNTIRLWDIECGACLRVLEGHEELVRCIRFDNKRIVSGAYDGKIKVWDLQAALDPRAPASTLCLRTLVEHSGRVFRLQFDEFQIISSSHDDTILIWDFLNVPPSAQNETRSPSRTYTYISR

SEQ ID NO: 50801 - protein, 598 aa, Homo sapiens
MYELDREMNYQQNPRDNFLSLEDCKDIENLESFTDVLDNEGALTSNWEQWDTYCEDLTKYTKLTSCDIWGTKEVDYLGLDDFSSPYQDEEVISKTPTLAQLNSEDSQSVSDSLYYPDSLFSVKQNPLPSSFPGKKITSRAAAPVCSSKTLQAEVPLSDCVQKASKPTSSTQIMVKTNMYHNEKVNFHVECKDYVKKAKVKINPVQQSRPLLSQIHTDAAKENTCYCGAVAKRQEKKGMEPLQGHATPALPFKETQELLLSPLPQEGPGSLAAGESSSLSASTSVSDSSQKKEEHNYSLFVSDNLGEQPTKCSPEEDEEDEEDVDDEDHDEGFGSEHELSENEEEEEEEEDYEDDKDDDISDTFSEPGYENDSVEDLKEVTSISSRKRGKRRYFWEYSEQLTPSQQERMLRPSEWNRDTLPSNMYQKNGLHHGKYAVKKSRRTDVEDLTPNPKKLLQIGNELRKLNKVISDLTPVSELPLTARPRSRKEKNKLASRACRLKKKAQYEANKVKLWGLNTEYDNLLFVINSIKQEIVNRVQNPRDERGPNMGQKLEILIKDTLGLPVAGQTSEFVNQVLEKTAEGNPTGGLVGLRIPTSKV

SEQ ID NO: 50802 - protein, 141 aa, Homo sapiens
MLSNQASWRKANLTCKIAIDNLEKAELLQGGDLLRQRKTTKESLAQTSSTITESLMGISRMMAQQVQQSEEAMQSLVTSSRTILDANEEFKSMSGTIQLGRKLITKYNRRELTDKLLIFLALALFLATVLYIVKKRLFPFL

SEQ ID NO: 50803 - protein, 340 aa, Homo sapiens
MVDLHEQVHQGPVPLSYTVTTVTTQGFPLPTGQHIPGCSAQQLPACSVMFSGQHYPLCCLPPPLIQACTMQQLPVPYQAYPHLISSDHYILHPPPPAPPPQPTHMAPLGQFVSLQTQHPRMPLQRLDNDVDLRGDQPSLGSFTYSTSAPGPALSPSVPLHYLPHDPLHQELSFGVPYSHMMPRRLSTQRYRLQQPLPPPPPPPPPPPYYPSFLPYFLSMLPMSPTAMGPTISLDLDVDDVEMENYEALLNLAERLGDAKPRGLTKADIEQLPSYRFNPDSHQSEQTLCVVCFSDFEARQLLRVLPCNHEFHTKCVDKWLKANRTCPICRADASEVPREAE

SEQ ID NO: 50804 - protein, 26 aa, Homo sapiens
MTQVVSPGPAPPPPCPPDATMGSGSD

SEQ ID NO: 50805 - protein, 856 aa, Homo sapiens
MDFKSSKQADSTSIGKEDPGSSRKADPMFTGKAEPEILGKGDPVAPGRMDPMTVRKEDLGSLGKVDPLCSSKTYTVSPRKEDPGSLRKVDPVSSDKVDPVFPRKEEPRYSGKEHPVSSEKVAPTSAEKVDLVLSGKRDPGPSGKADPMPLESMDSASTGKTEPGLLGKLIPGSSGKNGPVSSGTGAPGSLGRLDPTCLGMADPASVGNVETVPATKEDSRFLGKMDPASSGEGRPVSGHTDTTASAKTDLTSLKNVDPMSSGKVDPVSLGKMDPMCSGKPELLSPGQAERVSVGKAGTVSPGKEDPVSSRREDPISAGSRKTSSEKVNPESSGKTNPVSSGPGDPRSLGTAGPPSAVKAEPATGGKGDPLSSEKAGLVASGKAAPTASGKAEPLAVGKEDPVSKGKADAGPSGQGDSVSIGKVVSTPGKTVPVPSGKVDPVSLGKAEAIPEGKVGSLPLEKGSPVTTTKADPRASGKAQPQSGGKAETKLPGQEGAAAPGEAGAVCLKKETPQASEKVDPGSCRKAEPLASGKGEPVSLGKADSAPSRKTESPSLGKVVPLSLEKTKPSSSSRQLDRKALGSARSPEGARGSEGRVEPKAEPVSSTEASSLGQKDLEAAGAERSPCPEAAAPPPGPRTRDNFTKAPSWEASAPPPPREDAGTQAGAQACVSVAVSPMSPQDGAGGSAFSFQAAPRAPSPPSRRDAGLQVSLGAAETRSVATGPMTPQAAAPPAFPEVRVRPGSALAAAVAPPEPAEPVRDVSWDEKGMTWEVYGAAMEVEVLGMAIQKHLERQIEEHGRQGAPAPPPAARAGPGRSGSVRTAPPDGAAKRPPGLFRALLQSVRRPRCCSRAGPTAE

SEQ ID NO: 50806 - protein, 641 aa, Homo sapiens
MTEEEQFALALKMSEQEAREVNSQEEEEEELLRKAIAESLNSCRPSDASATRSRPLATGPSSQSHQEKTTDSGLTEGIWQLVPPSLFKGSHISQGNEAEEREEPWDHTEKTEEEPVSGSSGSWDQSSQPVFENVNVKSFDRCTGHSAEHTQCGKPQESTGRGSAFLKAVQGSGDTSRHCLPTLADAKGLQDTGGTVNYFWGIPFCPDGVDPNQYTKVILCQLEVYQKSLKMAQRQLLNKKGFGEPVLPRPPSLIQNECGQGEQASEKNECISEDMGDEDKEERQESRASDWHSKTKDFQESSIKSLKEKLLLEEEPTTSHGQSSQGIVEETSEEGNSVPASQSVAALTSKRSLVLMPESSAEEITVCPETQLSSSETFDLEREVSPGSRDILDGVRIIMADKEVGNKEDAEKEVAISTFSSSNQVSCPLCDQCFPPTKIERHAMYCNGLMEEDTVLTRRQKEAKTKSDSGTAAQTSLDIDKNEKCYLCKSLVPFREYQCHVDSCLQLAKADQGDGPEGSGRACSTVEGKWQQRLKNPKEKGHSEGRLLSFLEQSEHKTSDADIKSSETGAFRVPSPGMEEAGCSREMQSSFTRRDLNESPVKSFVSISEATDCLVDFKKQVTVQPGSRTRTKAGRGRRRKF

SEQ ID NO: 50807 - protein, 709 aa, Homo sapiens
MPKLVKNLLGEMPLWVCQSCRKSMEEDERQTGREHAVAISLSHTSCKSQSCGDDSHSSSSSSSSSSSSSSSSCPGNSGDWDPSSFLSAHKLSGLWNSPHSSGAMPGSSLGSPPTIPGEAFPVSEHHQHSDLTAPPNSPTGHHPQPASLIPSHPSSFGSPPHPHLLPTTPAAPFPAQASECPVAAATAPHTPGPCQSSHLPSTSMPLLKMPPPFSGCSHPCSGHCGGHCSGPLLPPPSSQPLPSTHRDPGCKGHKFAHSGLACQLPQPCEADEGLGEEEDSSSERSSCTSSSTHQRDGKFCDCCYCEFFGHNAEKEKAQLAAEALKQANRVSGSREPRPARERLLEWPDRELDRVNSFLSSRLQEIKNTVKDSIRASFSVCELSMDSNGFSKEGAAEPEPQSLPPSNLSGSSEQQPDINLDLSPLTLGSPQNHTLQAPGEPAPPWAEMRGPHPPWTEVRGPPPGIVPENGLVRRLNTVPNLSRVIWVKTPKPGYPSSEEPSSKEVPSCKQELPEPVSSGGKPQKGKRQGSQAKKSEASPAPRPPASLEVPSAKGQVAGPKQPGRVLELPKVGSCAEAGEGSRGSRPGPGWAGSPKTEKEKGSSWRNWPGEAKARPQEQESVQPSGPARPQSLPQGKGRSRRSRNKQEKPASSLDDVFLPKDMDGVEMDETDREVEYFKRFCLDSAKQTRQKVAVNWTNFSLKKTTPSTAQ

SEQ ID NO: 50808 - protein, 167 aa, Homo sapiens
MHDVDLLPLNEELDYGFPEAGPFHVASPELHPLYHYKTYVGGILLLSKQHYRLCNGMSNRFWGWGREDDEFYRRIKGAGLQLFRPSGITTGYKTFRHLHDPAWRKRDQKRIAAQKQEQFKVDREGGLNTVKYHVASRTALSVGGAPCTVLNIMLDCDKTATPWCTFS

SEQ ID NO: 50809 - protein, 520 aa, Homo sapiens
MTKSTQTQDSFQEQIRKRLKRDEPWNFISERSCIYEEKLKKQQDKNENLQIISVAHTKILTVDRSHKNVEFGQNFYLKSVFIKQQRFAKEKTPSKCEIQRNSFKQNSNLLNQSKIKTAEKRYKCSTCEKAFIHNSSLRKHQKNHTGEKLFKCKECLKAFSQSSALIQHQRTHTGEKPYICKECGKAFSHSASLCKHLRTHTVEKCYRCKECGKSFSRRSGLFIHQKIHAQENPHKYNPGRKASSYSTSLSGSQKIHLRKKSYLCNECGNTFKSSSSLRYHQRIHTGEKPFKCSECGRAFSQSASLIQHERIHTGEKPYRCNECGKGFTSISRLNRHRIIHTGEKLYNCNECGKALSSHSTLIIHERIHTGEKPCKCKVCGKAFRQSSALIQHQRMHTGERPYKCNECDKTFRCNSSLSNHQRIHTGEKPYRCLECGMSFGQSAALIQHQRIHTGEKPFKCNTCGKTFRQSSSLIAHQRIHTGEKPYECNACGKLFSQRSSLTNHYKIHIEEDSLKADLHV

SEQ ID NO: 50810 - protein, 83 aa, Homo sapiens
MSGFREKLLRACWRRHFSQKSPCGAGVRGVPGWKMSLYMKKSASGQSQAQWIAKMWKSPRFKLQENRSMESALSCWGITDAFD

SEQ ID NO: 50811 - protein, 132 aa, Homo sapiens
MRLTDSLFLWVGATPHLRNLAVAMCSRYDSIPVSTSLLGDTSDTTSTGLAQRLGLGGKTGLACECGVEWGLSKGHEAECSTLPTPQHTSCGPARKTNKQVFVSYNLQNTDSNFALLVENRIKEEMEAFPEKF

SEQ ID NO: 50812 - protein, 93 aa, Homo sapiens
MRLTDSLFLWVGATPHLRNLAVAMCSRYDSIPVSTSLLGDTSDTTSTGLAQRLARKTNKQVFVSYNLQNTDSNFALLVENRIKEEMEAFPEKF

SEQ ID NO: 50813 - protein, 81 aa, Homo sapiens
MFVRGCWVNGIRRLIVSRRGDEEEFFEIRTEWSDRSVLYLHRSLADLGRLWQRLRDAFPEDRSELAQGPLRQDLFNELLEN

SEQ ID NO: 50814 - protein, 318 aa, Homo sapiens
MREAGRAMHLLKKRERQREQMEVLKQRIAEETILKSQVDKRFSAHYDAVEAELKSSTVGLVTLNDMKARQEALVRERERQLAKRQHLEEQRLQQERQREQEQRRERKRKISCLSFALDDLDDQADAAEARRAGNLGKNPDVDTSFLPDRDREEEENRLREELRQEWEAQREKVKDEEMEVTFSYWDGSGHRRTVRVRKGNTVQQFLKKALQGLRKDFLELRSAGVEQLMFIKEDLILPHYHTFYDFIIARARGKSGPLFSFDVHDDVRLLSDATMEKDESHAGKVVLRSWYEKNKHIFPASRWEAYDPEKKWDKYTIR

SEQ ID NO: 50815 - protein, 1722 aa, Homo sapiens
MSAVMSVGKVTENGGSPQGIKSPSKPPGPNRIGRRNQETKEEKSSYNCPLCEKICTTQHQLTMHIRQHNTDTGGADHSCSICGKSLSSASSLDRHMLVHSGERPYKCTVCGQSFTTNGNMHRHMKIHEKDPNSATATAPPSPLKRRRLSSKRKLSHDAESEREDPAPAKKMVEDGQSGDLEKKADEVFHCPVCFKEFVCKYGLETHMETHSDNPLRCDICCVTFRTHRGLLRHNALVHKQLPRDAMGRPFIQNNPSIPAGFHDLGFTDFSCRKFPRISQAWCETNLRRCISEQHRFVCDTCDKAFPMLCSLALHKQTHVAADQGQEKPQATPLPGDALDQKGFLALLGLQHTKDVRPAPAEEPLPDDNQAIQLQTLKCQLPQDPGCTNLLSLSPFEAASLGGSLTVLPATKDSIKHLSLQPFQKGFIIQPDSSIVVKPISGESAIELADIQQILKMAASAPPQISLPPFSKAPAAPLQAIFKHMPPLKPKPLVTPRTVVATSTPPPLINAQQASPGCISPSLPPPPLKLLKGSVEAASNAHLLQSKSGTQPHAATRLSLQQPRAELPGQPEMKTQLEQDSIIEALLPLSMEAKIKQEITEGELKAFMTAPGGKKTPAMRKVLYPCRFCNQVFAFSGVLRAHVRSHLGISPYQCNICDYIAADKAALIRHLRTHSGERPYICKICHYPFTVKANCERHLRKKHLKATRKDIEKNIEYVSSSAAELVDAFCAPDTVCRLCGEDLKHYRALRIHMRTHCGRGLGGGHKGRKPFECKECSAAFAAKRNCIHHILKQHLHVPEQDIESYVLAADGLGPAEAPAAEASGRGEDSGCAALGDCKPLTAFLEPQNGFLHRGPTQPPPPHVSIKLEPASSFAVDFNEPLDFSQKGLALVQVKQENISFLSPSSLVPYDCSMEPIDLSIPKNFRKGDKDLATPSEAKKPEEEAGSSEQPSPCPAPGPSLPVTLGPSGILESPMAPAPAATPEPPAQPLQGPVQLAVPIYSSALVSSPPLVGSSALLSGTALLRPLRPKPPLLLPKPPVTEELPPLASIAQIISSVSSAPTLLKTKVADPGPASTGSNTTASDSLGGSVPKAATTATPAATTSPKESSEPPAPASSPEAASPTEQGPAGTSKKRGRKRGMRSRPRANSGGVDLDSSGEFASIEKMLATTDTNKFSPFLQTAEDNTQDEVAGAPADHHGPSDEEQGSPPEDKLLRAKRNSYTNCLQKITCPHCPRVFPWASSLQRHMLTHTGQKPFPCQKCDAFFSTKSNCERHQLRKHGVTTCSLRRNGLIPQSKESDVGSHDSTDSQSDAETAAAAGEVLDLTSRDREQPSEGATELRQVAGDAPVEQATAETASPVHREEHGRGESHEPEEEHGTEESTGDADGAEEDASSNQSLDLDFATKLMDFKLAEGDGEAGAGGAASQEQKLACDTCGKSFKFLGTLSRHRKAHGRQEPKDEKGDGASTAEEGPQPAPEQEEKPPETPAEVVESAPGAGEAPAEKLAEETEGPSDGESAAEKRSSEKSDDDKKPKTDSPKSVASKADKRKKVCSVCNKRFWSLQDLTRHMRSHTGERPYKCQTCERTFTLKHSLVRHQRIHQKARHAKHHGKDSDKEERGEEDSENESTHSGNNAVSENEAELAPNASNHMAVTRSRKEGLASATKDCSHREEKVTAGWPSEPGQGDLNPESPAALGQDLLEPRSKRPAHPILATADGASQLVGME

SEQ ID NO: 50816 - protein, 13 aa, Homo sapiens
MVALRSGEGRAPR

SEQ ID NO: 50817 - protein, 324 aa, Homo sapiens [sequence omitted]

SEQ ID NO: 50818 - protein, 474 aa, Homo sapiens [sequence omitted]

SEQ ID NO: 50819 - protein, 692 aa, Homo sapiens
MADQQLPYWVQCTKPECRKWRQLTKEIQLTPQIAKTYRCGMKPNTAIKPETSDHCSLPEDLRVLEVSNHWWYSMLILPPLLKDSVAAPLLSAYYPDCVGMSPSCTSTNRAAATGNASPGKLEHSKAALSVHVPGMNRYFQPFYQPNECGKALCVRPDVMELDELYEFPEYSRDPTMYLALRNLILALWYTNCKEALTPQKCIPHIIVRGLVRIRCVQEVERILYFMTRKGLINTGVLSVGADQYLLPKDYHNKSVIIIGAGPAGLAAARQLHNFGIKVTVLEAKDRIGGRVWDDKSFKGVTVGRGAQIVNGCINNPVALMCEQLGISMHKFGERCDLIQEGGRITDPTIDKRMDFHFNALLDVVSEWRKDKTQLQDVPLGEKIEEIYKAFIKESGIQFSELEGQVLQFHLSNLEYACGSNLHQVSARSWDHNEFFAQFAGDHTLLTPGYSVIIEKLAEGLDIQLKSPVQCIDYSGDEVQVTTTDGTGYSAQKVLVTVPLALLQKGAIQFNPPLSEKKMKAINSLGAGIIEKIALQFPYRFWDSKVQGADFFGHVPPSASKRGLFAVFYDMDPQKKHSVLMSVIAGEAVASVRTLDDKQVLQQCMATLRELFKEQEVPDPTKYFVTRWSTDPWIQMAYSFVKTGGSGEAYDIIAEDIQGTVFFAGEATNRHFPQTVTGAYLSGVREASKIAAF

SEQ ID NO: 50820 - protein, 285 aa, Homo sapiens
MSITVRNNRIIMRMEYLKAVITPECLLILDYRNLNLEQWLFRELPSQLSGEGQLVTYPLPFEFRAIEALLQYWINTLQGKLSILQPLILETLDALVDPKHSSVDRSKLHILLQNGKSLSELETDIKIFKESILEILDEEELLEELCVSKWSDPQVFEKSSAGIDHAEEMELLLENYYRLADDLSNAARELRVLIDDSQSIIFINLDSHRNVMMRLNLQLTMGTFSLSLFGLMGVAFGMNLESSLEEDHRIFWLITGIMFMGSGLIWRRLLSFLGRQLEAPLPPMV

SEQ ID NO: 50821 - protein, 537 aa, Homo sapiens [sequence omitted]

SEQ ID NO: 50822 - protein, 559 aa, Homo sapiens [sequence omitted]

SEQ ID NO: 50823 - protein, 8 aa, Homo sapiens
MKTTDFCF

SEQ ID NO: 50824 - protein, 325 aa, Homo sapiens
MLLQTAVLQGRLLRSHSLHYLFMGASEQDLGLSLFEALGYVDDQLFVFYDHESRRVEPRTPWVSSRISSQMWLQLSQSLKGWDHMFTVDFWTIMENHNHSKESHTLQVILGCEMQEDNSTEGYWKYGYDGQDHLEFCPDTLDWRAAEPRAWPTKLEWERHKIRARQNRAYLERDCPAQLQQLLELGRGVLDQQVPPLVKVTHHVTSSVTTLRCRALNYYPQNITMKWLKDKQPMDAKEFEPKDVLPNGDGTYQGWITLAVPPGEEQRYTCQVEHPGLDQPLIVIWEPSPSGTLVIGVISGIAVFVVILFIGILFIILRKRQGSSF

SEQ ID NO: 50825 - protein, 336 aa, Homo sapiens [sequence omitted]

SEQ ID NO: 50826 - protein, 67 aa, Homo sapiens
MGIMNSFVNDIFERIAGEASRLAHYNKRSTITSREIQTAVRLLLPGELAKHAVSEGTKAVTKYTSSK

SEQ ID NO: 50827 - protein, 67 aa, Homo sapiens; identical to SEQ ID NO: 50826

SEQ ID NO: 50828 - protein, 22 aa, Homo sapiens
MLSSLRSQIVRIRNVCFLPSGF

SEQ ID NO: 50829 - protein, 179 aa, Homo sapiens [sequence omitted]

SEQ ID NO: 50830 - protein, 135 aa, Homo sapiens
MQEGLLAVKVKEEEEEHSCGPESGLSRNNPHTREIFRRRFRQFCYQESPGPREALQRLQELCHQWLRPEMHTKEQILELLVLEQFLTILPEELQAWVRQHRPVSGEEAVTVLEDLERELDDPGEQMARLGLGMWS

SEQ ID NO: 50831 - protein, 143 aa, Homo sapiens
MANGKPGDPKSALHRGPPGSRGPLIPPLLSLPPPPWGRGPIRRGLGPRSSPYGRGWWGVNAEPPFPGPGHGGPTRGSFHKEQRNPRRLKSWSLIKNTCPPKDDPQVMEDKSDRPVCRHFAKKGHCRYEDLCAFYHPGVNGPPL

SEQ ID NO: 50832 - protein, 57 aa, Homo sapiens [sequence omitted]

SEQ ID NO: 50833 - protein, 220 aa, Homo sapiens
MRMLFLEQPLPQAAVALWVKKEFSKAQEESTGLLSGLRIWHTQLLPGGLQGLILNPIFRQNLRIALLGGGKAWSDDTSQLGPDKHARDVPSLDKYAEERWEVVLHFMVGSPSAAVSQDLAQLLSQAGLMKSTEPGEPPCITSAGFQFLLLDTPAQLWYFMLQYLQTAQSRGMDLVEILSFLFQLSFSTLGKDYSVEGMSDSLLNFLQHLREFGLVFQRKV

SEQ ID NO: 50834 - protein, 756 aa, Homo sapiens
MAPTWLSDIPLVQPPGHQDVSERRLDTQRPQVTMWERDVSSDRQEPGRRGRSWGLEGSQALSQQAEVIVRQLQELRRLEEEVRLLRETSLQQKMRLEAQAMELEALARAEKAGRAEAEGLRAALAGAEVVRKNLEEGSQRELEEVQRLHQEQLSSLTQAHEEALSSLTSKAEGLEKSLSSLETRRAGEAKELAEAQREAELLRKQLSKTQEDLEAQVTLVENLRKYVGEQVPSEVHSQTWELERQKLLETMQHLQEDRDSLHATAELLQVRVQSLTHILALQEEELTRKVQPSDSLEPEFTRKCQSLLNRWREKVFALMVQLKAQELEHSDSVKQLKGQVASLQEKVTSQSQEQAILQRSLQDKAAEVEVERMGAKGLQLELSRAQEARRRWQQQTASAEEQLRLVVNAVSSSQIWLETTMAKVEGAAAQLPSLNNRLSYAVRKVHTIRGLIARKLALAQLRQESCPLPPPVTDVSLELQQLREERNRLDAELQLSARLIQQEVGRAREQGEAERQQLSKVAQQLEQELQQTQESLASLGLQLEVARQGQQESTEEAASLRQELTQQQELYGQALQEKVAEVETRLREQLSDTERRLNEARREHAKAVVSLRQIQRRAAQEKERSQELRRLQEEARKEEGQRLARRLQELERDKNLMLATLQQEGLLSRYKQQRLLTVLPSLLDKKKSVVSSPRPPECSASAPVAAAVPTRESIKGSLSVLLDDLQDLSEAISKEEAVCQGDNLDRCSSSNPQMSS

SEQ ID NO: 50835 - protein, 210 aa, Homo sapiens
MKTKTHYRAMQADCLQKLQRYLKSGVAIRRTVPPMVNVTCSEVSEGNITVTCRASSFYPRNITLTWRQDGVSLSHNTQQWGDVLPDGNGTYQTWVATRIRQGEEQRFTCYMEHSGNHGTHPVPSGKALVLQSQRTDFPYVSAAMPCFVIIIILCVPCCKKKTSAAEGPELVSLQVLDQHPVGTGDHRDAAQLGFQPLMSATGSTGSTEGT

SEQ ID NO: 50836 - protein, 201 aa, Homo sapiens [sequence omitted]

SEQ ID NO: 50837 - protein, 158 aa, Homo sapiens
MGTPGEGLGRCSHALIRGVPESLASGEGAGAGLPALDLAKAQREHGVLGGKLRQRLGLQLLELPPEESLPLGPLLGDTAVIQGDTALITRPWSPARRPEVDGVRKALQDLGLRIVEIGDENATLDGTDVLFTGEAGGRHRSWHREVEFGRLGRLEPCF

SEQ ID NO: 50838 - protein, 553 aa, Homo sapiens
MKLWPFQVINEGGKPKVLVSYKGENKAFYPEEISSMVLTKLKETAEAFLGHPVTNAVITVPAYFNDSQRQATKDAGVIAGLNVLRIINEPTAAAIAYGLDKGGQGERHVLIFDLGGGTFDVSILTIDDGIFEVKATAGDTHLGGEDFDNRLVSHFVEEFKRKHKKDISQNKRAVRRLRTACERAKRTLSSSTQANLEIDSLYEGIDFYTSITRARFEELCADLFRGTLEPVEKALRDAKMDKAKIHDIVLVGGSTRIPKVQRLLQDYFNGRDLNKSINPDEAVAYGAAVQAAILMGDKSEKVQDLLLLDVAPLSLGLETAGGVMTALIKRNSTIPTKQTQIFTTYSDNQPGVLIQVYEGERAMTKDNNLLGRFDLTGIPPAPRGVPQIEVTFDIDANGILNVTATDKSTGKVNKITITNDKGRLSKEEIERMVLDAEKYKAEDEVQREKIAAKNALESYAFNMKSVVSDEGLKGKISESDKNKILDKCNELLSWLEVNQLAEKDEFDHKRKELEQMCNPIITKLYQGGCTGPACGTGYVPGRPATGPTIEEVD

SEQ ID NO: 50839 - protein, 377 aa, Homo sapiens
MDGTEIAVSPRSLHSELMCPICLDMLKNTMTTKECLHRFCSDCIVTALRSGNKECPTCRKKLVSKRSLRPDPNFDALISKIYPSREEYEAHQDRVLIRLSRLHNQQALSSSIEEGLRMQAMHRAQRVRRPIPGSDQTTTMSGGEGEPGEGEGDGEDVSSDSAPDSAPGPAPKRPRGGGAGGSSVGTGGGGTGGVGGGAGSEDSGDRGGTLGGGTLGPPSPPGAPSPPEPGGEIELVFRPHPLLVEKGEYCQTRYVKTTGNATVDHLSKYLALRIALERRQQQEAGEPGGPGGGASDTGGPDGCGGEGGGAGGGDGPEEPALPSLEGVSEKQYTIYIAPGGGAFTTLNGSLTLELVNEKFWKVSRPLELCYAPTKDPK

SEQ ID NO: 50840 - protein, 212 aa, Homo sapiens
MARYVLKTDDDVYVNVPELVSELVLRGGRWGQWERSTEPQREAEQEGGQVLHSEEVPLLYLGRVHWRVNPSRTPGGRHRVSEEQWPHTWGPFPPYASGTGYVLSASAVQLILKVASRAPLLPLEDVFVGVSARRGGLAPTQCVKLAGATHYPLDRCCYGKFLLTSHRLDPWKMQEAWKLVGGSDGERTAPFCSWFQGVLGILRCRAIAWLQS

SEQ ID NO: 50841 - protein, 408 aa, Homo sapiens
MLGMKLSLPYGLKGLDWDAGHLSNRQQSYCYCGGPGEWNLKMLQCRSCLQWFHEACTQCLSKPLLYGDRFYEFECCVCRGGPEKVRRLQLRWVDVAHLVLYHLSVCCKKKYFDFDREILPFTSENWDSLLLGELSDTPKGERSSRLLSALNSHKDRFISGREIKKRKCLFGLHARMPPPVEPPTGDGALTSFPSGQGPGGGVSRPLGKRRRPEPEPLRRRQKGKVEELGPPSAVRNQPEPQEQRERAHLQRALQASVSPPSPSPNQSYQGSSGYNFRPTDARCLPSSPIRMFASFHPSASTAGTSGDSGPPDRSPLELHIGFPTDIPKSAPHSMTASSSSVSSPSPGLPRRSAPPSPLCRSLSPGTGGGVRGGVGYLSRGDPVRVLARRVRPDGSVQYLVEWGGGGIF

SEQ ID NO: 50842 - protein, 71 aa, Homo sapiens [sequence omitted]

SEQ ID NO: 50843 - protein, 1128 aa, Homo sapiens
MWRGPNVNCVDSTGYTPLHHAALNGHKDVVEVLLRNDALTNVADSKGCYPLHLAAWKGDAQIVRLLIHQGPSHTRVNEQNALEIKELKKYGPFDPYINAKNNDNETALHCAAQYGHTEVVKVLLEELTDPTMRNNKFETPLDLAALYGRLEVVKMLLNAHPNLLSCNTKKHTPLHLAARNGHKAVVQVLLDAGMDSNYQTEMGSALHEAALFGKTDVVQILLAAGTDVNIKDNHGLTALDTVRELPSQKSQQIAALIEDHMTGKRSTKEVDKTPPPQPPLISSMDSISQKSQGDVEKAVTELIIDFDANAEEEGPYEALYNAISCHSLDSMASGRSSDQDSTNKEAEAAGVKPAGVRPRERPPPPAKPPPDEEEEDHIDKKYFPLTASEVLSMRPRIHGSAAREEDEHPYELLLTAETKKVVLVDGKTKDHRRSSSSRSQDSAEGQDGQVPEQFSGLLHGSSPVCEVGQDPFQLLCTAGQSHPDGSPQQGACHKASMQLEETGVHAPGASQPSALDQSKRVGYLTGLPTTNSRSHPETLTHTASPHPGGAEEGDRSGARSRAPPTSKPKAELKLSRSLSKSDSDLLTCSPTEDATMGSRSESLSNCSIGKKRLEKSPSFASEWDEIEKIMSSIGEGIDFSQERQKISGLRTLEQSVGEWLESIGLQQYESKLLLNGFDDVHFLGSNVMEEQDLRDIGISDPQHRRKLLQAARSLPKVKALGYDGNSPPSVPSWLDSLGLQDYVHSFLSSGYSSIDTVKNLWELELVNVLKVQLLGHRKRIIASLADRPYEEPPQKPPRFSQLRCQDLLSQTSSPLSQNDSCTGRSADLLLPPGDTGRRRHDSLHDPAAPSRAERFRIQEEHREAKLTLRPPSLAAPYAPVQSWQHQPEKLIFESCGYEANYLGSMLIKDLRGTESTQDACAKMRKSTEHMKKIPTIILSITYKGVKFIDASNKNVIAEHEIRNISCAAQDPEDLCTFAYITKDLQTSHHYCHVFSTVDVNLTYEIILTLGQAFEVAYQLALQAQKSRATGASAAEMIETKSSKPVPKPRVGVRKSAVPLPPDSRCCYCHTCTTHRPSYLPLPSVSPGVKLEPPDMDQDAQSHASVSWVVDPKPDSKRSLSTKYETTIF

SEQ ID NO: 50844 - protein, 370 aa, Homo sapiens
MYGRNELIARYIKLRTGKTRTRKQVSSHIQVLARKKVREYQVGIKAMNLDQVSKDKALQSMASMSSAQIVSASVLQNKFSPPSPLPQAVFSTSSRFWSSPPLLGQQPGPSQDIKPFAQPAYPIQPPLPPTLSSYEPLAPLPSAAASVPVWQDRTIASSRLRLLEYSAFMEVQRDPDTYSKHLFVHIGQTNPAFSDPPLEAVDVRQIYDKFPEKKGGLKELYEKGPPNAFFLVKFWADLNSTIQEGPGAFYGVSSQYSSADSMTISVSTKVCSFGKQVVEKVETEYARLENGRFVYRIHRSPMCEYMINFIHKLKHLPEKYMMNSVLENFTILQVVTSRDSQETLLVIAFVFEVSTSEHGAQHHVYKLVKD

SEQ ID NO: 50845 - protein, 410 aa, Homo sapiens [sequence omitted]

SEQ ID NO: 50846 - protein, 111 aa, Homo sapiens
MLQSYISEIGRSAKSYCEHTARTQPTLSDIVVTLVEMGFNVDTLPAYAKRSQRMVITAPPVTNQPVTPKALTAGQNRPHPPHIPSHFPEFPDPHTYIKTPVSDEALGLRVV

SEQ ID NO: 50847 - protein, 968 aa, Homo sapiens
MAQVLHTQSAVMDGAPDSALRQLLSQKPMEPPAPAIPSRYQQVPQQPHPGFTGGLSKPALQVGQHPTQGHLYYDYQQPLAQVPVQGGQPLQAPQMLSQHMQQMQQHQYYPPQQQQQAGQQRISMQEIQTQPQQIRPSQPQPPPQQQQPQQLQLQQRQGSMQIPQYYQPQPMMQHLQEQQQQQMHLQPPSYHRDPHQYTPEQAHTVQLIPLGSMSQYYYQEPQQPYSHPLYQQSHLSQHQQREDSQLKTYSSDRQAQAMLSSHGDLGPPDTGMGDPASSDLTRVSSTLPHRPLLSPSGIHLNNMGPQHQQLSPSAMWPQMHLPDGRAQPGSPESSGQPKGAFGEQFDAKNKLTCSICLKEFKNLPALNGHMRSHGGMRASPNLKQEIPRKHQPSVPKAEEPLKTVQEKKKFRHRPEPLFIPPPPSYNPNPAASYSGATLYQSQLRSPRVLGDHLLLDPTHELPPYTPPPMLSPVRQGSGLFSNVLISGHGPGAHPQLPLTPLTPTPRVLLCRSNSIDGSNVTVTPGPGEQTVDVEPRINIGLRFQAEIPELQDISALAQDTHKATLVWKPWPELENHDLQQRVENLLNLCCSSALPGGGTNSEFALHSLFEAKGDVMVALEMLLLRKPVRLKCHPLANYHYAGSDKWTSLERKLFNKALATYSKDFIFVQKMVKSKTVAQCVEYYYTWKKIMRLGRKHRTRLAEIIDDCVTSEEEEELEEEEEEDPEEDRKSTKEEESEVPKSPEPPPVPVLAPTEGPPLQALGQPSGSFICEMPNCGADCRCHVTPFLPQVFSSRQALNGHARIHGGTNQVTKARGAIPSGKQKPGGTQSGYCSVKSSPSHSTTSGETDPTTIFPCKECGKVFFKIKSRNAHMKTHRQQEEQQRQKAQKAAFAAEMAATIERTTGPVGAPGLLPLDQLSLIKPIKDVDILDDDVVQQLGGVMEEAEVVDTDLLLDDQDSVLLQGDAEL

SEQ ID NO: 50848 - protein, 264 aa, Homo sapiens
MFLIRVLLPLHKVKSLSVYHPQVIVGLLKFWPKTHSPKEVMFLNELEEILDVIEPSEFSKVMEPLFRQLAKCVSSPHFQVAERALYYWNNEYIMSLISDNAARVLPIMFPALYRNSKSHWNKTIHGLIYNALKLFMEMNQKLFDDCTQQYKAEKQKGRFRMKEREEMWQKIEELARLNPQYPMFRAPPPLPPVYSMETETPTAEDIQLLKRTVETEAVQMLKDIKKEKVLLRRKSELPQDVYTIKALEAHKRAEEFLTASQEAL

SEQ ID NO: 50849 - protein, 1630 aa, Homo sapiens
MSKDEIYANCHKMLGEDGQVIGPSQESAGEVGALDKSVLEEMETDVKSLIQRALRQLEECVGTIPPAPLLHTVHVLSAYASIEPLTGVFKDPRVLDLLMHMLSSPDYQIRWSAGRMIQALSSHDAGTRTQILLSLSQQEAIEKHLDFDSRCALLALFAQATLSEHPMSFEGIQLPQVPGRVLFSLVKRYLHVTSLLDQLNDSAAEPGAQNTSAPEELSGERGQLELEFSMAMGTLISELVQAMRWDQASDRPRSSARSPGSIFQPQLADVSPGLPAAQAQPSFRRSRRFRPRSEFASGNTYALYVRDTLQPGMRVRMLDDYEEISAGDEGEFRQSNNGVPPVQVFWESTGRTYWVHWHMLEILGFEEDIEDMVEADEYQGAVASRVLGRALPAWRWRPMTELYAVPYVLPEDEDTEECEHLTLAEWWELLFFIKKLDGPDHQEVLQILQENLDGEILDDEILAELAVPIELAQDLLLTLPQRLNDSALRDLINCHVYKKYGPEALAGNQAYPSLLEAQEDVLLLDAQAQAKDSEDAAKVEAKEPPSQSPNTPLQRLVEGYGPAGKILLDLEQALSSEGTQENKVKPLLLQLQRQPQPFLALMQSLDTPETNRTLHLTVLRILKQLVDFPEALLLPWHEAVDACMACLRSPNTDREVLQELIFFLHRLTSVSRDYAVVLNQLGARDAISKALEKHLGKLELAQELRDMVFKCEKHAHLYRKLITNILGGCIQMVLGQIEDHRRTHQPINIPFFDVFLRYLCQGSSVEVKEDKCWEKVEVSSNPHRASKLTDHNPKTYWESNGSAGSHYITLHMRRGILIRQLTLLVASEDSSYMPARVVVCGGDSTSSLHTELNSVNVMPSASRVILLENLTRFWPIIQIRIKRCQQGGIDTRIRGLEILGPKPTFWPVFREQLCRHTRLFYMVRAQAWSQDMAEDRRSLLHLSSRLNGALRQEQNFADRFLPDDEAAQALGKTCWEALVSPVVQNITSPDEDGISPLGWLLDQYLECQEAVFNPQSRGPAFFSRVRRLTHLLVHVEPCEAPPPVVATPRPKGRNRSHDWSSLATRGLPSSIMRNLTRCWRAVVEKQVNNFLTSSWRDDDFVPRYCEHFNILQNSSSELFGPRAAFLLALQNGCAGALLKLPFLKAAHVSEQFARHIDQQIQGSRIGGAQEMERLAQLQQCLQAVLIFSGLEIATTFEHYYQHYMADRLLGVVSSWLEGAVLEQIGPCFPNRLPQQMLQSLSTSKELQRQFHVYQLQQLDQELLKLEDTEKKIQVGLGASGKEHKSEKEEEAGAAAVVDVAEGEEEEEENEDLYYEGAMPEVSVLVLSRHSWPVASICHTLNPRTCLPSYLRGTLNRYSNFYNKSQSHPALERGSQRRLQWTWLGWAELQFGNQTLHVSTVQMWLLLYLNDLKAVSVESLLAFSGLSADMLNQAIGPLTSSRGPLDLHEQKDIPGGVLKIRDGSKEPRSRWDIVRLIPPQTYLQAEGEDGQNLEKRRNLLNCLIVRILKAHGDEGLHIDQLVCLVLEAWQKGPCPPRGLVSSLGKGSACSSTDVLSCILHLLGKGTLRRHDDRPQVLSYAVPVTVMEPHTESLNPGSSGPNPPLTFHTLQIRSRGVPYASCTATQSFSTFR

SEQ ID NO: 50850 - protein, 1662 aa, Homo sapiens
MSKDEIYANCHKMLGEDGQVIGPSQESAGEVGALDKSVLEEMETDVKSLIQRALRQLEECVGTIPPAPLLHTVHVLSAYASIEPLTGVFKDPRVLDLLMHMLSSPDYQIRWSAGRMIQALSSHDAGEGQCGEEGKAGEGLGRLRDSQDTVAGASDLIRTRTQILLSLSQQEAIEKHLDFDSRCALLALFAQATLSEHPMSFEGIQLPQVPGRVLFSLVKRYLHVTSLLDQLNDSAAEPGAQNTSAPEELSGERGQLELEFSMAMGTLISELVQAMRWDQASDRPRSSARSPGSIFQPQLADVSPGLPAAQAQPSFRRSRRFRPRSEFASGNTYALYVRDTLQPGMRVRMLDDYEEISAGDEGEFRQSNNGVPPVQVFWESTGRTYWVHWHMLEILGFEEDIEDMVEADEYQGAVASRVLGRALPAWRWRPMTELYAVPYVLPEDEDTEECEHLTLAEWWELLFFIKKLDGPDHQEVLQILQENLDGEILDDEILAELAVPIELAQDLLLTLPQRLNDSALRDLINCHVYKKYGPEALAGNQAYPSLLEAQEDVLLLDAQAQAKDSEDAAKVEAKEPPSQSPNTPLQRLVEGYGPAGKILLDLEQALSSEGTQENKVKPLLLQLQRQPQPFLALMQSLDTPETNRTLHLTVLRILKQLVDFPEALLLPWHEAVDACMACLRSPNTDREVLQELIFFLHRLTSVSRDYAVVLNQLGARDAISKALEKHLGKLELAQELRDMVFKCEKHAHLYRKLITNILGGCIQMVLGQIEDHRRTHQPINIPFFDVFLRYLCQGSSVEVKEDKCWEKVEVSSNPHRASKLTDHNPKTYWESNGSAGSHYITLHMRRGILIRQLTLLVASEDSSYMPARVVVCGGDSTSSLHTELNSVNVMPSASRVILLENLTRFWPIIQIRIKRCQQGGIDTRIRGLEILGPKPTFWPVFREQLCRHTRLFYMVRAQAWSQDMAEDRRSLLHLSSRLNGALRQEQNFADRFLPDDEAAQALGKTCWEALVSPVVQNITSPDEDGISPLGWLLDQYLECQEAVFNPQSRGPAFFSRVRRLTHLLVHVEPCEAPPPVVATPRPKGRNRSHDWSSLATRGLPSSIMRNLTRCWRAVVEKQVNNFLTSSWRDDDFVPRYCEHFNILQNSSSELFGPRAAFLLALQNGCAGALLKLPFLKAAHVSEQFARHIDQQIQGSRIGGAQEMERLAQLQQCLQAVLIFSGLEIATTFEHYYQHYMADRLLGVVSSWLEGAVLEQIGPCFPNRLPQQMLQSLSTSKELQRQFHVYQLQQLDQELLKLEDTEKKIQVGLGASGKEHKSEKEEEAGAAAVVDVAEGEEEEEENEDLYYEGAMPEVSVLVLSRHSWPVASICHTLNPRTCLPSYLRGTLNRYSNFYNKSQSHPALERGSQRRLQWTWLGWAELQFGNQTLHVSTVQMWLLLYLNDLKAVSVESLLAFSGLSADMLNQAIGPLTSSRGPLDLHEQKDIPGGVLKIRDGSKEPRSRWDIVRLIPPQTYLQAEGEDGQNLEKRRNLLNCLIVRILKAHGDEGLHIDQLVCLVLEAWQKGPCPPRGLVSSLGKGSACSSTDVLSCILHLLGKGTLRRHDDRPQVLSYAVPVTVMEPHTESLNPGSSGPNPPLTFHTLQIRSRGVPYASCTATQSFSTFR

SEQ ID NO: 50851 - protein, 1042 aa, Homo sapiens
MLQHKDARVKLVTELLSGIRVIKFCGWEQALGARVEACRARELGRLRVIKYLDAACVYLWAALPVVISIVIFITYVLMGHQLTATKVFTALALVRMLILPLNNFPWVINGLLEAKVSLDRIQLFLDLPNHNPQAYYSPDPPAEPSTVLELHGALFSWDPVGTSLETFISHLEVKKGMLVGIVGKVGCGKSSLLAAIAGELHRLRGHVAVRGLSKGFGLATQEPWIQFATIRDNILFGKTFDAQLYKEVLEACALNDDLSILPAGDQTEVGEKGVTLSGGQRARIALARAVYQEKELYLLDDPLAAVDADVANHLLHRCILGMLSYTTRLLCTHRTEYLERADAVLLMEAGRLIRAGPPSEILPLVQAVPKAWAENGQESDSATAQSVQNPEKTKEGLEEEQSTSGRLLQEESKKEGAVALHVYQAYWKAVGQGLALAILFSLLLMQATRNAADWWLSHWISQLKAENSSQEAQPSTSPASMGLFSPQLLLFSPGNLYIPVFPLPKAAPNGSSDIRFYLTVYATIAGVNSLCTLLRAVLFAAGTLQAAATLHRRLLHRVLMAPVTFFNATPTGRILNRFSSDVACADDSLPFILNILLANAAGLLGLLAVLGSGLPWLLLLLPPLSIMYYHVQRHYRASSRELRRLGSLTLSPLYSHLADTLAGLSVLRATGATYRFEEENLRLLELNQRCQFATSATMQWLDIRLQLMGAAVVSAIAGIALVQHQQGLANPGLVGLSLSYALSLTGLLSGLVSSFTQTEAMLVSVERLEEYTCDLPQEPQGQPLQLGTGWLTQGGVEFQDVVLAYRPGLPNALDGVTFCVQPGEKLGIVGRTGSGKSSLLLVLFRLLEPSSGRVLLDGVDTSQLELAQLRSQLAIIPQEPFLFSGTVRENLDPQGLHKDRALWQALKQCHLSEVITSMGGLDGELGEGGRSLSLGQRQLLCLARALLTDAKILCIDEATASVDQKTDQLLQQTICKRFANKTVLTIAHRLNTILNSDRVLVLQAGRVVELDSPATLRNQPHSLFQQLLQSSQQGVPASLGGP

SEQ ID NO: 50852 - protein, 779 aa, Homo sapiens [sequence omitted]

SEQ ID NO: 50853 - protein, 192 aa, Homo sapiens
MDCDVSTLVACVVDVEVFTNQEVKEKFEGLFRTYDDCVTFQLFKSFRRVRINFSNPKSAARARIELHETQFRGKKLKLYFAQVQTPETDGDKLHLAPPQPAKQFLISPPSSPPVGWQPINDATPVLNYDLLYAVAKLGPGEKYELHAGTESTPSVVVHVCDSDIEEEEDPKTSPKPKIIQTRRPGLPPSVSN

SEQ ID NO: 50854 - protein, 333 aa, Homo sapiens [sequence omitted]

SEQ ID NO: 50855 - protein, 247 aa, Homo sapiens [sequence omitted]

SEQ ID NO: 50856 - protein, 37 aa, Homo sapiens
MSKHIPQFCGVLGHTFMEFLKGSGDYCQAQHDLYADK

SEQ ID NO: 50857 - protein, 124 aa, Homo sapiens
MSSPLASSHNSQTSMHKKAKDSKNSSSAVHLNSKTAEDKKVAPKEPVEETDRPSPEPSNEAAKPRNTEKDSNAENMNSQPEKTVTTPTEKKESVSPENNEEGGNDNQDNENPGNTNCHDVVLVQ

SEQ ID NO: 50858 - protein, 931 aa, Homo sapiens
MPKDSGALLGLKVVGGKMTDLGRLGAFITKVKKGSLADVVGHLRAGDEVLEWNGKPLPGATNEEVYNIILESKSEPQVEIIVSRPIGDIPRIPESSHPPLESSSSSFESQKMERPSISVISPTSPGALKDAPQVLPGQLSVKLWYDKVGHQLIVNVLQATDLPARVDGRPRNPYVKMYFLPDRSDKSKRRTKTVKKILEPKWNQTFVYSHVHRRDFRERMLEITVWDQPRVQEEESEFLGEILIELETALLDDEPHWYKLQTHDESSLPLPQPSPFMPRRHIHGESSSKKLQRSQRISDSDISDYEVDDGIGVVPPGYRSSARESKSTTLTVPEQQRTTHHRSRSVSPHRGNDQGKPRSRLPNVPLQRSLDEIHPTRRSRSPTRHHDASRSPVDHRTRDVDSQYLSEQDSELLMLPRAKRGRSAECLHTTSELQPFLDRARSASTNCLRPDTSLHSPERERHSRKSERSSIQKQTRKGTASDAERMHRQRSPTQSPPADTSFSSRRGRQLPQVPVRSGSIEQASLVVEERTRQMKMKVHRFKQTTGSGSSQELDREQYSKYNIHKDQYRSCDNVSAKSSDSDVSDVSAISRTSSASRLSSTSFMSEQSERPRGRISSFTPKMQGRRMGTSGRSIMKSTSVSGEMYTLEHNDGSQSDTAVGTVGAGGKKRRSSLSAKVVAIVSRRSRSTSQLSQTESGHKKLKSTIQRSTETGMAAEMRKMVRQPSRESTDGSINSYSSEGNLIFPGVRLGADSQFSDFLDGLGPAQLVGRQTLATPAMGDIQIGMEDKKGQLEVEVIRARSLTQKPGSKSTPAPYVKVYLLENGACIAKKKTRIARKTLDPLYQQSLVFDESPQGKVLQVIVWGDYGRMDHKCFMGVAQILLEELDLSSMVIGWYKLFPPSSLVDPTLTPLTRRASQSSLESSTGPPCIRS

SEQ ID NO: 50859 - protein, 456 aa, Homo sapiens
MHRQRSPTQSPPADTSFSSRRGRQLPQVPVRSGSIEQEQEKYNSSTKASLVVEERTRQMKMKVHRFKQTTGSGSSQELDREQYSKYNIHKDQYRSCDNVSAKSSDSDVSDVSAISRTSSASRLSSTSFMSEQSERPRGRISSFTPKMQGRRMGTSGRSIMKSTSVSGEMYTLEHNDGSQSDTAVGTVGAGGKKRRSSLSAKVVAIVSRRSRSTSQLSQTESGHKKLKSTIQRSTETGMAAEMRKMVRQPSRESTDGSINSYSSEGNLIFPGVRLGADSQFSDFLDGLGPAQLVGRQTLATPAMGDIQIGMEDKKGQLEVEVIRARSLTQKPGSKSTPAPYVKVYLLENGACIAKKKTRIARKTLDPLYQQSLVFDESPQGKVLQVIVWGDYGRMDHKCFMGVAQILLEELDLSSMVIGWYKLFPPSSLVDPTLTPLTRRASQSSLESSTGPPCIRS

SEQ ID NO: 50860 - protein, 25 aa, Homo sapiens
MILTVGGTAYAIYELAVASFPKKQE

SEQ ID NO: 50861 - protein, 137 aa, Homo sapiens
MEAEVCITFTEFGKMQNICNFLVEKLDSSVVISPPQFYHTPGSVENLRRQACLVAVENAWRKAQEVCNLVGQTLGKPLLIKEEETKEWEGQIDDHQSSRLSSSLTVQQKIKSATIHAASKVFITFEVKGKEKRKKHL

SEQ ID NO: 50862 - protein, 840 aa, Homo sapiens
MNKVRDIKNKFKNEDLTDELSLNKISADTTDNSGTVNQIMMMANNPEDWLSLLLKLEKNSVPLSDALLNKLIGRYSQAIEALPPDKYGQNESFARIQVRFAELKAIQEPDDARDYFQMARANCKKFAFVHISFAQFELSQGNVKKSKQLLQKAVERGAVPLEMLEIALRNLNLQKKQLLSEEEKKNLSASTVLTAQESFSGSLGHLQNRNNSCDSRGQTTKARFLYGENMPPQDAEIGYRNSLRQTNKTKQSCPFGRVPVNLLNSPDCDVKTDDSVVPCFMKRQTSRSECRDLVVPGSKPSGNDSCELRNLKSVQNSHFKEPLVSDEKSSELIITDSITLKNKTESSLLAKLEETKEYQEPEVPESNQKQWQSKRKSECINQNPAASSNHWQIPELARKVNTEKHTTFEQPVFSVSKQSPPISTSKWFDPKSICKTPSSNTLDDYMSCFRTPVVKNDFPPACQLSTPYGQPACFQQQQHQILATPLQNLQVLASSSANECISVKGRIYSILKQIGSGGSSKVFQVLNEKKQIYAIKYVNLEEADNQTLDSYRNEIAYLNKLQQHSDKIIRLYDYEITDQYIYMVMECGNIDLNSWLKKKKSIDPWERKSYWKNMLEAVHTIHQHGIVHSDLKPANFLIVDGMLKLIDFGIANQMQPDTTSVVKDSQVGTVNYMPPEAIKDMSSSRENGKSKSKISPKSDVWSLGCILYYMTYGKTPFQQIINQISKLHAIIDPNHEIEFPDIPEKDLQDVLKCCLKRDPKQRISIPELLAHPYVQIQTHPVNQMAKGTTEEMKYVLGQLVGLNSPNSILKAAKTLYEHYSGGESHNSSSSKTFEKKRGKK

SEQ ID NO: 50863 - protein, 119 aa, Homo sapiens
MNSFVSDFGRPLEPDKVFSRQGNEESRSLFHCYINEVERLDRAKACHQTTALDSDVQLQEAIRSSGQPEEELNRLMKFDIPNFVNTDQNYFGEDDLLISEPPIVLETKPLSQTSHKDLD

SEQ ID NO: 50864 - protein, 449 aa, Homo sapiens
MIITKAGRRMFPAMRVKISGLDPHQQYYIAMDIVPVDNKRYRYVYHSSKWMVAGNADSPVPPRVYIHPDSPASGETWMRQVISFDKLKLTNNELDDQGHIILHSMHKYQPRVHVIRKDCGDDLSPIKPVPSGEGVKAFSFPETVFTTVTAYQNQQITRLKIDRNPFAKGFRDSGRNRMGLEALVESYAFWRPSLRTLTFEDIPGIPKQGNASSSTLLQGTGNGVPATHPHLLSGSSCSSPAFHLGPNTSQLCSLAPADYSACARSGLTLNRYSTSLAETYNRLTNQAGETFAPPRTPSYVGVSSSTSVNMSMGGTDGDTFSCPQTSLSMQISGMSPQLQYIMPSPSSNAFATNQTHQGSYNTFRLHSPCALYGYNFSTSPKLAASPEKIVSSQGSFLGSSPSGTMTDRQMLPPVEGVHLLSSGGQQSFFDSRTLGSLTLSSSQVSAHMV

SEQ ID NO: 50865 - protein, 503 aa, Homo sapiens
MEYAEGGSLYNVLHGAEPLPYYTAAHAMSWCLQCSQGVAYLHSMQPKALIHRDLKPPNLLLVAGGTVLKICDFGTACDIQTHMTNNKGSAAWMAPEVFEGSNYSEKCDVFSWGIILWEVITRRKPFDEIGGPAFRIMWAVHNGTRPPLIKNLPKPIESLMTRCWSKDPSQRPSMEEIVKIMTHLMRYFPGADEPLQYPCQYSDEGQSNSATSTGSFMDIASTNTSNKSDTNMEQVPATNDTIKRLESKLLKNQAKQQSESGRLSLGASRGSSVESLPPTSEGKRMSADMSEIEARIAATTAYSKPKRGHRKTASFGNILDVPEIVISGNGQPRRRSIQDLTVTGTEPGQVSSRSSSPSVRMITTSGPTSEKPTRSHPWTPDDSTDTNGSDNSIPMAYLTLDHQLQPLAPCPNSKESMAVFEQHCKMAQEYMKVQTEIALLLQRKQELVAELDQDEKDQQNTSRLVQEHKKLLDENKSLSTYYQQCKKQLEVIRSQQQKRQGTS

SEQ ID NO: 50866 - protein, 476 aa, Homo sapiens
MEYAEGGSLYNVLHGAEPLPYYTAAHAMSWCLQCSQGVAYLHSMQPKALIHRDLKPPNLLLVAGGTVLKICDFGTACDIQTHMTNNKGSAAWMAPEVFEGSNYSEKCDVFSWGIILWEVITRRKPFDEIGGPAFRIMWAVHNGTRPPLIKNLPKPIESLMTRCWSKDPSQRPSMEEIVKIMTHLMRYFPGADEPLQYPCQYSDEGQSNSATSTGSFMDIASTNTSNKSDTNMEQVPATNDTIKRLESKLLKNQAKQQSESGRLSLGASRGSSVESLPPTSEGKRMSADMSEIEARIAATTGNGQPRRRSIQDLTVTGTEPGQVSSRSSSPSVRMITTSGPTSEKPTRSHPWTPDDSTDTNGSDNSIPMAYLTLDHQLQPLAPCPNSKESMAVFEQHCKMAQEYMKVQTEIALLLQRKQELVAELDQDEKDQQNTSRLVQEHKKLLDENKSLSTYYQQCKKQLEVIRSQQQKRQGTS

SEQ ID NO: 50867 - protein, 415 aa, Homo sapiens
MEYAEGGSLYNVLHGAEPLPYYTAAHAMSWCLQCSQGVAYLHSMQPKALIHRDLKPPNLLLVAGGTVLKICDFGTACDIQTHMTNNKGSAAWMAPEVFEGSNYSEKCDVFSWGIILWEVITRRKPFDEIGGPAFRIMWAVHNGTRPPLIKNLPKPIESLMTRCWSKDPSQRPSMEEIVKIMTHLMRYFPGADEPLQYPCQYSDEGQSNSATSTGSFMDIASTNTSNKSDTNMEQVPATNDTIKRLESKLLKNQAKQQSESGRLSLGASRGSSVESLPPTSEGKRMSADMSEIEARIAATTAYSKPKRGHRKTASFGNILDVPEIVISGNGQPRRRSIQDLTVTGTEPGQVSSRSSSPSVRMITTSGPTSEKPTRSHPWTPDDSTDTNGSDNSIPMAYLTLDHQLQARTSCRTGPG

SEQ ID NO: 50868 - protein, 388 aa, Homo sapiens
MEYAEGGSLYNVLHGAEPLPYYTAAHAMSWCLQCSQGVAYLHSMQPKALIHRDLKPPNLLLVAGGTVLKICDFGTACDIQTHMTNNKGSAAWMAPEVFEGSNYSEKCDVFSWGIILWEVITRRKPFDEIGGPAFRIMWAVHNGTRPPLIKNLPKPIESLMTRCWSKDPSQRPSMEEIVKIMTHLMRYFPGADEPLQYPCQYSDEGQSNSATSTGSFMDIASTNTSNKSDTNMEQVPATNDTIKRLESKLLKNQAKQQSESGRLSLGASRGSSVESLPPTSEGKRMSADMSEIEARIAATTGNGQPRRRSIQDLTVTGTEPGQVSSRSSSPSVRMITTSGPTSEKPTRSHPWTPDDSTDTNGSDNSIPMAYLTLDHQLQARTSCRTGPG

SEQ ID NO: 50869 - protein, 93 aa, Homo sapiens
MSAFVPEVSMQSSGYLDECQLLHFPCVSCDHSIWEHPSKSSCILLRTPDLLKLHNSHLDVTGLSHVNSSDHVLLYMPSAPSQDSYKRRNDEHP

SEQ ID NO: 50870 - protein, 333 aa, Homo sapiens
MMPIIHYPNEVIVKVHAASVNPIDVNMRSGYGATALNMKRDPLHVKIKGEEFPLTLGRDVSGVVMECGLDVKYFKPGDEVWAAVPPWKQGTLSEFVVVSGNEVSHKPKSLTHTQAASLPYVALTAWSAINKVGGLNDKNCTGKRVLILGASGGVGTFAIQVMKAWDAHVTAVCSQDASELVRKLGADDVIDYKSGSVEEQLKSLKPFDFILDNVGGSTETWAPDFLKKWSGATYVTLVTPFLLNMDRLGIADGMLQTGVTVGSKALKHFWKGVHYRWAFFMASGPCLDDIAELVDAGKIRPVIEQTFPFSKVPEAFLKVERGHARGKTVINVV

SEQ ID NO: 50871 - protein, 618 aa, Homo sapiens
MRIAKAYAALTDEESRKNWEEFGNPDGPQATSFGIALPAWIVDQKNSILVLLVYGLAFMVILPVVVGSWWYRSIRYSGDQILIRTTQIYTYFVYKTRNMDMKRLIMVLAGASEFDPQYNKDATSRPTDNILIPQLIREIGSINLKKNEPPLTCPYSLKARVLLLSHLARMKIPETLEEDQQFMLKKCPALLQEMVNVICQLIVMARNREEREFRAPTLASLENCMKLSQMAVQGLQQFKSPLLQLPHIEEDNLRRVSNHKKYKIKTIQDLVSLKESDRHTLLHFLEDEKYEEVMAVLGSFPYVTMDIKSQVLDDEDSNNITVGSLVTVLVKLTRQTMAEVFEKEQSICAAEEQPAEDGQGETNKNRTKGGWQQKSKGPKKTAKSKKKKPLKKKPTPVLLPQSKQQKQKQANGVVGNEAAVKEDEEEVSDKGSDSEEEETNRDSQSEKDDGSDRDSDREQDEKQNKDDEAEWQELQQSIQRKERALLETKSKITHPVYSLYFPEEKQEWWWLYIADRKEQTLISMPYHVCTLKDTEEVELKFPAPGKPGNYQYTVFLRSDSYMGLDQIKPLKLEVHEAKPVPENHPQWDTAIEGDEDQEDSEGFEDSFEEEEEEEEDDD

SEQ ID NO: 50872 - protein, 338 aa, Homo sapiens
MVMDMFYAYVEMKRKKRVHFHGFMLDVHKRIHRLKQSLPKRKPGFMAKSYDPIAPIAEEISEEACLLCFDEFQVTDIADAMILKQLFENLFKNGVVVVATSNRPPEDLYKNGLQRANFVPFIAVLKEYCNTVQLDSGIDYRKRELPAAGKLYYLTSEADVEAVMDKLFDELAQKQNDLTRPRILKVQGRELRLNKACGTVADCTFEELCERPLGASDYLELSKNFDTIFLRNIPQFTLANRTQGRRFITLIDNFYDLKVRIICSASTPISSLFLHQHHDSELEQSRILMDDLGLSQDSAEGLSMFTGEEEIFAFQRTISRLTEMQTEQYWNEGDRTKK

SEQ ID NO: 50873 - protein, 481 aa, Homo sapiens
MLSKRCPFKDVREKSEFILKSIQELGIRIPRPLGQGPSRFIPEKEILQVGSEDAQMHALFADSFAALGRLDNITLVMVFHPQYLESFLKTQHYLLQMDGPLPLHYRHYIGIMAAARHQCSYLVNLHVNDFLHVGGDPKWLNGLENAPQKLQNLGELNKVLAHRPWLITKEHIEGLLKAEEHSWSLAELVHAVVLLTHYHSLASFTFGCGISPEIHCDGGHTFRPPSVSNYCICDITNGNHSVDEMPVNSAENVSVSDSFFEVEALMEKMRQLQECRDEEEASQEEMASRFEIEKRESMFVFSSDDEEVTPARAVSRHFEDTSYGYKDFSRHGMHVPTFRVQDYCWEDHGYSLVNRLYPDVGQLIDEKFHIAYNLTYNTMAMHKDVDTSMLRRAIWNYIHCMFGIRYDDYDYGEINQLLDRSFKVYIKTVVCTPEKVTKRMYDSFWRQFKHSEKVHVNLLLIEARMQAELLYALRAITRYMT

SEQ ID NO: 50874 - protein, 376 aa, Homo sapiens [sequence omitted]

SEQ ID NO: 50875 - protein, 109 aa, Homo sapiens
MTRTLLTEKKEGEENIGGVEWLQIKDNDFSYRPNMICNFLHENEDEEVVASAPDKSLELEEEEIQMNDSSNLSCEQEKPMHLEIEDSGPLIDIPSETEGSVFMETQMLP

SEQ ID NO: 50876 - protein, 287 aa, Homo sapiens [sequence omitted]

SEQ ID NO: 50877 - protein, 152 aa, Homo sapiens
MAVMAMVIKDDRLNKDRCVRLALVHDMAECIVGDIAPADNIPKEEKHRREEEAMKQITQLLPEDLRKELYELWEEYETQSSAEAKFVKQLDQCEMILQASEYEDLEHKPGRLQDFYDSTAGKFNHPEIVQLVSELEAERSTNIAAAASEPHS

SEQ ID NO: 50878 - protein, 56 aa, Homo sapiens
MAVMAMVIKDDRLNKDRCVRLALVHDMAECIVGDIAPADNIPKEEKHRREEVSVDY

SEQ ID NO: 50879 - protein, 838 aa, Homo sapiens
MVVQKPHGTMEYTAGNQDTLNSIALKFNITPNKLVELNKLFTHTIVPGQVLFVPDANSPSSTLRLSSSSPGATVSPSSSDAEYDKLPDADLARKALKPIERVLSSTSEEDEPGVVKFLKMNCRYFTDGKGVVGGVMIVTPNNIMFDPHKSDPLVIENGCEEYGLICPMEEVVSIALYNDISHMKIKDALPSDLPQDLCPLYRPGEWEDLASEKDINPFSKFKSINKEKRQQNGEKIMTSDSRPIVPLEKSTGHTPTKPSGSSVSEKLKKLDSSRETSHGSPTVTKLSKEPSDTSSAFESTAKENFLGEDDDFVDLEELSSQTGGGMHKKDTLKECLSLDPEERKKAESQINNSAVEMQVQSALAFLGTENDVELKGALDLETCEKQDIMPEVDKQSGSPESRVENTLNIHEDLDKVKLIEYYLTKNKEGPQVSENLQKTELSDGKSIEPGGIDITLSSSLSQAGDPITEGNKEPDKTWVKKGEPLPVKLNSSTEANVIKEALDSSLESTLDNSCQGAQMDNKSEVQLWLLKRIQVPIEDILPSKEEKSKTPPMFLCIKVGKPMRKSFATHTAAMVQQYGKRRKQPEYWFAVPRERVDHLYTFFVQWSPDVYGKDAKEQGFVVVEKEELNMIDNFFSEPTTKSWEIITVEEAKRRKSTCSYYEDEDEEVLPVLRPHSALLENMHIEQLARRLPARVQGYPWRLAYSTLEHGTSLKTLYRKSASLDSPVLLVIKDMDNQIFGAYATHPFKFSDHYYGTGETFLYTFSPHFKVFKWSGENSYFINGDISSLELGGGGGRFGLWLDADLYHGRSNSCSTFNNDILSKKEDFIVQDLEVWAFD

SEQ ID NO: 50880 - protein, 69 aa, Homo sapiens
MAQEHLEFRLPEIKSLLLLFGGQFASSQETYGKSPFWILSIPSEDIARNLMKRTVCAKFHFYIRTLHIK

SEQ ID NO: 50881 - protein, 1387 aa, Homo sapiens
MPQGSYMIVDSSDHDPGEKARLQLPTMKENDTHCIDFSYLLYSQKGLNPGTLNILVRVNKGPLANPIWNVTGFTGRDWLRAELAVSTFWPNEYQVIFEAEVSGGRSGYIAIDDIQVLSYPCDKSPHFLRLGDVEVNAGQNATFQCIATGRDAVHNKLWLQRRNGEDIPVAQTKNINHRRFAASFRLQEVTKTDQDLYRCVTQSERGSGVSNFAQLIVREPPRPIAPPQLLGVGPTYLLIQLNANSIIGDGPIILKEVEYRMTSGSWTETHAVNAPTYKLWHLDPDTEYEIRVLLTRPGEGGTGLPGPPLITRTKCAEPMRTPKTLKIAEIQARRIAVDWESLGYNITRCHTFNVTICYHYFRGHNESKADCLDMDPKAPQHVVNHLPPYTNVSLKMILTNPEGRKESEETIIQTDEDVPGPVPVKSLQGTSFENKIFLNWKEPLDPNGIITQYEISYSSIRSFDPAVPVAGPPQTVSNLWNSTHHVFMHLHPGTTYQFFIRASTVKGFGPATAINVTTNISAPTLPDYEGVDASLNETATTITVLLRPAQAKGAPISAYQIVVEELHPHRTKREAGAMECYQVPVTYQNAMSGGAPYYFAAELPPGNLPEPAPFTVGDNRTYQGFWNPPLAPRKGYNIYFQAMSSVEKETKTQCVRIATKAAATEEPEVIPDPAKQTDRVVKIAGISAGILVFILLLLVVILIVKKSKLAKKRKDAMGNTRQEMTHMVNAMDRSYADQSTLHAEDPLSITFMDQHNFSPRLPNDPLVPTAVLDENHSATAESSRLLDVPRYLCEGTESPYQTGQLHPAIRVADLLQHINLMKTSDSYGFKEEYESFFEGQSASWDVAKKDQNRAKNRYGNIIAYDHSRVILQPVEDDPSSDYINANYIDIWLYRDGYQRPSHYIATQGPVHETVYDFWRMIWQEQSACIVMVTNLVEVGRVKCYKYWPDDTEVYGDFKVTCVEMEPLAEYVVRTFTLERRGYNEIREVKQFHFTGWPDHGVPYHATGLLSFIRRVKLSNPPSAGPIVVHCSAGAGRTGCYIVIDIMLDMAEREGVVDIYNCVKALRSRRINMVQTEEQYIFIHDAILEACLCGETAIPVCEFKAAYFDMIRIDSQTNSSHLKDEFQTLNSVTPRLQAEDCSIACLPRNHDKNRFMDMLPPDRCLPFLITIDGESSNYINAALMDSYRQPAAFIVTQYPLPNTVKDFWRLVYDYGCTSIVMLNEVDLSQGCPQYWPEEGMLRYGPIQVECMSCSMDCDVINRIFRICNLTRPQEGYLMVQQFQYLGWASHREVPGSKRSFLKLILQVEKWQEECEEGEGRTIIHCLNGGGRSGMFCAIGIVVEMVKRQNVVDVFHAVKTLRNSKPNMVEAPEQYRFCYDVALEYLESS

SEQ ID NO: 50882 - protein, 716 aa, Homo sapiens
MVPTAQEAPTSPPSSRPVFPPAYWTSPPGCPTVFSEKTGMPFRLKDPVKVEGLQFCENCCQYGNVDECLSGGNYCSQNCARHIKDKDQKEERDVEEDNEEEDPKCSRKKKPKLSLKADTKEDGEERDDEMENKQDVRILRGSQRARRKRRGDSAVLKQGLPPKGKKAWCWASYLEEEKAVAVPAKLFKEHQSFPYNKNGFKVGMKLEGVDPEHQSVYCVLTVAEVCGYRIKLHFDGYSDCYDFWVNADALDIHPVGWCEKTGHKLHPPKGYKEEEFNWQTYLKTCKAQAAPKSLFENQNITVIPSGFRVGMKLEAVDKKNPSFICVATVTDMVDNRFLVHFDNWDESYDYWCEASSPHIHPVGWCKEHRRTLITPPGYPNVKHFSWDKYLEETNSLPAPARAFKVKPPHGFQKKMKLEVVDKRNPMFIRVATVADTDDHRVKVHFDGWNNCYDYWIDADSPDIHPVGWCSKTGHPLQPPLSPLELMEASEHGGCSTPGCKGIGHFKRARHLGPHSAANCPYSEINLNKDRIFPDRLSGEMPPASPSFPRNKRTDANESSSSPEIRDQHADDVKEDFEERTESEMRTSHEARGAREEPTVQQAQRRSAVFLSFKSPIPCLPLRWEQQSKLLPTVAGIPASKVSKWSTDEVSEFIQSLPGCEEHGKVFKDEQIDGEAFLLMTQTDIVKIMSIKLGPALKIFNSILMFKAAEKNSHNEL

SEQ ID NO: 50883 - protein, 691 aa, Homo sapiens
MVPTAQEVFSEKTGMPFRLKDPVKVEGLQFCENCCQYGNVDECLSGGNYCSQNCARHIKDKDQKEERDVEEDNEEEDPKCSRKKKPKLSLKADTKEDGEERDDEMENKQDVRILRGSQRARRKRRGDSAVLKQGLPPKGKKAWCWASYLEEEKAVAVPAKLFKEHQSFPYNKNGFKVGMKLEGVDPEHQSVYCVLTVAEVCGYRIKLHFDGYSDCYDFWVNADALDIHPVGWCEKTGHKLHPPKGYKEEEFNWQTYLKTCKAQAAPKSLFENQNITVIPSGFRVGMKLEAVDKKNPSFICVATVTDMVDNRFLVHFDNWDESYDYWCEASSPHIHPVGWCKEHRRTLITPPGYPNVKHFSWDKYLEETNSLPAPARAFKVKPPHGFQKKMKLEVVDKRNPMFIRVATVADTDDHRVKVHFDGWNNCYDYWIDADSPDIHPVGWCSKTGHPLQPPLSPLELMEASEHGGCSTPGCKGIGHFKRARHLGPHSAANCPYSEINLNKDRIFPDRLSGEMPPASPSFPRNKRTDANESSSSPEIRDQHADDVKEDFEERTESEMRTSHEARGAREEPTVQQAQRRSAVFLSFKSPIPCLPLRWEQQSKLLPTVAGIPASKVSKWSTDEVSEFIQSLPGCEEHGKVFKDEQIDGEAFLLMTQTDIVKIMSIKLGPALKIFNSILMFKAAEKNSHNEL

SEQ ID NO: 50884 - protein, 1141 aa, Homo sapiens [sequence omitted]

SEQ ID NO: 50885 - protein, 998 aa, Homo sapiens
MKETTSDDPDTIRSNLPHIKETTSDDVSAANTNNLKKSTRVTKNKLRNTQLATENPNGDASVEEDKQGKPNKKVIKTVPQLTTQDLKPETPENKVDSTHQKTHTKPQPGVDHQKSEKANEGREETDLEEDEELMQAYQCHVTEEMAKEIKRKIRKKLKEQLTYFPSDTLFHDDKLSSEKRKKKKEVPVFSKAETSTLTISGDTVEGEQKKESSVRSVSSDSHQDDEISSMEQSTEDSMQDDTKPKPKKTKKKTKAVADNNEDVDGDGVHEITSRDSPVYPKCLLDDDLVLGVYIHRTDRLKSDFMISHPMVKIHVVDEHTGQYVKKDDSGRPVSSYYEKENVDYILPIMTQPYDFKQLKSRLPEWEEQIVFNENFPYLLRGSDESPKVILFFEILDFLSVDEIKNNSEVQNQECGFRKIAWAFLKLLGANGNANINSKLRLQLYYPPTKPRSPLSVVEAFEWWSKCPRNHYPSTLYVTVRGLKVPDCIKPSYRSMMALQEEKGKPVHCERHHESSSVDTEPGLEESKEVIKWKRLPGQACRIPNKHLFSLNAGERGCFCLDFSHNGRILAAACASRDGYPIILYEIPSGRFMRELCGHLNIIYDLSWSKDDHYILTSSSDGTARIWKNEINNTNTFRVLPHPSFVYTAKFHPAVRELVVTGCYDSMIRIWKVEMREDSAILVRQFDVHKSFINSLCFDTEGHHMYSGDCTGVIVVWNTYVKINDLEHSVHHWTINKEIKETEFKGIPISYLEIHPNGKRLLIHTKDSTLRIMDLRILVARKFVGAANYREKIHSTLTPCGTFLFAGSEDGIVYVWNPETGEQVAMYSDLPFKSPIRDISYHPFENMVAFCAFGQNEPILLYIYDFHVAQQEAEMFKRYNGTFPLPGIHQSQDALCTCPKLPHQGSFQIDEFVHTESSSTKMQLVKQRLETVTEVIRSCAAKVNKNLSFTSPPAVSSQQSKLKQSNMLTAQEILHQFGFTQTDSHFAEFNTCILWWKKH

SEQ ID NO: 50886 - protein, 32 aa, Homo sapiens
MSEKRILIESMLCILSPLHKAERCLQLRVKQK

SEQ ID NO: 50887 - protein, 1403 aa, Homo sapiens
MRQQAQTVQADVVPINITASGTGQDDADGHSVYTPDHYSTLGRFNSCRSAGQRSETRDSSCQTEDVKVVPPSMRRIRAQKGQGIAAQMGHFSGSSGNMSVLSDSAGIVFPSRLDSDAGFHSLPRSGARANIQSLEPRLGALGPAGDMNGTFLYQRGHPQADENLGHLGGASGTGTLLRPKSQELRHFESENIMSPACVVSPHATYSTSIIPNATLSSSSEVIAIPTAQSAGQRESKSSGSSHARIKSRDHLISRHAVKGDPQSPGRHWNEGHATILSQDLDPHSPGEPALLSLCDSAVPLNAPANRENGSQAMPYNCRNNLAFPAHPQDVDGKSESSYSGGGGHSSSEPWEYKSSGNGRASPLKPHLATPGYSTPTSNMSSCSLDQTSNKEDAGSLYSEDHDGYCASVHTDSGHGSGNLCNSSDGFGNPRHSVINVFVGRAQKNQGDRSNYQDKSLSRNISLKKAKKPPLPPSRTDSLRRIPKKSSQCNGQVLNESLIATLQHSLQLSLPGKSGSSPSQSPCSDLEEPWLPRSRSQSTVSAGSSMTSATTPNVYSLCGATPSQSDTSSVKSEYTDPWGYYIDYTGMQEDPGNPAGGCSTSSGVPTGNGPVRHVQEGSRATMPQVPGGSVKPKIMSPEKSHRVISPSSGYSSQSNTPTALTPVPVFLKSVSPANGKGKPKPKVPERKSSLISSVSISSSSTSLSSSTSTEGSGTMKKLDPAVGSPPAPPPPPVPSPPFPCPADRSPFLPPPPPVTDCSQGSPLPHSPVFPPPPPEALIPFCSPPDWCLSPPRPALSPILPDSPVSLPLPPPLLPSSEPPPAPPLDPKFMKDTRPPFTNSGQPESSRGSLRPPSTKEETSRPPMPLITTEALQMVQLRPVRKNSGAEAAQLSERTAQEQRTPVAPQYHLKPSAFLKSRNSTNEMESESQPASVTSSLPTPAKSSSQGDHGSAAERGGPVSRSPGAPSAGEAEARPSPSTTPLPDSSPSRKPPPISKKPKLFLVVPPPQKDFAVEPAENVSEALRAVPSPTTGEEGSVHSREAKESSAAQAGSHATHPGTSVLEGGAAGSMSPSRVEANVPMVQPDVSPAPKQEEPAENSADTGGDGESCLSQQDGAAGVPETNAAGSSSEACDFLKEDGNDEVMTPSRPRTTEDLFAAIHRSKRKVLGRRDSDDDHSRNHSPSPPVTPTGAAPSLASPKQVGSIQRSIRKSSTSSDNFKALLLKKGSRSDTSARMSAAEMLKNTDPRFQRSRSEPSPDAPESPSSCSPSKNRRAQEEWAKNEGLMPRSLSFSGPRYGRSRTPPSAASSRYSMRNRIQSSPMTVISEGEGEAVEPVDSIARGALGAAEGCSLDGLAREEMDEGGLLCGEGPAASLQPQAPGPVDGTASAEGREPSPQCGGSLSEES

SEQ ID NO: 50888 - protein, 302 aa, Homo sapiens [sequence omitted]

SEQ ID NO: 50889 - protein, 177 aa, Homo sapiens [sequence omitted]

SEQ ID NO: 50890 - protein, 1457 aa, Homo sapiens
MPQERGNYSRPPAYSGVPSASYSGPGPGMGISANNQMHGQGPSQPCGAVPLGRMPSAGMQNRPFPGNMSSMTPSSPGMSQQGGPGMGPPMPTVNRKAQEAAAAVMQAAANSAQSRQGSFPGMNQSGLMASSSPYSQPMNNSSSLMNTQAPPYSMAPAMVNSSAASVGLADMMSPGESKLPLPLKADGKEEGTPQPESKSKDSYSSQGISQPPTPGNLPVPSPMSPSSASISSFHGDESDSISSPGWPKTPSSPKSSSSTTTGEKITKVYELGNEPERKLWVDRYLTFMEERGSPVSSLPAVGKKPLDLFRLYVCVKEIGGLAQVNKNKKWRELATNLNVGTSSSAASSLKKQYIQYLFAFECKIERGEEPPPEVFSTGDTKKQPKLQPPSPANSGSLQGPQTPQSTGSNSMAEVPGDLKPPTPASTPHGQMTPMQGGRSSTISVHDPFSDVSDSSFPKRNSMTPNAPYQQGMSMPDVMGRMPYEPNKDPFGGMRKVPGSSEPFMTQGQMPNSSMQDMYNQSPSGAMSNLGMGQRQQFPYGASYDRRHEPYGQQYPGQGPPSGQPPYGGHQPGLYPQQPNYKRHMDGMYGPPAKRHEGDMYNMQYSSQQQEMYNQYGGSYSGPDRRPIQGQYPYPYSRERMQGPGQIQTHGIPPQMMGGPLQSSSSEGPQQNMWAARNDMPYPYQNRQGPGGPTQAPPYPGMNRTDDMMVPDQRINHESQWPSHVSQRQPYMSSSASMQPITRPPQPSYQTPPSLPNHISRAPSPASFQRSLENRMSPSKSPFLPSMKMQKVMPTVPTSQVTGPPPQPPPIRREITFPPGSVEASQPVLKQRRKITSKDIVTPEAWRVMMSLKSGLLAESTWALDTINILLYDDSTVATFNLSQLSGFLELLVEYFRKCLIDIFGILMEYEVGDPSQKALDHNAARKDDSQSLADDSGKEEEDAECIDDDEEDEEDEEEDSEKTESDEKSSIALTAPDAAADPKEKPKQASKFDKLPIKIVKKNNLFVVDRSDKLGRVQEFNSGLLHWQLGGGDTTEHIQTHFESKMEIPPRRRPPPPLSSAGRKKEQEGKGDSEEQQEKSIIATIDDVLSARPGALPEDANPGPQTESSKFPFGIQQAKSHRNIKLLEDEPRSRDETPLCTIAHWQDSLAKRCICVSNIVRSLSFVPGNDAEMSKHPGLVLILGKLILLHHEHPERKRAPQTYEKEEDEDKGVACSKDEWWWDCLEVLRDNTLVTLANISGQLDLSAYTESICLPILDGLLHWMVCPSAEAQDPFPTVGPNSVLSPQRLVLETLCKLSIQDNNVDLILATPPFSRQEKFYATLVRYVGDRKNPVCREMSMALLSNLAQGDALAARAIAVQKGSIGNLISFLEDGVTMAQYQQSQHNLMHMQPPPLEPPSVDMMCRAAKALLAMARVDENRSEFLLHEGRLLDISISAVLNSLVASVICDVLFQIGQL

SEQ ID NO: 50891 - protein, 138 aa, Homo sapiens
MGVNNEKYDNSLKIISNASCTTNCLAPRAKVLHDNFGIVKGLMTTVHAITATQKTVDGPSRKLWHDGGGTLQNIIPASTGTAKAVGKVIPELNGKLTGMAFCVPTANVSVVDLIYHLEKPTKYHGIKKVVKEASEGSL

SEQ ID NO: 50892 - protein, 335 aa, Homo sapiens
MKFLREHFEKLEKEENRQILARQKSNSQSDSHDEEVSPTPPNPVVKARRRRGGVSAEVYTEEDAVSYVRKVIPKDYKTMTALAKAISKNVLFAHLDDNERSDIFDAMFPVTHIAGETVIQQGNEGDNFYVVDQGEVDVYVNGEWVTNISEGGSFGELALIYGTPRAATVKAKTDLKLWGIDRDSYRRILMGSTLRKRKMYEEFLSKVSILESLEKWERLTVADALEPVQFEDGEKIVVQGEPGDDFYIITEGTASVLQRRSPNEEYVEVGRLGPSDYFGEIALLLNRPRAATVVARGPLKCVKLDRPRFERVLGPCSEILKRNIQRYNSFISLTV

SEQ ID NO: 50893 - protein, 57 aa, Homo sapiens
MRLELDALRSKYEALQTFARTVARGPVAPSKVATTSVITIVKSTELSSTSVPFSAAS

SEQ ID NO: 50894 - protein, 646 aa, Homo sapiens
MRGGAEGQPCLPGGDWPACAQKIMDHVEESLCSAATPKVTQALNVLTTTFGRCQSPWTEALWVRLSPRVACLLERDPIPAAHSFVDLLLCVARSPVFSSSDGSLWETVARALSCLGPTHMGPLALGILKLEHCPQALRTQAFQVLLQPLACVLKATVQAPGPPGLLDGTADDATTVDTLLASKSSCAGLLCRTLAHLEELQPLPQRPSPWPQASLLGATVTVLRLCDGSAAPASSVGGHLCGTLAGCVRVQRAALDFLGTLSQGTGPQELVTQALAVLLECLESPGSSPTVLKKAFQATLRWLLSSPKTPGCSDLGPLIPQFLRELFPVLQKRLCHPCWEVRDSALEFLTQLSRHWGGQADFRCALLASEVPQLALQLLQDPESYVRASAVTAMGQLSSQGLHAPTSPEHAEARQSLFLELLHILSVDSEGFPRRAVMQVFTEWLRDGHADAAQDTEQFVATVLQAASRDLDWEVRAQGLELALVFLGQTLGPPRTHCPYAVALPEVAPAQPLTEALRALCHVGLFDFAFCALFDCDRPVAQKSCDLLLFLRDKIASYSSLREARGSPNTASAEATLPRWRAGEQAQPPGDQEPEAVLAMLRSLDLEGLRSTLAESSDHVEKSPQSLLQDMLATGGFLQGDEADCY

SEQ ID NO: 50895 - protein, 637 aa, Homo sapiens
MPLGGRASLTPQKLWLGTAKPGSLTQALNSPLTWEHAWTGVPGGTPDCLTDTFRVKRPHLRRSASNGHVPGTPVYREKEDMYDEIIELKKSLHVQKSDVDLMRTKLRRLEEENSRKDRQIEQLLDPSRGTDFVRTLAEKRPDASWVINGLKQRILKLEQQCKEKDGTISKLQTDMKTTNLEEMRIAMETYYEEVHRLQTLLASSETTGKKPLGEKKTGAKRQKKMGSALLSLSRSVQELTEENQSLKEDLDRVLSTSPTISKTQGYVEWSKPRLLRRIVELEKKLSVMESSKSHAAEPVRSHPPACLASSSALHRQPRGDRNKDHERLRGAVRDLKEERTALQEQLLQRDLEVKQLLQAKADLEKELECAREGEEERREREEVLREEIQTLTSKLQELQEMKKEEKEDCPEVPHKAQELPAPTPSSRHCEQDWPPDSSEEGLPRPRSPCSDGRRDAAARVLQAQWKVYKHKKKKAVLDEAAVVLQAAFRGHLTRTKLLASKAHGSEPPSVPGLPDQSSPVPRVPSPIAQATGSPVQEEAIVIIQSALRAHLARARHSATGKRTTTAASTRRRSASATHGDASSPPFLAALPGNFIHLDSGTRAAGLLRSQPKSGHLQEARAVSGRKGGVSHLELPLN

SEQ ID NO: 50896 - protein, 47 aa, Homo sapiens
MAFENKAGLPVEPATFQLYVPALSALWRDSGIREAFSRRSEFQLVSE

SEQ ID NO: 50897 - protein, 66 aa, Homo sapiens
MVSPVPSPTGTISVPNSCPASPRGAGSSSYRFVQNVTSDLQLAAEFAAKAASEQQADTSGGDSPKV

SEQ ID NO: 50898 - protein, 301 aa, Homo sapiens [sequence omitted]

SEQ ID NO: 50899 - protein, 39 aa, Homo sapiens
MNETSHMLWTLLNRLANDCRPFVYFKGNLDMCSASPRRC

SEQ ID NO: 50900 - protein, 659 aa, Homo sapiens
MTVILKLEMPQDSLILEKSQNWSSQKMDHILICCVCLGDNSEDADEIIQCDNCGITVHEGCYGVDGESDSIMSSASENSTEPWFCDACKCGVSPSCELCPNQDGIFKETDAGRWVHIVCALYVPGVAFGDIDKLRPVTLTEMNYSKYGAKECSFCEDPRFARTGVCISCDAGMCRAYFHVTCAQKEGLLSEAAAEEDIADPFFAYCKQHADRLDRKWKRKNYLALQSYCKMSLQEREKQLSPEAQARINARLQQYRAKAELARSTRPQAWVPREKLPRPLTSSASAIRKLMRKAELMGISTDIFPVDNSDTSSSVDGRRKHKQPALTADFVNYYFERNMRMIQIQENMAEQKNIKDKLENEQEKLHVEYNKLCESLEELQNLNGKLRSEGQGIWALLGRITGQKLNIPAILRAPKERKPSKKEGGTQKTSTLPAVLYSCGICKKNHDQHLLLLCDTCKLHYHLGCLDPPLTRMPRKTKNSYWQCSECDQAGSSDMEADMAMETLPDGTKRSRRQIKEPVKFVPQDVPPEPKKIPIRNTRTRGRKRSFVPEEEKHEERVPRERRQRQSVLQKKPKAEDLRTECATCKGTGDNENLVRCDECRLCYHFGCLDPPLKKSPKQTGYGWICQECDSSSSKEDENEAERKNISQELNMEQKNPKK

SEQ ID NO: 50901 - protein, 599 aa, Homo sapiens
MTVILKLEMPQDSLILEKSQNWSSQKMDHILICCVCLGDNSEDADEIIQCDNCGITVHEGCYGVDGESDSIMSSASENSTEPWFCDACKCGVSPSCELCPNQDGIFKETDAGRWVHIVCALYVPGVAFGDIDKLRPVTLTEMNYSKYGAKECSFCEDPRFARTGVCISCDAGMCRAYFHVTCAQKEGLLSEAAAEEDIADPFFAYCKQHADRLDRKWKRKNYLALQSYCKMSLQEREKQLSPEAQARINARLQQYRAKAELARSTRPQAWVPREKLPRPLTSSASAIRKLMRKAELMGISTDIFPVDNSDTSSSVDGRRKHKQPALTADFVNYYFERNMRMIQIQENMAEQKNIKDKLENEQEKLHVEYNKLCESLEELQNLNGKLRSEGQGIWALLGRITGQKLNIPAILRAPKERKPSKKEGGTQKTSTLPAVLYSCGICKKNHDQHLLLLCDTCKLHYHLGCLDPPLTRMPRKTKNSYWQCSECDQAGSSDMEADMAMETLPDGTKRSRRQIKEPVKFVPQDVPPEPKKIPIRNTRTRGRKRSFVPEEEKHEERVPRERRQRQSVLQKKPKAEDLRTECATCKGTGDNENLVRYPS

SEQ ID NO: 50902 - protein, 266 aa, Homo sapiens
MNSFSTSKCRKSLALELPAAVEPCVREGCVAQGGLAGGQQQRQAPSCAVSSPLRSLPSGTGAFGPVAFSLGLLLVLPAAFPAPVPPGEDSKDVAAPHRQPLTSSERIDKQIRYILDGISALRKETCNKSNMCESSKEALAENNLNLPKMAEKDGCFQSGFNEETCLVKIITGLLEFEVYLEYLQNRFESSEEQARAVQMSTKVLIQFLQKKAKNLDAITTPDPTTNASLLTKLQAQNQWLQDMTTHLILRSFKEFLQSSLRALRQM

SEQ ID NO: 50903 - protein, 782 aa, Homo sapiens
MSVKKSSKCIDLDTEEHIYHLKVKSEEVFDEWVSKLRHHRMYRQNEIAMFPHEVNHFFSGSTITDSSSGVFDSISSRKRSSISKQNLFQTGSNVSFSCGGETRVPLWLQSSEDMEKCSKDLAHCHAYLVEMSQLLQSMDVLHRTYSAPAINAIQGGSFESPKKEKRSHRRWRSRAIGKDAKGTLQVPKPFSGPVRLHSSNPNLSTLDFGEEKNYSDGSETSSEFSKMQEDLCHIAHKVYFTLRSAFNIMSAEREKLKQLMEQDASSSPSAQVIGLKNALSSALAQNTDLKERLRRIHAESLLLDSPAVAKSGDNLAEENSRDENRALVHQLSNESRLSITDSLSEFFDAQEVLLSPSSSENEISDDDSYVSDISDNLSLDNLSNDLDNERQTLGPVLDSGREAKSRRRTCLPAPCPSSSNISLWNILRNNIGKDLSKVAMPVELNEPLNTLQRLCEELEYSELLDKAAQIPSPLERMVYVAAFAISAYASSYYRAGSKPFNPVLGETYECIREDKGFQFFSEQVSHHPPISACHAESRNFVFWQDVRWKNKFWGKSMEIVPIGTTHVTLPVFGDHFEWNKVTSCIHNILSGQRWIEHYGEIVIKNLHDDSCYCKVNFIKAKYWSTNAHEIEGTVFDRSGKAVHRLFGKWHESIYCGGGSSSACVWRANPMPKGYEQYYSFTQFALELNEMDPSSKSLLPPTDTRFRPDQRFLEEGNLEEAEIQKQRIEQLQRERRRVLEENHVEHQPRFFRKSDDDSWVSNGTYLELRKDLGFSKLDHPVLW

SEQ ID NO: 50904 - protein, 746 aa, Homo sapiens
MSVKKSSKCIDLDTEEHIYHLKVKSEEVFDEWVSKLRHHRMYRQNEIAMFPHEVNHFFSGSTITDSSSGVFDSISSRKRSSISKQNLFQTGSNVSFSCGGETRVPLWLQSSEDMEKCSKDLAHCHAYLVEMSQLLQSMDVLHRTYSAPAINAIQGGSFESPKKEKRSHRRWRSRAIGKDAKGTLQVPKPFSGPVRLHSSNPNLSTLDFGEEKNYSDGSETSSEFSKMQEDLCHIAHKVYFTLRSAFNIMSAEREKLKQLMEQDASSSPSAQVIGLKNALSSENSRDENRALVHQLSNESRLSITDSLSEFFDAQEVLLSPSSSENEISDDDSYVSDISDNLSLDNLSNDLDNERQTLGPVLDSGREAKSRRRTCLPAPCPSSSNISLWNILRNNIGKDLSKVAMPVELNEPLNTLQRLCEELEYSELLDKAAQIPSPLERMVYVAAFAISAYASSYYRAGSKPFNPVLGETYECIREDKGFQFFSEQVSHHPPISACHAESRNFVFWQDVRWKNKFWGKSMEIVPIGTTHVTLPVFGDHFEWNKVTSCIHNILSGQRWIEHYGEIVIKNLHDDSCYCKVNFIKAKYWSTNAHEIEGTVFDRSGKAVHRLFGKWHESIYCGGGSSSACVWRANPMPKGYEQYYSFTQFALELNEMDPSSKSLLPPTDTRFRPDQRFLEEGNLEEAEIQKQRIEQLQRERRRVLEENHVEHQPRFFRKSDDDSWVSNGTYLELRKDLGFSKLDHPVLW

SEQ ID NO: 50905 - protein, 751 aa, Homo sapiens
MSVKKSSKCIDLDTEEHIYHLKVKSEEVFDEWVSKLRHHRMYRQNEIAMFPHEVNHFFSGSTITDSSSGVFDSISSRKRSSISKQNLFQTGSNVSFSCGGETRVPLWLQSSEDMEKCSKDLAHCHAYLVEMSQLLQSMDVLHRTYSAPAINAIQVPKPFSGPVRLHSSNPNLSTLDFGEEKNYSDGSETSSEFSKMQEDLCHIAHKVYFTLRSAFNIMSAEREKLKQLMEQDASSSPSAQVIGLKNALSSALAQNTDLKERLRRIHAESLLLDSPAVAKSGDNLAEENSRDENRALVHQLSNESRLSITDSLSEFFDAQEVLLSPSSSENEISDDDSYVSDISDNLSLDNLSNDLDNERQTLGPVLDSGREAKSRRRTCLPAPCPSSSNISLWNILRNNIGKDLSKVAMPVELNEPLNTLQRLCEELEYSELLDKAAQIPSPLERMVYVAAFAISAYASSYYRAGSKPFNPVLGETYECIREDKGFQFFSEQVSHHPPISACHAESRNFVFWQDVRWKNKFWGKSMEIVPIGTTHVTLPVFGDHFEWNKVTSCIHNILSGQRWIEHYGEIVIKNLHDDSCYCKVNFIKAKYWSTNAHEIEGTVFDRSGKAVHRLFGKWHESIYCGGGSSSACVWRANPMPKGYEQYYSFTQFALELNEMDPSSKSLLPPTDTRFRPDQRFLEEGNLEEAEIQKQRIEQLQRERRRVLEENHVEHQPRFFRKSDDDSWVSNGTYLELRKDLGFSKLDHPVLW

SEQ ID NO: 50906 - protein, 715 aa, Homo sapiens
MSVKKSSKCIDLDTEEHIYHLKVKSEEVFDEWVSKLRHHRMYRQNEIAMFPHEVNHFFSGSTITDSSSGVFDSISSRKRSSISKQNLFQTGSNVSFSCGGETRVPLWLQSSEDMEKCSKDLAHCHAYLVEMSQLLQSMDVLHRTYSAPAINAIQVPKPFSGPVRLHSSNPNLSTLDFGEEKNYSDGSETSSEFSKMQEDLCHIAHKVYFTLRSAFNIMSAEREKLKQLMEQDASSSPSAQVIGLKNALSSENSRDENRALVHQLSNESRLSITDSLSEFFDAQEVLLSPSSSENEISDDDSYVSDISDNLSLDNLSNDLDNERQTLGPVLDSGREAKSRRRTCLPAPCPSSSNISLWNILRNNIGKDLSKVAMPVELNEPLNTLQRLCEELEYSELLDKAAQIPSPLERMVYVAAFAISAYASSYYRAGSKPFNPVLGETYECIREDKGFQFFSEQVSHHPPISACHAESRNFVFWQDVRWKNKFWGKSMEIVPIGTTHVTLPVFGDHFEWNKVTSCIHNILSGQRWIEHYGEIVIKNLHDDSCYCKVNFIKAKYWSTNAHEIEGTVFDRSGKAVHRLFGKWHESIYCGGGSSSACVWRANPMPKGYEQYYSFTQFALELNEMDPSSKSLLPPTDTRFRPDQRFLEEGNLEEAEIQKQRIEQLQRERRRVLEENHVEHQPRFFRKSDDDSWVSNGTYLELRKDLGFSKLDHPVLW

SEQ ID NO: 50907 - protein, 287 aa, Homo sapiens
MGNPMAKNLMKHGYPLIIYDVFPDACKEFQDAGEQVVSSPADVAEKADRIITMLPTSINAIEAYSGANGILKKVKKGSLLIDSSTIDPAVSKELAKEVEKMGAVFMDAPVSGGVGAARSGNLTFMVGGVEDEFAAAQELLGCMGSNVVYCGAVGTGQAAKICNNMLLAISMIGTAEAMNLGIRLGLDPKLLAKILNMSSGRCWSSDTYNPVPGVMDGVPSANNYQGGFGTTLMAKDLGLAQDSATSTKSPILLGSLAHQIYRMMCAKGYSKKDFSSVFQFLREEETF

SEQ ID NO: 50908 - protein, 4 aa, Homo sapiens
MKHY

SEQ ID NO: 50909 - protein, 21 aa, Homo sapiens
MPGKVAKGAYKWQSVKFKFIL

SEQ ID NO: 50910 - protein, 716 aa, Homo sapiens
MFSCFKESDRLCLQDLLFKHYCYPERDPEEVFAFLLRFPHVALFTFDGLDELHSDLDLSRVPDSSCPWEPAHPLVLLANLLSGKLLKGASKLLTARTGIEVPRQFLRKKVLLRGFSPSHLRAYARRMFPERALQDRLLSQLEANPNLCSLCSVPLFCWIIFRCFQHFRAAFEGSPQLPDCTMTLTDVFLLVTEVHLNRMQPSSLVQRNTRSPVETLHAGRDTLCSLGQVAHRGMEKSLFVFTQEEVQASGLQERDMQLGFLRALPELGPGGDQQSYEFFHLTLQAFFTAFFLVLDDRVGTQELLRFFQEWMPPAGAATTSCYPPFLPFQCLQGSGPAREDLFKNKDHFQFTNLFLCGLLSKAKQKLLRHLVPAAALRRKRKALWAHLFSSLRGYLKSLPRVQVESFNQVQAMPTFIWMLRCIYETQSQKVGQLAARGICANYLKLTYCNACSADCSALSFVLHHFPKRLALDLDNNNLNDYGVRELQPCFSRLTVLRLSVNQITDGGVKVLSEELTKYKIVTYLGLYNNQITDVGARYVTKILDECKGLTHLKLGKNKITSEGGKYLALAVKNSKSISEVGMWGNQVGDEGAKAFAEALRNHPSLTTLSLASNGISTEGGKSLARALQQNTSLEILWLTQNELNDEVAESLAEMLKVNQTLKHLWLIQNQITAKGTAQLADALQSNTGITEICLNGNLIKPEEAKVYEDEKRIICF

SEQ ID NO: 50911 - protein, 329 aa, Homo sapiens
MCQVGCFLKTPRFPIWVVCSESHFSILFSLQPGLLRDWRTERLFDLYYYDGLANQQEQIRLTIDTTQTISEDTDNDLVPPLELCIRTNIGSALGFKYPVGNNQTAVQDNVKVSLAFGLSIATLAQSVGHISGAHLNPAVTLGLLLSCQISIFRALMYIIAQCVGAIVATAILSGITSSLTGNSLGRNDLADGVNSGQGLGIEIIGTLQLVLCVLATTDRRRRDLGGSAPLAIGLSVALGHLLAIDYTGCGINPARSFGSAVITHNFSNHWIFWVGPFIGGALAVLIYDFILAPRSSDLTDRVKVWTSGQVEEYDLDADDINSRVEMKPK

SEQ ID NO: 50912 - protein, 404 aa, Homo sapiens [sequence omitted]

SEQ ID NO: 50913 - protein, 155 aa, Homo sapiens
MVAQQKNLEGYVGFANLPNQVYRKSVKRGFEFTLMVVGESGLGKSTLINSLFLTDLYSPEYPGPSHRIKKTVQVEQSKVLIKEGGVQLLLTIVDTPGFGDAVDNSNCWQPVIDYIDSKFEDYLNAESRVNRRQMPDNRVQCCLYFIAPSGHGSVP

SEQ ID NO: 50914 - protein, 584 aa, Homo sapiens
MQEASMKLTESLHEVYEPDWYGREDVKMVGEKCDVLWEDFHQKLVDGSLLTLDTYLGQFPDIKNRIAKRSRKLVDYDSARHHLEALQSSKRKDESRISKAEEEFQKAQKVFEEFNVDLQEELPSLWSRRVGFYVNTFKNVSSLEAKFHKEIAVLCHKLYEVMTKLGDQHADKAFTIQGAPSDSGPLRIAKTPSPPEEPSPLPSPTASPNHTLAPASPAPARPRSPSQTRKGPPVPPLPKVTPTKELQQENIISFFEDNFVPEISVTTPSQNEVPEVKKEETLLDLDFDPFKPEVTPAGSAGVTHSPMSQTLPWDLWTTSTDLVQPASGGSFNGFTQPQDTSLFTMQTDQSMICNLIIPGADADAAVGTLVSAAEGAPGEEAEAEKATVPAGEGVSLEEAKIGTETTEGAESAQPEAEELEATVPQEKVIPSVVIEPASNHEEEGENEITIGAEPKETTEDAAPPGPTSETPELATEQKPIQDPQPTPSAPAMGAADQLASAREASQELPPGFLYKVETLHDFEAANSDELTLQRGDVVLVVPSDSEADQDAGWLVGVKESDWLQYRDLATYKGLFPENFTRRLD

SEQ ID NO: 50915 - protein, 626 aa, Homo sapiens
MQEASMKLTESLHEVYEPDWYGREDVKMVGEKCDVLWEDFHQKLVDGSLLTLDTYLGQFPDIKNRIAKRSRKLVDYDSARHHLEALQSSKRKDESRISKAEEEFQKAQKVFEEFNVDLQEELPSLWSRRVGFYVNTFKNVSSLEAKFHKEIAVLCHKLYEVMTKLGDQHADKAFTIQGAPSDSGPLRIAKTPSPPEEPSPLPSPTASPNHTLAPASPAPARPRSPSQTRKGPPVPPLPKVTPTKELQQENIISFFEDNFVPEISVTTPSQNEVPEVKKEETLLDLDFDPFKPEVTPAGSAGVTHSPMSQTLPWDLWTTSTDLVQPASGGSFNGFTQPQDTSLFTMQTDQSMICNLAESEQAPPTEPKAEEPLAAVTPAVGLDLGMDTRAEEPVEEAVIIPGADADAAVGTLVSAAEGAPGEEAEAEKATVPAGEGVSLEEAKIGTETTEGAESAQPEAEELEATVPQEKVIPSVVIEPASNHEEEGENEITIGAEPKETTEDAAPPGPTSETPELATEQKPIQDPQPTPSAPAMGAADQLASAREASQELPPGFLYKVETLHDFEAANSDELTLQRGDVVLVVPSDSEADQDAGWLVGVKESDWLQYRDLATYKGLFPENFTRRLD

SEQ ID NO: 50916 - protein, 452 aa, Homo sapiens
MSQTLPWDLWTTSTDLVQPTDSSESLSLCNLIMEETPDSGLAEEIQRSQNDIGAFTWGPDASTDRVSQEVTSGGFGEDSACPSETEQDIRLSTSLLSSADWPTVAEESEHAPGPAFPGGNEQLPPKPAPEAGVAIAACVEMEQLYDPLDSDMPAMDTAGLFKESHEDMKKSDEEEEKQKMEDSLWAGVEACQKASGGSFNGFTQPQDTSLFTMQTDQSMICNLIIPGADADAAVGTLVSAAEGAPGEEAEAEKATVPAGEGVSLEEAKIGTETTEGAESAQPEAEELEATVPQEKVIPSVVIEPASNHEEEGENEITIGAEPKETTEDAAPPGPTSETPELATEQKPIQDPQPTPSAPAMGAADQLASAREASQELPPGFLYKVETLHDFEAANSDELTLQRGDVVLVVPSDSEADQDAGWLVGVKESDWLQYRDLATYKGLFPENFTRRLD

SEQ ID NO: 50917 - protein, 438 aa, Homo sapiens
MLATLARVAALRRTCLFSGRGGGRGLWTGRPQSDMNNIKPLEGVKILDLTRVLAGPFATMNLGDLGAEVIKVERPGAGDDTRTWGPPFVGTESTYYLSVNRNKKSIAVNIKDPKGVKIIKELAAVCDVFVENYVPGKLSAMGLGYEDIDEIAPHIIYCSITGYGQTGPISQRAGYDAVASAVSGLMHITGPENGDPVRPGVAMTDLATGLYAYGAIMAGLIQKYKTGKGLFIDCNLLSSQVACLSHIAANYLIGQKEAKRWGTAHGSIVPYQAFKTKDGYIVVGAGNNQQFATVCKILDLPELIDNSKYKTNHLRVHNRKELIKILSERFEEELTSKWLYLFEGSGVPYGPINNMKNVFAEPQVLHNGLVMEMEHPTVGKISVPGPAVRYSKFKMSEARPPPLLGQHTTHILKEVLRYDDRAIGELLSAGVVDQHETH

SEQ ID NO: 50918 - protein, 563 aa, Homo sapiens
MSSVQKMMQAGKKFKDSLLEPALASVVIHKEATVFDLPKFSVCGSSQESDSLPNSAHDRDRTQDFPESNRLKLLQNAQPPMVTNTARTCPTFSAPVGESATAKFHVTPLFGNVKKENHSSAKENIGLNVFLSNQSCFPAACENPQRKSFYGSGTIDALSNPILNKACSKTEDNGPKEDSSLPTFKTAKEQLWVDQQKKYHQPQRASGSSYGGVKKSLGASRSRGILGKFVPPIPKQDGGEQNGGMQCKPYGAGPTEPAHPVDERLKNLEPKMIELIMNEIMDHGPPVNWEDIAGVEFAKATIKEIVVWPMLRPDIFTGLRGPPKGILLFGPPGTGKTLIGKCIASQSGATFFSISASSLTSKWVGEGEKMVRALFAVARCQQPAVIFIDEIDSLLSQRGDGEHESSRRIKTEFLVQLDGATTSSEDRILVVGATNRPQEIDEAARRRLVKRLYIPLPEASARKQIVINLMSKEQCCLSEEEIEQIVQQSDAFSGADMTQLCREASLGPIRSLQTADIATITPDQVRPIAYIDFENAFRTVRPSVSPKDLELYENWNKTFGCGK

SEQ ID NO: 50919 - protein, 56 aa, Homo sapiens
MASESKFLFRKNYAKYEFFKNPMNFFPEQMVTWCQQSNGSQTQLLQVLGHNRSLLK

SEQ ID NO: 50920 - protein, 287 aa, Homo sapiens
MLENYRNLVFLDLITCLEQGKEPWNMKRHEMVVAKHSALCSRFAQDLWLEQNIKDSFQKVTLSRYGKYGHKNLQLRKGCKSVDECKGHQGGFNGLNQCLKITTSKIFQCNKYVKVMHKFSNSNRHKIRHTENKHFRCKECDKSLCMLSRLTQHKKIHTRENFYKCEECGKTFNWSTNLSKPKKIHTGEKPYKCEVCGKAFHQSSILTKHKIIRTGEKPYKCAHCGKAFKQSSHLTRHKIIHTEEKPYKCEQCGKVFKQSPTLTKHQIIYTGEEPYKCEECGKAFNLS

SEQ ID NO: 50921 - protein, 68 aa, Homo sapiens
MLENYRNLVFLAVAFTFDLSGLNILSFQSILPFVSALYVMGNRNQCLQKHLEARNKDLCVLVLPKTFG

SEQ ID NO: 50922 - protein, 105 aa, Homo sapiens
MVVKAITDIIEMDSKRVPRDKLACITKCSKHIFNAIKITKNEPASADDFLPTLIYIVLKGNPPRLQSNIQYITRFCNPSRLMTGEDGYYFTNLRWFLPRLFPRLV

SEQ ID NO: 50923 - protein, 181 aa, Homo sapiens [sequence omitted]

SEQ ID NO: 50924 - protein, 978 aa, Homo sapiens
MVVTFLMSALESMCKELAKSKAEVACIAVYETDVFVVGTERGRAFVNTRKDFQKDFVKYCVEEEEKAAEMHKMKSTTQANRMSVDAVEIETLRKTVEDYFCFCYGKALGKSTVVPVPYEKMLRDQSAVVVQGLPEGVAFKHPENYDLATLKWILENKAGISFIIKRPFLEPKKHVGGRVMVTDADRSILSPGGSCGPIKVKTEPTEDSGISLEMAAVTVKEESEDPDYYQYNIQAGPSETDDVDEKQPLSKPLQGSHHSSEGNEGTEMEVPAEDSTQHVPSETSEDPEVEVTIEDDDYSPPSKRPKANELPQPPVPEPANAGKRKVREFNFEKWNARITDLRKQVEELFERKYAQAIKAKGPVTIPYPLFQSHVEDLYVEGLPEGIPFRRPSTYGIPRLERILLAKERIRFVIKKHELLNSTREDLQLDKPASGVKEEWYARITKLRKMVDQLFCKKFAEALGSTEAKAVPYQKFEAHPNDLYVEGLPENIPFRSPSWYGIPRLEKIIQVGNRIKFVIKRPELLTHSTTEVTQPRTNTPVKEDWNVRITKLRKQVEEIFNLKFAQALGLTEAVKVPYPVFESNPEFLYVEGLPEGIPFRSPTWFGIPRLERIVRGSNKIKFVVKKPELVISYLPPGMASKINTKALQSPKRPRSPGSNSKVPEIEVTVEGPNNNNPQTSAVRTPTQTNGSNVPFKPRGREFSFEAWNAKITDLKQKVENLFNEKCGEALGLKQAVKVPFALFESFPEDFYVEGLPEGVPFRRPSTFGIPRLEKILRNKAKIKFIIKKPEMFETAIKESTSSKSPPRKINSSPNVNTTASGVEDLNIIQVTIPDDDNERLSKVEKARQLREQVNDLFSRKFGEAIGMGFPVKVPYRKITINPGCVVVDGMPPGVSFKAPSYLEISSMRRILDSAEFIKFTVIRPFPGLVINNQLVDQSESEGPVIQESAEPSQLEVPATEEIKETDGSSQIKQEPDPTW

SEQ ID NO: 50925 - protein, 958 aa, Homo sapiens [sequence omitted]

SEQ ID NO: 50926 - protein, 937 aa, Homo sapiens [sequence omitted]

SEQ ID NO: 50927 - protein, 957 aa, Homo sapiens
MVVTFLMSALESMCKELAKSKAEVACIAVYETDVFVVGTERGRAFVNTRKDFQKDFVKYCVEEEEKAAEMHKMKSTTQANRMSVDAVEIETLRKTVEDYFCFCYGKALGKSTVVPVPYEKMLRDQSAVVVQGLPEGVAFKHPENYDLATLKWILENKAGISFIIKRPFLEPKKHVGGRVMVTDADRSILSPGGSCGPIKVKTEPTEDSGISLEMAAVTVKEESEDPDYYQYNIQAGPSETDDVDEKQPLSKPLQGSHHSSEGNEGTEMEVPAEDDDYSPPSKRPKANELPQPPVPEPANAGKRKVREFNFEKWNARITDLRKQVEELFERKYAQAIKAKGPVTIPYPLFQSHVEDLYVEGLPEGIPFRRPSTYGIPRLERILLAKERIRFVIKKHELLNSTREDLQLDKPASGVKEEWYARITKLRKMVDQLFCKKFAEALGSTEAKAVPYQKFEAHPNDLYVEGLPENIPFRSPSWYGIPRLEKIIQVGNRIKFVIKRPELLTHSTTEVTQPRTNTPVKEDWNVRITKLRKQVEEIFNLKFAQALGLTEAVKVPYPVFESNPEFLYVEGLPEGIPFRSPTWFGIPRLERIVRGSNKIKFVVKKPELVISYLPPGMASKINTKALQSPKRPRSPGSNSKVPEIEVTVEGPNNNNPQTSAVRTPTQTNGSNVPFKPRGREFSFEAWNAKITDLKQKVENLFNEKCGEALGLKQAVKVPFALFESFPEDFYVEGLPEGVPFRRPSTFGIPRLEKILRNKAKIKFIIKKPEMFETAIKESTSSKSPPRKINSSPNVNTTASGVEDLNIIQVTIPDDDNERLSKVEKARQLREQVNDLFSRKFGEAIGMGFPVKVPYRKITINPGCVVVDGMPPGVSFKAPSYLEISSMRRILDSAEFIKFTVIRPFPGLVINNQLVDQSESEGPVIQESAEPSQLEVPATEEIKETDGSSQIKQEPDPTW

SEQ ID NO: 50928 - protein, 93 aa, Homo sapiens
MGLSLASAVLLASLLSLHLGTATRGSDISKTCCFQYSHKPLPWTWVRSYEFTSNSCSQRAVIFTTKRGKKVCTHPRKKWVQKYISLLKTPKQL

SEQ ID NO: 50929 - protein, 677 aa, Homo sapiens
MGDSHVDTSSTVSEAVAEEVSLFSMTDMILFSLIVGLLTYWFLFRKKKEEVPEFTKIQTLTSSVRESSFVEKMKKTGRNIIVFYGSQTGTAEEFANRLSKDAHRYGMRGMSADPEEYDLADLSSLPEIDNALVVFCMATYGEGDPTDNAQDFYDWLQETDVDLSGVKFAVFGLGNKTYEHFNAMGKYVDKRLEQLGAQRIFELGLGDDDGNLEEDFITWREQFWPAVCEHFGVEATGEESSIRQYELVVHTDIDAAKVYMGEMGRLKSYENQKPPFDAKNPFLAAVTTNRKLNQGTERHLMHLELDISDSKIRYESGDHVAVYPANDSALVNQLGKILGADLDVVMSLNNLDEESNKKHPFPCPTSYRTALTYYLDITNPPRTNVLYELAQYASEPSEQELLRKMASSSGEGKELYLSWVVEARRHILAILQDCPSLRPPIDHLCELLPRLQARYYSIASSSKVHPNSVHICAVVVEYETKAGRINKGVATNWLRAKEPAGENGGRALVPMFVRKSQFRLPFKATTPVIMVGPGTGVAPFIGFIQERAWLRQQGKEVGETLLYYGCRRSDEDYLYREELAQFHRDGALTQLNVAFSREQSHKVYVQHLLKQDREHLWKLIEGGAHIYVCGDARNMARDVQNTFYDIVAELGAMEHAQAVDYIKKLMTKGRYSLDVWS

SEQ ID NO: 50930 - protein, 733 aa, Homo sapiens [sequence omitted]

SEQ ID NO: 50931 - protein, 754 aa, Homo sapiens
MLSMTMLFLPVTGTLKQNIPRLKLTYKDLLLSNSCIPFLGSSEGLDFQTLLLDEERGRLLLGAKDHIFLLSLVDLNKNFKKIYWPAAKERVELCKLAGKDANTECANFIRVLQPYNKTHIYVCGTGAFHPICGYIDLGVYKEDIIFKLDTHNLESGRLKCPFDPQQPFASVMTDEYLYSGTASDFLGKDTAFTRSLGPTHDHHYIRTDISEHYWLNGAKFIGTFFIPDTYNPDDDKIYFFFRESSQEGSTSDKTILSRVGRVCKNDVGGQRSLINKWTTFLKARLICSIPGSDGADTYFDELQDIYLLPTRDERNPVVYGVFTTTSSIFKGSAVCVYSMADIRAVFNGPYAHKESADHRWVQYDGRIPYPRPGTCPSKTYDPLIKSTRDFPDDVISFIKRHSVMYKSVYPVAGGPTFKRINVDYRLTQIVVDHVIAEDGQYDVMFLGTDIGTVLKVVSISKEKWNMEEVVLEELQIFKHSSIILNMELSLKQQQLYIGSRDGLVQLSLHRCDTYGKACADCCLARDPYCAWDGNACSRYAPTSKRRARRQDVKYGDPITQCWDIEDSISHETADEKVIFGIEFNSTFLECIPKSQQATIKWYIQRSGDEHREELKPDERIIKTEYGLLIRSLQKKDSGMYYCKAQEHTFIHTIVKLTLNVIENEQMENTQRAEHEEGKVKDLLAESRLRYKDYIQILSSPNFSLDQYCEQMWHREKRRQRNKGGPKWKHMQEMKKKRNRRHHRDLDELPRAVAT

SEQ ID NO: 50932 - protein, 67 aa, Homo sapiens
MGFRLSPQAVNSIAKRYSTNGKITFDDYIACCVKLRALTDSFRRRDTAQQGVVNFPYDDFIQCVMSV

SEQ ID NO: 50933 - protein, 3062 aa, Homo sapiens
MYINSSQRVESTVIPESTIMRTLHSGEITSHEQGFSVELESEISTTADDCSSEVNGCSFVMRTGKPTNLLREEEFGVDDSYSEQGAQDSPTHLEMMESELAGKQHEIEELNRELEEMRVTYGTEGLQQLQEFEAAIKQRDGIITQLTANLQQARREKDETMREFLELTEQSQKLQIQFQQLQASETLRNSTHSSTAADLLQAKQQILTHQQQLEEQDHLLEDYQKKKEDFTMQISFLQEKIKVYEMEQDKKVENSNKEEIQEKETIIEELNTKIIEEEKKTLELKDKLTTADKLLGELQEQIVQKNQEIKNMKLELTNSKQKERQSSEEIKQLMGTVEELQKRNHKDSQFETDIVQRMEQETQRKLEQLRAELDEMYGQQIVQMKQELIRQHMAQMEEMKTRHKGEMENALRSYSNITVNEDQIKLMNVAINELNIKLQDTNSQKEKLKEELGLILEEKCALQRQLEDLVEELSFSREQIQRARQTIAEQESKLNEAHKSLSTVEDLKAEIVSASESRKELELKHEAEVTNYKIKLEMLEKEKNAVLDRMAESQEAELERLRTQLLFSHEEELSKLKEDLEIEHRINIEKLKDNLGIHYKQQIDGLQNEMSQKIETMQFEKDNLITKQNQLILEISKLKDLQQSLVNSKSEEMTLQINELQKEIEILRQEEKEKGTLEQEVQELQLKTELLEKQMKEKENDLQEKFAQLEAENSILKDEKKTLEDMLKIHTPVSQEERLIFLDSIKSKSKDSVWEKEIEILIEENEDLKQQCIQLNEEIEKQRNTFSFAEKNFEVNYQELQEEYACLLKVKDDLEDSKNKQELEYKSKLKALNEELHLQRINPTTVKMKSSVFDEDKTFVAETLEMGEVVEKDTTELMEKLEVTKREKLELSQRLSDLSEQLKQKHGEISFLNEEVKSLKQEKEQVSLRCRELEIIINHNRAENVQSCDTQVSSLLDGVVTMTSRGAEGSVSKVNKSFGEESKIMVEDKVSFENMTVGEESKQEQLILDHLPSVTKESSLRATQPSENDKLQKELNVLKSEQNDLRLQMEAQRICLSLVYSTHVDQVREYMENEKDKALCSLKEELIFAQEEKIKELQKIHQLELQTMKTQETGDEGKPLHLLIGKLQKAVSEECSYFLQTLCSVLGEYYTPALKCEVNAEDKENSGDYISENEDPELQDYRYEVQDFQENMHTLLNKVTEEYNKLLVLQTRLSKIWGQQTDGMKLEFGEENLPKEETEFLSIHSQMTNLEDIDVNHKSKLSSLQDLEKTKLEEQVQELESLISSLQQQLKETEQNYEAEIHCLQKRLQAVSESTVPPSLPVDSVVITESDAQRTMYPGSCVKKNIDGTIEFSGEFGVKEETNIVKLLEKQYQEQLEEEVAKVIVSMSIAFAQQTELSRISGGKENTASSKQAHAVCQQEQHYFNEMKLSQDQIGFQTFETVDVKFKEEFKPLSKELGEHGKEILLSNSDPHDIPESKDCVLTISEEMFSKDKTFIVRQSIHDEISVSSMDASRQLMLNEEQLEDMRQELVRQYQEHQQATELLRQAHMRQMERQREDQEQLQEEIKRLNRQLAQNGNENQGEVEEQTFKEKELDRKPEDVPPEILSNERYALQKANNRLLKILLEVVKTTAAVEETIGRHVLGILDRSSKSQSSASLIWRSEAEASVKSCVHEEHTRVTDESIPSYSGSDMPRNDINMWSKVTEEGTELSQRLVRSGFAGTEIDPENEELMLNISSRLQAAVEKLLEAISETSSQLEHAKVTQTELMRESFRQKQEATESLKCQEELRERLHEESRAREQLAVELSKAEGVIDGYADEKTLFERQIQEKTDIIDRLEQELLCASNRLQELEAEQQQIQEERELLSRQKEAMKAEAGPVEQQLLQETEKLMKEKLEVQCQAEKVRDDLQKQVKALEIDVEEQVSRFIELEQEKNTELMDLRQQNQALEKQLEKMRKFLDEQAIDREHERDVFQQEIQKLEQQLKVVPRFQPISEHQTREVEQLANHLKEKTDKCSELLLSKEQLQRDIQERNEEIEKLEFRVRELEQALLVSADTFQKVEDRKHFGAVEAKPELSLEVQLQAERDAIDRKEKEITNLEEQLEQFREELENKNEEVQQLHMQLEIQKKESTTRLQELEQENKLFKDDMEKLGLAIKESDAMSTQDQHVLFGKFAQIIQEKEVEIDQLNEQVTKLQQQLKITTDNKVIEEKNELIRDLETQIECLMSDQECVKRNREEEIEQLNEVIEKLQQELANIGQKTSMNAHSLSEEADSLKHQLDVVIAEKLALEQQVETANEEMTFMKNVLKETNFKMNQLTQELFSLKRERESVEKIQSIPENSVNVAIDHLSKDKPELEVVLTEDALKSLENQTYFKSFEENGKGSIINLETRLLQLESTVSAKDLELTQCYKQIKDMQEQGQFETEMLQKKIVNLQKIVEEKVAAALVSQIQLEAVQEYAKFCQDNQTISSEPERTNIQNLNQLREDELGSDISALTLRISELESQVVEMHTSLILEKEQVEIAEKNVLEKEKKLLELQKLLEGNEKKQREKEKKRSPQDVEVLKTTTELFHSNEESGFFNELEALRAESVATKAELASYKEKAEKLQEELLVKETNMTSLQKDLSQVRDHLAEAKEKLSILEKEDETEVQESKKACMFEPLPIKLSKSIASQTDGTLKISSSNQTPQILVKNAGIQINLQSECSSEEVTEIISQFTEKIEKMQELHAAEILDMESRHISETETLKREHYVAVQLLKEECGTLKAVIQCLRSKEGSSIPELAHSDAYQTREICSSDSGSDWGQGIYLTHSQGFDIASEGRGEESESATDSFPKKIKGLLRAVHNEGMQVLSLTESPYSDGEDHSIQQVSEPWLEERKAYINTISSLKDLITKMQLQREAEVYDSSQSHESFSDWRGELLLALQQVFLEERSVLLAAFRTELTALGTTDAVGLLNCLEQRIQEQGVEYQAAMECLQKADRRSLLSEIQALHAQMNGRKITLKREQESEKPSQGMLYDKLIWLHKQVKRFHFVFFLIIIKLKHIFLVTFSSHSHNVKDTIYINYSRG

SEQ ID NO: 50934 - protein, 1589 aa, Homo sapiens
MSDQECVKRNREEEIEQLNEVIEKLQQELANIGQKTSMNAHSLSEEADSLKHQLDVVIAEKLALEQQVETANEEMTFMKNVLKETNFKMNQLTQELFSLKRERESVEKIQSIPENSVNVAIDHLSKDKPELEVVLTEDALKSLENQTYFKSFEENGKGSIINLETRLLQLESTVSAKDLELTQCYKQIKDMQEQGQFETEMLQKKIVNLQKIVEEKVAAALVSQIQLEAVQEYAKFCQDNQTISSEPERTNIQNLNQLREDELGSDISALTLRISELESQVVEMHTSLILEKEQVEIAEKNVLEKEKKLLELQKLLEGNEKKQREKEKKRSPQDVEVLKTTTELFHSNEESGFFNELEALRAESVATKAELASYKEKAEKLQEELLVKETNMTSLQKDLSQVRDHLAEAKEKLSILEKEDETEVQESKKACMFEPLPIKLSKSIASQTDGTLKISSSNQTPQILVKNAGIQINLQSECSSEEVTEIISQFTEKIEKMQELHAAEILDMESRHISETETLKREHYVAVQLLKEECGTLKAVIQCLRSKEGSSIPELAHSDAYQTREICSSDSGSDWGQGIYLTHSQGFDIASEGRGEESESATDSFPKKIKGLLRAVHNEGMQVLSLTESPYSDGEDHSIQQVSEPWLEERKAYINTISSLKDLITKMQLQREAEVYDSSQSHESFSDWRGELLLALQQVFLEERSVLLAAFRTELTALGTTDAVGLLNCLEQRIQEQGVEYQAAMECLQKADRRSLLSEIQALHAQMNGRKITLKREQESEKPSQELLEYNIQQKQSQMLEMQVELSSMKDRATELQEQLSSEKMVVAELKSELAQTKLELETTLKAQHKHLKELEAFRLEVKDKTDEVHLLNDTLASEQKKSRELQWALEKEKAKLGRSEERDKEELEDLKFSLESQKQRNLQLNLLLEQQKQLLNESQQKIESQRMLYDAQLSEEQGRNLELQVLLESEKVRIREMSSTLDRERELHAQLQSSDGTGQSRPPLPSEDLLKELQKQLEEKHSRIVELLNETEKYKLDSLQTRQQMEKDRQVHRKTLQTEQEANTEGQKKMHELQSKVEDLQRQLEEKRQQVYKLDLEGQRLQGIMQEFQKQELEREEKRESRRILYQNLNEPTTWSLTSDRTRNWVLQQKIEGETKESNYAKLIEMNGGGTGCNHELEMIRQKLQCVASKLQVLPQKASERLQFETADDEDFIWVQENIDEIILQLQKLTGQQGEEPSLVSPSTSCGSLTERLLRQNAELTGHISQLTEEKNDLRNMVMKLEEQIRWYRQTGAGRDNSSRFSLNGGANIEAIIASEKEVWNREKLTLQKSLKRAEAEVYKLKAELRNDSLLQTLSPDSEHVTLKRIYGKYLRAESFRKALIYQKKYLLLLLGGFQECEDATLALLARMGGQPAFTDLEVITNRPKGFTRFRSAVRVSIAISRMKFLVRRWHRVTGSVSININRDGFGLNQGAEKTDSFYHSSGGLELYGEPRHTTYRSRSDLDYIRSPLPFQNRYPGTPADFNPGSLACSQLQNYDPDRALTDYITRLEALQRRLGTIQSGALSLTTSWQHHSARPTAPLSLKFFHTH

SEQ ID NO: 50935 - protein, 179 aa, Homo sapiens
MDAIKVYCDFSTGETCIRAQPENIPAKNWYRSSKDKKHVWLGETINAGSQFEYNVEGVTSKEMATQLAFMRLLANYASQNITYHCKNSIAYMDEETGNLKKAVILQGSNDVELVAEGNSRFTYTVLVDGCSKKTNEWGKTIIEYKTNKPSRLPFLDIAPLDIGGADQEFFVDIGPVCFK

SEQ ID NO: 50936 - protein, 341 aa, Homo sapiens [sequence omitted]

SEQ ID NO: 50937 - protein, 685 aa, Homo sapiens [sequence omitted]

SEQ ID NO: 50938 - protein, 180 aa, Homo sapiens
MTKMPECYFYSKFGECSNKECPFLHIDPESKIKDCPWYDRGFCKHGPLCRHRHTRRVICVNYLVGFCPEGPSCKFMHPRFELPMGTTEQPPLPQQTQPPAKQSNNPPLQRSSSLIQLTSQNSSPNQQRTPQVIGVMQSQNSSAGNRGPRPLEQVTCYKCGEKGHYANRCTKGHLAFLSGQ

SEQ ID NO: 50939 - protein, 155 aa, Homo sapiens
MTKMPECYFYSKFGECSNKECPFLHIDPESKIKDCPWYDRGFCKHGPLCRHRHTRRVICVNYLVGFCPEGPSCKFMHPRFELPMGTTEQPPLPQQTQPPAKQRTPQVIGVMQSQNSSAGNRGPRPLEQVTCYKCGEKGHYANRCTKGHLAFLSGQ

SEQ ID NO: 50940 - protein, 122 aa, Homo sapiens
MTKMPECYFYSKFGPLCRHRHTRRVICVNYLVGFCPEGPSCKFMHPRFELPMGTTEQPPLPQQTQPPAKRTPQVIGVMQSQNSSAGNRGPRPLEQVTCYKCGEKGHYANRCTKGHLAFLSGQ

SEQ ID NO: 50941 - protein, 15 aa, Homo sapiens
MFRLWETLQSECNPH

SEQ ID NO: 50942 - protein, 90 aa, Homo sapiens
MKKSRLNDKQKHRLDFLQLMIDSQNSKETESHKALSDLELAAQSIIFIFAGYETTSSVLSFTLYELATHPDVQQKLQKEIDAVLPNKVRG

SEQ ID NO: 50943 - protein, 797 aa, Homo sapiens [sequence omitted]

SEQ ID NO: 50944 - protein, 642 aa, Homo sapiens [sequence omitted]

SEQ ID NO: 50945 - protein, 164 aa, Homo sapiens
MGLYPGLEGFRPVEQCNLDYCPERGSAIDPHLDDAWLWGERLVSLNLLSPTVLSMCREAPGSLLLCSAPSAAPEALVDSVIAPSRSVLCQEVEVAIPLPARSLLVLTGAARHQWKHAIHRRHIEARRVCVTFRELSAEFGPGGRQQELGQELLRIALSFQGRPV

SEQ ID NO: 50946 - protein, 39 aa, Homo sapiens
MEMKMQSERLSKEYDQLLKEHSELQVFAKLLNYLLMRKW

SEQ ID NO: 50947 - protein, 397 aa, Homo sapiens [sequence omitted]

SEQ ID NO: 50948 - protein, 338 aa, Homo sapiens
MLYEFILERRMTLTDSIERCLKKGKSDEQRAAAALASVLCIQLGPGIESEEILKTLGPILKKIICDGSASMQARQTCATCFGVCCFIATDDITELYSTLECLENIFTKSYLKEKDTTVICSTPNTVLHISSLLAWTLLLTICPINEVKKKLEMHFHKLPSLLSCDDVNMRIAAGESLALLFELARGIESDFFYEDMESLTQMLRALATDGNKHRAKVDKRKQRSVFRDVLRAVEERDFPTETIKFGPERMYIDCWVKKHTYDTFKEVLGSGMQYHLQSNEFLRNVFELGPPVMLDAATLKTMKISRFERHLYNSAAFKARTKARSKCRDKRADVGEFF

SEQ ID NO: 50949 - protein, 681 aa, Homo sapiens [sequence omitted]

SEQ ID NO: 50950 - protein, 227 aa, Homo sapiens
MVWTLSVAMAFPPVLDVGTYSFIREEDQCTFQHRSFRANDSLGFMLLLALILLATQLVYLKLIFFVHDRRKMKPVQFVAAVSQNWTFHGPGASGQAAANWLAGFGRGPTPPTLLGIRQNANTTGRRRLLVLDEFKMEKRISRMFYIMTFLFLTLWGPYLVACYWRVFARGPVVPGGFLTAAVWMSFAQAGINPFVCIFSNRELRRCFSTTLLYCRKSRLPREPYCVI

SEQ ID NO: 50951 - protein, 116 aa, Homo sapiens
MHRKIQSSLSVNSDISKKSKVNAVFSQKTGSSPEDCCVHCILACLFCEFLTLCNIVLGQASCGICTSEACCCCCGDEMGDDCNCPCDMDCGIMDACCESSDCLEICMECCGICFPS

SEQ ID NO: 50952 - protein, 40 aa, Homo sapiens
MHRKIQSSLSVNSDISKKSKVNAVFSQKTGSSPEDKQEFW

SEQ ID NO: 50953 - protein, 36 aa, Homo sapiens
MHRKIQSSLSVNSDISKKSKVNAVFSQKTGSSPEVC

SEQ ID NO: 50954 - protein, 56 aa, Homo sapiens
MILTNPVAAKKNVSINTVTYEWAPPVQNQALVNDMEQRVSLLKFLEYLFGAVSLMT

SEQ ID NO: 50955 - protein, 770 aa, Homo sapiens [sequence omitted]

SEQ ID NO: 50956 - protein, 521 aa, Homo sapiens [sequence omitted]

SEQ ID NO: 50957 - protein, 546 aa, Homo sapiens
MRLEAERIAYQRNDDDEEEAARERRRRARQERLRQKQEEESLGQVTDQVEVNAQNSVPDEEAKTTTTNTQVEGDDEAAFLERLARREERRQKRLQEALERQKEFDPTITDASLSLPSRRMQNDTAENETTEKEEKSESRQERYEIEETETVTKSYQKNDWRDAEENKKEDKEKEEEEEEKPKRGSIGENQGEEKGTKVQAKREKLQEDKPTFKKEEIKDEKIKKDKEPKEEVKSFMDRKKGFTEVKSQNGEFMTHKLKHTENTFSRPGGRASVDTKEAEGAPQVEAGKRLEELRRRRGETESEEFEKLKQKQQEAALELEELKKKREERRKVLEEEEQRRKQEEADRKLREEEEKRRLKEEIERRRAEAAEKRQKMPEDGLSDDKKPFKCFTPKGSSLKIEERAEFLNKSVQKSGVKSTHQAAIVSKIDSRLEQYTSAIEGTKSAKPTKPAASDLPVPAEGVRNIKSMWEKGNVFSSPTAAGTPNKETAGLKVGVSSRINEWLTKTPDGNKSPAPKPSDLRPGDVSSKRNLWEKQSVDKVTSPTKV

SEQ ID NO: 50958 - protein, 43 aa, Homo sapiens [sequence omitted]

SEQ ID NO: 50959 - protein, 747 aa, Homo sapiens
MLHHIEEPCSLGAHAAVIVPPTWIIKVKKPQNSLKASNRKKKRTSFKRKASKRGMEQENKGRPFVIKPISSPLMKPLLVFVNPKSGGNQGTKVLQMFMWYLNPRQVFDLSQEGPKDALELYRKVPNLRILACGGDGTVGWILSILDELQLSPQPPVGVLPLGTGNDLARTLNWGGGYTDEPVSKILCQVEDGTVVQLDRWNLHVERNPDLPPEELEDGVCKLPLNVFNNYFSLGFDAHVTLEFHESREANPEKFNSRFRNKMFYAGAAFSDFLQRSSRDLSKHVKVVCDGTDLTPKIQELKFQCIVFLNIPRYCAGTMPWGNPGDHHDFEPQRHDDGYIEVIGFTMASLAALQVGGHGERLHQCREVMLLTYKSIPMQVDGEPCRLAPAMIRISLRNQANMVQKSKRRTSMPLLNDPQSVPDRLRIRVNKISLQDYEGFHYDKEKLREASIPLGILVVRGDCDLETCRMYIDRLQEDLQSVSSGSQRVHYQDHETSFPRALSAQRLSPRWCFLDDRSQEHLHFVMEISQDEIFILDPDMVVSQPAGTPPGMPDLVVEQASGISDWWNPALRKRMLSDSGLGMIAPYYEDSDLKDLSHSRVLQSPVSSEDHAILQAVIAGDLMKLIESYKNGGSLLIQGPDHCSLLHYAAKTGNGEIVKYILDHGPSELLDMADSETGETALHKAACQRNRAVCQLLVDAGASLRKTDSKGKTPQERAQQAGDPDLAAYLESRQNYKVIGHEDLETAV

SEQ ID NO: 50960 - protein, 744 aa, Homo sapiens
MEPEAGAGAGAAASSAADPAIPEEVWNIKQMIKLTQEHIEALLDKFGGEHNPPSIYLEAYEEYTSKLDALQQREQQLLESLGNGTDFSVSSSASMDTVTSSSSSSLSVLPSSLSVFQNPTDVARSNPKSPQKPIVRVFLPNKQRTVVPARCGVTVRDSLKKALMMRGLIPECCAVYRIQDGEKKPIGWDTDISWLTGEELHVEVLENVPLTTHNFVRKTFFTLAFCDFCRKLLFQGFRCQTCGYKFHQRCSTEVPLMCVNYDQLDLLFVSKFFEHHPIPQEEASLAETALTSGSSPSAPASDSIGPQILTSPSPSKSIPIPQPFRPADEDHRNQFGQRDRSSSAPNVHINTIEPVNIDDLIRDQGFRGDGGSTTGLSATPPASLPGSLTNVKALQKSPGPQRERKSSSSSEDRNRMKTLGRRDSSDDWEIPDGQITVGQRIGSGSFGTVYKGKWHGDVAVKMLNVTAPTPQQLQAFKNEVGVLRKTRHVNILLFMGYSTKPQLAIVTQWCEGSSLYHHLHIIETKFEMIKLIDIARQTAQGMDYLHAKSIIHRDLKSNNIFLHEDLTVKIGDFGLATVKSRWSGSHQFEQLSGSILWMAPEVIRMQDKNPYSFQSDVYAFGIVLYELMTGQLPYSNINNRDQIIFMVGRGYLSPDLSKVRSNCPKAMKRLMAECLKKKRDERPLFPQILASIELLARSLPKIHRSASEPSLNRAGFQTEDFSLYACASPKTPIQAGGYGAFPVH

SEQ ID NO: 50961 - protein, 715 aa, Homo sapiens
MKTNYETLDSLGYAFSKPDLITWMEQGRMLLISEQGCLDKTRRTTSPPTDEQLNMKNTGKLLCFDDEGTPRTKEEDCRLNGPQKQDLCAALRGKERKILLAQTATFQSPSLRETEILNKKVSITAYDPDKKDLRHKPRETPGRLEIPTGPRCYSCYVCRKVFQVRRDLLKHKRSHSKSQLCRYPKYKNSSRGKSELRRTQRLLCQKKRFQCSECEKSYFLKGSLVTHQVVHTGQRPYPCPECDKTFRYRANLKKHLCLHRGERPFCCGECGRAFVQQCELTEHLRLHSGEKPFQCPQCDRCFRLKRGMKVHLTQHSGKRPFHCPECGRSFSRKAALKTHQRTHSEEKPFSCGECGRKFIYKIKLDEHIRVHTGEKPFSCPECNKSFRLKRSLKAHGLQHIGKRPFQCPECSRGFFWRNAMRAHQRLHSEQKPFPCAECGKRFTRPSKLACHTRVHDRQKEFPCGECKKTFSQQSRLTQHLKVHTTEKPFSCAECGRSFRRRAHLTEHTRLHSGEEPFQCPECDKSFSWKASMKFHQRMHRDEKPFACGECDKTYTHQSQLTEHLRLHSGEKPYQCPECEKTFRLKGNLKSHLLQHSGQKPFSCVMCGKSFTQQYRLTEHIRVHSGEKPFQCPECDKSYCIRGSLKVHLYKHSGERPFQCPECGKGFLQKRSLKAHLCLHSGERPFSCDECGRSFTYVGALKTHIAVHAKEKPSSL

SEQ ID NO: 50962 - protein, 132 aa, Homo sapiens
MAELLPSSRAELEDPGGDGAIPAMYLDCISDLRQKEITDGIHSSSDINILYNDAVESCIQDPSAEGLSEEVPVVFEELPVVFEDVAVYFTREEWGMLDKRQKELYRDVMRMNYELLASLGKDAPSLLFTTLL

SEQ ID NO: 50963 - protein, 227 aa, Homo sapiens
MAPEAPQHTHIDVHIHQESALAKLLLTCCSALRPRATQARGSSRLLVASWVMQIVLGILSAVLGGFFYIRDYTLLVTSGAAIWTGAVAVLAGAAAFIYEKRGGTYWALLRTLLTLAAFSTAIAALKLWNEDFRYGYSYYNSACRISSSSDWNTPAPTQSPEEVRRLHLCTSFMDMLKALFRTLQAMLLGVWILLLLASLTPLWLYCWRMFPTKGKRDQKEMLEVSGI

SEQ ID NO: 50964 - protein, 239 aa, Homo sapiens
MSRVCGKSASPLKVLCTPEGIRLQCFMKYFTDEMKVNWCHKDAKISSSEHMRIGGSEEMAWLQICEPTEKDKGKYTFEIFDGKDNHQRSLDLSGQAFDEAFAEFQQFKAAAFAEKNRGRLIGGLPDVVTIMEGKTLNLTCTVFGNPDPEVIWFKNDQDIQLSEHFSVKVEQAKYVSMTIKGVTSEDSGKYSINIKNKYGGEKIDVTVSVYKHGEKIPDMAPPQQAKPKLIPASASAAGQ

SEQ ID NO: 50965 - protein, 282 aa, Homo sapiens
MVLAPCGLLLNLTGTLAPGWRLVKGFLNQPVDVELYQGLWDMCREQSSRERECGQTDQWGYFEAQPVLVARALMVTSLAATVLGLLLASLGVRCWQDEPNFVLAGLSGVVLFVAGLLGLIPVSWYNHFLGDRDVLPAPASPVTVQVSYSLVLGYLGSCLLLLGGFSLALSFAPWCDERCRRRRKGPSAGPRRSSVSTIQVEWPEPDLAPAIKYYSDGQHRPPPAQHRKPKPKPKVGFPMPRPRPKAYTNSVDVLDGEGWESQDAPSCSTHPCDSSLPCDSDL

SEQ ID NO: 50966 - protein, 390 aa, Homo sapiens [sequence omitted]

SEQ ID NO: 50967 - protein, 466 aa, Homo sapiens
MALFKRTLVLSPAAAPRGPGAGTAPRGCCLPPAAWPCKDWPRGEGGRLWSRLPQSHSHSHSHSHSHSCSSTSPTAVCVVCPQDSLSSSLKTCYKYLNQTSRSFAAVIQALDGEMRNAVCIFYLVLRALDTLEDDMTISVEKKVPLLHNFHSFLYQPDWRFMESKEKDRQVLEDFPTISLEFRNLAEKYQTVIADICRRMGIGMAEFLDKHVTSEQEWDKYCHYVAGLVGIGLSRLFSASEFEDPLVGEDTERANSMGLFLQKTNIIRDYLEDQQGGREFWPQEVWSRYVKKLGDFAKPENIDLAVQCLNELITNALHHIPDVITYLSRLRNQSVFNFCAIPQVMAIATLAACYNNQQVFKGAVKIRKGQAVTLMMDATNMPAVKAIIYQYMEEIYHRIPDSDPSSSKTRQIISTIRTQNLPNCQLISRSHYSPIYLSFVMLLAALSWQYLTTLSQVTEDYVQTGEH

SEQ ID NO: 50968 - protein, 292 aa, Homo sapiens
MEWSSRRSIFRMNGDKFRKFIKAPPRNYSMIVMFTALQPQRQCSVCRQANEEYQILANSWRYSSAFCNKLFFSMVDYDEGTDVFQQLNMNSAPTFMHFPPKGRPKRADTFDLQRIGFAAEQLAKWIADRTDVHIRVFRPPNYSGTIALALLVSLVGGLLYLRRNNLEFIYNKTGWAMVSLCIVFAMTSGQMWNHIRGPPYAHKNPHNGQVSYIHGSSQAQFVAESHIILVLNAAITMGMVLLNEAATSKGDVGKRRIICLVGLGLVVFFFSFLLSIFRSKYHGYPYSDLDFE

SEQ ID NO: 50969 - protein, 415 aa, Homo sapiens [sequence omitted]

SEQ ID NO: 50970 - protein, 307 aa, Homo sapiens
MDKQGVYVTSPLVNNFTMHSDLGKIIQSLLDEFWKNPPVLAPTSTAFPYLYSNPSGMSPYASQGFPFLPPYPPQEANRSITSLSVADTVSSSTTSHTTAKPAAPSFGVLSNLPLPIPTVDASIPTSQNGFGYKMPDVPDAFPELSELSVSQLTDMNEQEEVLLEQFLTLPQLKQIITDKDDLVKSIEELARKNLLLEPSLEAKRQTVLDKYELLTQMKSTFEKKMQRQHELSESCSASALQARLKVAAHEAEEESDNIAEDFLEGKMEIDDFLSSFMEKRTICHCRRAKEEKLQQAIAMHSQFHAPL

SEQ ID NO: 50971 - protein, 223 aa, Homo sapiens
MSVDSARAALLSTQTLPAPSPTSPPGGILKTSKEADAESLQAAWYPRTSLPTPLRAHDILHLVELAAQYRQQARHPLILPQELPCDLVCQRLVATFTSAQTVWVLVGTVGMPHLPVTACGLDPMEQRGGMKMAVLRLLQECLTLHHLVVEIKGLLGLQHLGRDHSDGICLNVLVTVAFRSPGIQDEPPKVRGENFSWWKVMEEDLQSQLLQRLQGSSVVPVNR

SEQ ID NO: 50972 - protein, 128 aa, Homo sapiens
MSPEITSLDDIRKLDRFTEPPAFGPVCDLLWSDPSEDYGNEKTLEHYTHNTVRGCSYFYSYPAVCEFLQNNNLLSIIRAHEAQDAGYRMYRKSQATGFPSLITIFSAPNYLDVYNNKESATHSFDYPQ

SEQ ID NO: 50973 - protein, 293 aa, Homo sapiens
MLHAEAQSKIRQSPSPLRLQLDRSQATSPGQTNGDSSLEVLATRFQGSVRTYTESQSSLRSSYSSPTSLSPRAGSPFSPPPSSSSLTGEAAISRSFQSLACSPGLPAADRLSYSGRPGSRQAGLGRAGDSAVLVLPPSPGPRSSRPSMDSEGGSLLLDEDSEVFKMLQENREGRAAPRQSSSFRLLQEALEAEERGGTPAFLPSSLSPQSSLPASRALATPPKLHTCEKCSTSIANQAVRIQEGRYRHPGCYTCADCGLNLKMRGHFWVGDELYCEKHARQRYSAPATLSSRA

SEQ ID NO: 50974 - protein, 17 aa, Homo sapiens
MPSLVVKKQRAKNLSVG

SEQ ID NO: 50975 - protein, 607 aa, Homo sapiens
MWYPEIKHFCPRAPVILVGCQLDLRYADLEAVNRARRPLARPIKPNEILPPEKGREVAKELGIPYYETSVVAQFGIKDVFDNAIRAALISRRHLQFWKSHLRNVQRPLLQAPFLPPKPPPPIIVVPDPPSSSEECPAHLLEDPLCADVILVLQERVRIFAHKIYLSTSSSKFYDLFLMDLSEGELGGPSEPGGTHPEDHQGHSDQHHHHHHHHHGRDFLLRAASFDVCESVDEAGGSGPAGLRASTSDGILRGNGTGYLPGRGRVLSSWSRAFVSIQEEMAEDPLTYKSRLMVVVKMDSSIQPGPFRAVLKYLYTGELDENERDLMHIAHIAELLEVFDLRMMVANILNNEAFMNQEITKAFHVRRTNRVKECLAKGTFSDVTFILDDGTISAHKPLLISSCDWMAAMFGGPFVESSTREVVFPYTSKSCMRAVLEYLYTGMFTSSPDLDDMKLIILANRLCLPHLVALTEQYTVTGLMEATQMMVDIDGDVLVFLELAQFHCAYQLADWCLHHICTNYNNVCRKFPRDMKAMSPENQEYFEKHRWPPVWYLKEEDHYQRARKEREKEDYLHLKRQPKRRWLFWNSPSSPSSSAASSSSPSSSSAVV

SEQ ID NO: 50976 - protein, 478 aa, Homo sapiens
MKASRVTLGEAGARARWPLGTPRAAATRREAAALPPVTLALLCLDGVFLSSAENDFVHRIQEELDRFLLQKQLSKVLLFPPLSSRLRYLIHRTAENFDLLSSFSVGEGWKRRTVICHQDIRVPSSDGLSGPCRAPASCPSRYHGPRPISNQGAAAVPRGARAGRWYRGRKPDQPLYVPRVLRRQEEWGLTSTSVLKREAPAGRDPEEPGDVGAGDPNSDQGLPVLMTQGTEDLKGPGQRCENEPLLDPVGPEPLGPESQSGKGDMVEMATRFGSTLQLDLEKGKESLLEKRLVAEEEEDEEEVEEDGPSSCSEDDYSELLQEITDNLTKKEIQIEKIHLDTSSFVEELPGEKDLAHVVEIYDFEPALKTEDLLATFSEFQEKGFRIQWVDDTHALGIFPCLASAAEALTREFSVLKIRPLTQGTKQSKLKALQRPKLLRLVKERPQTNATVARRLVARALGLQHKKKERPAVRGPLPP

SEQ ID NO: 50977 - protein, 574 aa, Homo sapiens [sequence omitted]

SEQ ID NO: 50978 - protein, 39 aa, Homo sapiens
MRKSGAMKKGGIFSAEFLKVFIPSLFLSHVLALGLGCGN

SEQ ID NO: 50979 - protein, 190 aa, Homo sapiens
MGKDKYENEDLIKHGWPEDIWFHVDKLSSAHVYLRLHKGENIEDIPKEVLMDCAHLVKANSIQGCKMNNVNVVYTPWSNLKKTADMDVGQIGFHRQKDVKIVTVEKKVNEILNRLEKTKVERFPDLAAEKECRDREERNEKKAQIQEMKKREKEEMKKKREMDELRSYSSLMKVENMSSNQDGNDSDEFM

SEQ ID NO: 50980 - protein, 74 aa, Homo sapiens
MGKDKYENEDLIKHGWPEDIWFHVDKLSSAHVYLRLHKGENIEDIPKEVLMDCAHLVKANSIQGKNCDSGEESK

SEQ ID NO: 50981 - protein, 179 aa, Homo sapiens [sequence omitted]

SEQ ID NO: 50982 - protein, 4 aa, Homo sapiens
MTYC

SEQ ID NO: 50983 - protein, 104 aa, Homo sapiens
MIYFDRIEVVNFLVPNAVYDIVKNYTADYDKALIFNKIHHELNQFCSVHTLQEVYIELFDQIDENLKLALQQDLTSMAPGLVIQAVRVTKPNIPEAIRRNYELM

SEQ ID NO: 50984 - protein, 421 aa, Homo sapiens
MTTRQRPGKMTWPNNIVKTMSKERDVFLVKEHPDPGSKDPEEDYPKFGLLDQDLSNIGPAYDNQKQSSAVSTSGNLNGGIAAGSSGKGRGAKRKQQDGGTTGTTKKARSDPLFSAQRLPPHGYPLEHPFNKDGYRYILAEPDPHAPDPEKLELDCWAGKPIPGDLYRACLYERVLLALHDRAPQLKISDDRLTVVGEKGYSMVRASHGVRKGAWYFEITVDEMPPDTAARLGWSQPLGNLQAPLGYDKFSYSWRSKKGTKFHQSIGKHYSSGYGQGDVLGFYINLPEDTETAKSLPDTYKDKALIKFKSYLYFEEKDFVDKAEKSLKQTPHSEIIFYKNGVNQGVAYKDIFEGVYFPAISLYKSCTVSINFGPCFKYPPKDLTYRPMSDMGWGAVVEHTLADVLYHVETEVDGRRSPPWEP

SEQ ID NO: 50985 - protein, 388 aa, Homo sapiens
MTTRQRPGKMTWPNNIVKTMSKERDVFLVKEHPDPGSKDPEEDYPKFGLLDQDLSNIGPAYDNQKQSSAVSTSGNLNGGIAAGSSGKGRGAKRKQQDGGTTGTTKKARSDPLFSAQRLPPHGYPLEHPFNKDGYRYILAEPDPHAPDPEKLELDCWAGKPIPGDLYRACLYERVLLALHDRAPQLKISDDRLTVVGEKGYSMVRASHGVRKGAWYFEITVDEMPPDTAARLGWSQPLGNLQAPLGYDKFSYSWRSKKGTKFHQSIGKHYSSGYGQGDVLGFYINLPEDTETAKSLPDTYKDKALIKFKSYLYFEEKDFVDKAEKSLKQTPHSEVSINFGPCFKYPPKDLTYRPMSDMGWGAVVEHTLADVLYHVETEVDGRRSPPWEP

SEQ ID NO: 50986 - protein, 130 aa, Homo sapiens
MPGTASLIEDIDKKHLVLLRDGRTLIGFLRSIDQFANLVLHQTVERIHVGKKYGDIPRGIFVVRGENVVLLGEIDLEKESDTPLQQVSIEEILEEQRVEQQTKLEAEKLKVQALKDRGLSIPRADTLDEY

SEQ ID NO: 50987 - protein, 41 aa, Homo sapiens
MPGTASLIEDIDKKHLVLLRDGRTLIGFLRSIDQFGLGKGE

SEQ ID NO: 50988 - protein, 187 aa, Homo sapiens [sequence omitted]

SEQ ID NO: 50989 - protein, 1057 aa, Homo sapiens
MTREERIEQYTFIYIDKQPEEALSQAKKSVASKTEVKKTRRPRSVLNTQPEQTNAGEVASSLSSTEIRRHSQRRHTSAEEEEPPPVKIAWKTAAARKSLPASITMHKGSLDLQKCNMSPVVKIEQVFALQNATGDGKFIDQFVYSTKGIGNKTEISVRGQDRLIISTPNQRNEKPTQSVSSPEATSGSTGSVEKKQQRRSIRTRSESEKSTEVVPKKKIKKEQVETVPQATVKTGLQKGASEISDSCKPLKKRSRASTDVEMTSSAYRDTSDSDSRGLSDLQVGFGKQVDSPSATADADVSDVQSMDSSLSRRGTGMSKKDTVCQICESSGDSLIPCEGECCKHFHLECLGLASLPDSKFICMECKTGQHPCFSCKVSGKDVKRCSVGACGKFYHEACVRKFPTAIFESKGFRCPQHCCSACSMEKDIHKASKGRMMRCLRCPVAYHSGDACIAAGSMLVSSYILICSNHSKRSSNSSAVNVGFCFVCARGLIVQDHSDPMFSSYAYKSHYLLNESNRAELMKLPMIPSSSASKKKCEKGGRLLCCESCPASFHPECLSIEMPEGCWNCNDCKAGKKLHYKQIVWVKLGNYRWWPAEICNPRSVPLNIQGLKHDLGDFPVFFFGSHDYYWVHQGRVFPYVEGDKSFAEGQTSINKTFKKALEEAAKRFQELKAQRESKEALEIEKNSRKPPPYKHIKANKVIGKVQIQVADLSEIPRCNCKPADENPCGLESECLNRMLQYECHPQVCPAGDRCQNQCFTKRLYPDAEIIKTERRGWGLRTKRSIKKGEFVNEYVGELIDEEECRLRIKRAHENSVTNFYMLTVTKDRIIDAGPKGNYSRFMNHSCNPNCETQKWTVNGDVRVGLFALCDIPAGMELTFNYNLDCLGNGRTECHCGADNCSGFLGVRPKSACASTNEEKAKNAKLKQKRRKIKTEPKQMHEDYCFQCGDGGELVMCDKKDCPKAYHLLCLNLTQPPYGKWECPWHQCDECSSAAVSFCEFCPHSFCKDHEKGALVPSALEGRLCCSEHDPMAPVSPEYWSKIKCKWESQDHGEEVKE

SEQ ID NO: 50990 - protein, 265 aa, Homo sapiens
MTREERIEQYTFIYIDKQPEEALSQAKKSVASKTEVKKTRRPRSVLNTQPEQTNAGEVASSLSSTEIRRHSQRRHTSAEEEEPPPVKIAWKTAAARKSLPASITMHKGSLDLQKCNMSPVVKIEQVFALQNATGDGKFIDQFVYSTKGIGNKTEISVRGQDRLIISTPNQRNEKPTQSVSSPEATSGSTGSVEKKQQRRSIRTRSESEKSTEVVPKKKIKKEQVETVPQATVKTGLQKGSADRGVQGSVRFSDSSVSAAIEETVD

SEQ ID NO: 50991 - protein, 655 aa, Homo sapiens [sequence omitted]

SEQ ID NO: 50992 - protein, 713 aa, Homo sapiens
MIYLYNQGSMNTYSSDIQTQCYYQGNIEGYPDSMVTLSTCSGLRGILQFENVSYGIEPLESAVEFQHVLYKLKNEDNDIAIFIDRSLKEQPMDDNIFISEKSEPAVPDLFPLYLEMHIVVDKTLYDYWGSDSMIVTNKVIEIVGLANSMFTQFKVTIVLSSLELWSDENKISTVGEADELLQKFLEWKQSYLNLRPHDIAYLLIYMDYPRYLGAVFPGTMCITRYSAGVALYPKEITLEAFAVIVTQMLALSLGISYDDPKKCQCSESTCIMNPEVVQSNGVKTFSSCSLRSFQNFISNVGVKCLQNKPQMQKKSPKPVCGNGRLEGNEICDCGTEAQCGPASCCDFRTCVLKDGAKCYKGLCCKDCQILQSGVECRPKAHPECDIAENCNGTSPECGPDITLINGLSCKNNKFICYDGDCHDLDARCESVFGKGSRNAPFACYEEIQSQSDRFGNCGRDRNNKYVFCGWRNLICGRLVCTYPTRKPFHQENGDVIYAFVRDSVCITVDYKLPRTVPDPLAVKNGSQCDIGRVCVNRECVESRIIKASAHVCSQQCSGHGVCDSRNKCHCSPGYKPPNCQIRSKGFSIFPEEDMGSIMERASGKTENTWLLGFLIALPILIVTTAIVLARKQLKKWFAKEEEFPSSESKSEGSTQTYASQSSSEGSTQTYASQTRSESSSQADTSKSKSEDSAEAYTSRSKSQDSTQTQSSSN

SEQ ID NO: 50993 - protein, 1701 aa, Homo sapiens
MWICQICRPRKKGRKLLQKKAAQIKRRYTNPIGRPKNRLKKQNTVSKGPFSKVRTGPGRGRKRKITLSSQSASSSSEEGYLERIDGLDFCRDSNVSLKFNKKTKGLIDGLTKFFTPSPDGRKARGEVVDYSEQYRIRKRGNRKSSTSDWPTDNQDGWDGKQENEERLFGSQEIMTEKDMELFRDIQEQALQKVGVTGPPDPQVRCPSVIEFGKYEIHTWYSSPYPQEYSRLPKLYLCEFCLKYMKSRTILQQHMKKCGWFHPPANEIYRKNNISVFEVDGNVSTIYCQNLCLLAKLFLDHKTLYYDVEPFLFYVLTQNDVKGCHLVGYFSKEKHCQQKYNVSCIMILPQYQRKGYGRFLIDFSYLLSKREGQAGSPEKPLSDLGRLSYMAYWKSVILECLYHQNDKQISIKKLSKLTGICPQDITSTLHHLRMLDFRSDQFVIIRREKLIQDHMAKLQLNLRPVDVDPECLRWTPVIVSNSVVSEEEEEEAEEGENEEPQCQERELEISVGKSVSHENKEQDSYSVESEKKPEVMAPVSSTRLSKQVLPHDSLPANSQPSRRGRWGRKNRKTQERFGDKDSKLLLEETSSAPQEQYGECGEKSEATQEQYTESEEQLVASEEQPSQDGKPDLPKRRLSEGVEPWRGQLKKSPEALKCRLTEGSERLPRRYSEGDRAVLRGFSESSEEEEEPESPRSSSPPILTKPTLKRKKPFLHRRRRVRKRKHHNSSVVTETISETTEVLDEPFEDSDSERPMPRLEPTFEIDEEEEEEDENELFPREYFRRLSSQDVLRCQSSSKRKSKDEEEDEESDDADDTPILKPVSLLRKRDVKNSPLEPDTSTPLKKKKGWPKGKSRKPIHWKKRPGRKPGFKLSREIMPVSTQACVIEPIVSIPKAGRKPKIQESEETVEPKEDMPLPEERKEEEEMQAEAEEAEEGEEEDAASSEVPAASPADSSNSPETETKEPEVEEEEEKPRVSEEQRQSEEEQQELEEPEPEEEEDAAAETAQNDDHDADDEDDGHLESTKKKELEEQPTREDVKEEPGVQESFLDANMQKSREKIKDKEETELDSEEEQPSHDTSVVSEQMAGSEDDHEEDSHTKEELIELKEEEEIPHSELDLETVQAVQSLTQEESSEHEGAYQDCEETLAACQTLQSYTQADEDPQMSMVEDCHASEHNSPISSVQSHPSQSVRSVSSPNVPALESGYTQISPEQGSLSAPSMQNMETSPMMDVPSVSDHSQQVVDSGFSDLGSIESTTENYENPSSYDSTMGGSICGNSSSQSSCSYGGLSSSSSLTQSSCVVTQQMASMGSSCSMMQQSSVQPAANCSIKSPQSCVVERPPSNQQQQPPPPPPQQPQPPPPQPQPAPQPPPPQQQPQQQPQPQPQQPPPPPPPQQQPPLSQCSMNNSFTPAPMIMEIPESGSTGNISIYERIPGDFGAGSYSQPSATFSLAKLQQLTNTIMDPHAMPYSHSPAVTSYATSVSLSNTGLAQLAPSHPLAGTPQAQATMTPPPNLASTTMNLTSPLLQCNMSATNIGIPHTQRLQGQMPVKGHISIRSKSAPLPSAAAHQQQLYGRSPSAVAMQAGPRALAVQRGMNMGVNLMPTPAYNVNSMNMNTLNAMNSYRMTQPMMNSSYHSNPAYMNQTAQYPMQMQMGMMGSQAYTQQPMQPNPHGNMMYTGPSHHSYMNAAGVPKQSLNGPYMRR

SEQ ID NO: 50994 - protein, 1703 aa, Homo sapiens
MWICQICRPRKKGRKLLQKKAAQIKRRYTNPIGRPKNRLKKQNTVSKGPFSKVRTGPGRGRKRKITLSSQSASSSSEEGYLERIDGLDFCRDSNVSLKFNKKTKGLIDGLTKFFTPSPDGRKARGEVVDYSEQYRIRKRGNRKSSTSDWPTDNQDGWDGKQENEERLFGSQEIMTEKDMELFRDIQEQALQKVGVTGPPDPQVRCPSVIEFGKYEIHTWYSSPYPQEYSRLPKLYLCEFCLKYMKSRTILQQHMKKCGWFHPPANEIYRKNNISVFEVDGNVSTIYCQNLCLLAKLFLDHKTLYYDVEPFLFYVLTQNDVKGCHLVGYFSKEKHCQQKYNVSCIMILPQYQRKGYGRFLIDFSYLLSKREGQAGSPEKPLSDLGRLSYMAYWKSVILECLYHQNDKQISIKKLSKLTGICPQDITSTLHHLRMLDFRSDQFVIIRREKLIQDHMAKLQLNLRPVDVDPECLRWTPVIVSNSVVSEEEEEEAEEGENEEPQCQERELEISVRVGKSVSHENKEQDSYSVESEKKPEVMAPVSSTRLSKQVLPHDSLPANSQPSRRGRWGRKNRKTQERFGDKDSKLLLEETSSAPQEQYGECGEKSEATQEQYTESEEQLVASEEQPSQDGKPDLPKRRLSEGVEPWRGQLKKSPEALKCRLTEGSERLPRRYSEGDRAVLRGFSESSEEEEEPESPRSSSPPILTKPTLKRKKPFLHRRRRVRKRKHHNSSVVTETISETTEVLDEPFEDSDSERPMPRLEPTFEIDEEEEEEDENELFPREYFRRLSSQDVLRCQSSSKRKSKDEEEDEESDDADDTPILKPVSLLRKRDVKNSPLEPDTSTPLKKKKGWPKGKSRKPIHWKKRPGRKPGFKLSREIMPVSTQACVIEPIVSIPKAGRKPKIQESEETVEPKEDMPLPEERKEEEEMQAEAEEAEEGEEEDAASSEVPAASPADSSNSPETETKEPEVEEEEEKPRVSEEQRQSEEEQQELEEPEPEEEEDAAAETAQNDDHDADDEDDGHLESTKKKELEEQPTREDVKEEPGVQESFLDANMQKSREKIKDKEETELDSEEEQPSHDTSVVSEQMAGSEDDHEEDSHTKEELIELKEEEEIPHSELDLETVQAVQSLTQEESSEHEGAYQDCEETLAACQTLQSYTQADEDPQMSMVEDCHASEHNSPISSVQSHPSQSVRSVSSPNVPALESGYTQISPEQGSLSAPSMQNMETSPMMDVPSVSDHSQQVVDSGFSDLGSIESTTENYENPSSYDSTMGGSICGNSSSQSSCSYGGLSSSSSLTQSSCVVTQQMASMGSSCSMMQQSSVQPAANCSIKSPQSCVVERPPSNQQQQPPPPPPQQPQPPPPQPQPAPQPPPPQQQPQQQPQPQPQQPPPPPPPQQQPPLSQCSMNNSFTPAPMIMEIPESGSTGNISIYERIPGDFGAGSYSQPSATFSLAKLQQLTNTIMDPHAMPYSHSPAVTSYATSVSLSNTGLAQLAPSHPLAGTPQAQATMTPPPNLASTTMNLTSPLLQCNMSATNIGIPHTQRLQGQMPVKGHISIRSKSAPLPSAAAHQQQLYGRSPSAVAMQAGPRALAVQRGMNMGVNLMPTPAYNVNSMNMNTLNAMNSYRMTQPMMNSSYHSNPAYMNQTAQYPMQMQMGMMGSQAYTQQPMQPNPHGNMMYTGPSHHSYMNAAGVPKQSLNGPYMRR

SEQ ID NO: 50995 - protein, 57 aa, Homo sapiens
MRIFSVPPTEETLSEPNFYDTISKIRLRQQLEMYSISRKYDYQQPQNQADSVQLSLE

SEQ ID NO: 50996 - protein, 97 aa, Homo sapiens
MIIGPPRTNYENRIYSLKVECGPKYPEAPPSVRFVTKINMNGINNSSGMVDARSIPVLAKWQNSYSIKVVLQELRRLMMSKENMKLPQPPEGQTYNN

SEQ ID NO: 50997 - protein, 39 aa, Homo sapiens [sequence omitted]

SEQ ID NO: 50998 - protein, 403 aa, Homo sapiens [sequence omitted]

SEQ ID NO: 50999 - protein, 738 aa, Homo sapiens [sequence omitted]

SEQ ID NO: 51000 - protein, 624 aa, Homo sapiens
MNTRNKVKIKKKKHQKKYLDEIVQESWRKEYEEDDILASDDPSSIEQYENTRTYELQSKKDTETENPPVENTLSPKLEITEKWEKYWNEYGGGLLWQSWQEKHPGQALSSEPWNFPDTKEEWEQHYSQLYWYYLEQFQYWEAQGWTFDASQSCDTDTYTSKTEADDKNDEKCMKVDLVSFPSSPIMVDNDSSGTSDKDHSEILDGISNIKLNSEEVTQSQLDSCTSHDGHQQLSEVSSKRECPASGQSEPRNGGTNEESNSSGNTNTDPPAEDSQKSSGANTSKDRPHASGTDGDESEEDPPEHKPSKLKRSHELDIDENPASDFDDSGSLLGFKYGSGQKYGGIPNFSHRQVRYLEKNVKLKSKYLDMRRQIKMKNKHIFFTKESEKPFFKKSKILSKVEKFLTWVNKPMDEEASQESSSHDNVHDASTSSDSEEQDMSVKKGDDLLETNNPEPEKCQSVSSAGELETENYERDSLLATVPDEQDCVTQEVPDSRQAETEAEVKKKKNKKKNKKVNGLPPEIAAVPELAKYWAQRYRLFSRFDDGIKLDREGWFSVTPEKIAEHIAGRVSQSFKCDVVVDAFCGVGGNTIQFALTGMRDFLRRSLIILFIFFQEMLILTRWHP

SEQ ID NO: 51001 - protein, 360 aa, Homo sapiens [sequence omitted]

SEQ ID NO: 51002 - protein, 601 aa, Homo sapiens
MVHAEHVEGEDLQQEDGPTGEPQQEDDEFLMATDVDDRFETLEPEVSHEETEHSYHVEETVSQDCNQDMEEMMSEQENPDSSEPVVEDERLHHDTDDVTYQVYEEQAVYEPLENEGIEITEVTAPPEDNPVEDSQVIVEEVSIFPVEEQQEVPPETNRKTDDPEQKAKVKKKKPKLLNKFDKTIKAELDAAEKLRKRGKIEEAVNAFKELVRKYPQSPRARYGKAQCEDDLAEKRRSNEVLRGAIETYQEVASLPDVPADLLKLSLKRRSDRQQFLGHMRGSLLTLQRLVQLFPNDTSLKNDLGVGYLLIGDNDNAKKVYEEVLSVTPNDGFAKVHYGFILKAQNKIAESIPYLKEGIESGDPGTDDGRFYFHLGDAMQRVGNKEAYKWYELGHKRGHFASVWQRSLYNVNGLKAQPWWTPKETGYTELVKSLERNWKLIRDEGLAVMDKAKGLFLPEDENLREKGDWSQFTLWQQGRRNENACKGAPKTCTLLEKFPETTGCRRGQIKYSIMHPGTHVWPHTGPTNCRLRMHLGLVIPKEGCKIRCANETKTWEEGKVLIFDDSFEHEVWQDASSFRLIFIVDVWHPELTPQQRRSLPAI

SEQ ID NO: 51003 - protein, 156 aa, Homo sapiens [sequence omitted]

SEQ ID NO: 51004 - protein, 155 aa, Homo sapiens
MVHAEHVEGEDLQQEDGPTGEPQQEDDEFLMATDVDDRFETLEPEVSHEETEHSYHVEETVSQDCNQDMEEMMSEQENPDSSEPVVEDERLHHDTDDVTYQVYEEQVYEPLENEGIEITEVTAPPEDNPVEDSQVIVEEVSIFPVEEQQEVPPDT

SEQ ID NO: 51005 - protein, 72 aa, Homo sapiens
MSLETTGPQERQALSVLLLPWKKPAPTMPSATSKSSLRPPQKQMLSCFLYSCRTTYRWGHTPFYKEGSLSVK

SEQ ID NO: 51006 - protein, 106 aa, Homo sapiens
MNQPSSSFFSISPTSNSSATIARELLMNGTSSTAEAIGLKGSSPTPPCSPVQPSKQLEYLARIQGFQVHYCDRQSGKECVTCLTLAPVQMTFHAIGSSIEASHDQV

SEQ ID NO: 51007 - protein, 273 aa, Homo sapiens
MDLYEDYQSPFDFDAGVNKSYLYLSPSGNSSPPGSPTLQKFGLLRTDPVPEEGEDVAATISATETLSEEEQEELRRELAKVEEEIQTLSQVLAAKEKHLAEIKRKLGINSLQELKQNIAKGWQDVTATSAYKKTSETLSQAGQKASAAFSSVGSVITKKLEDVKNSPTFKSFEEKVENLKGSPKNVESFASMLRHSPLTQMGPAKDKLVIGRIFHIVENDLYIDFGGKFHCVCRRPEVDGESPISWYAVWRRFSQVMITCFSSNSDFGKHRKR

SEQ ID NO: 51008 - protein, 97 aa, Homo sapiens [sequence omitted]

SEQ ID NO: 51009 - protein, 142 aa, Homo sapiens
MLFATPPSSTYEKALGYFHRAEQVDPNFYSKNLLLLGKTYLKLHNKKLAAFWLMKAKDYPAHTEEDKQEPDSPRVTLVRDVSPLRVRPITENKPQESLTFSFPCSPHLIVLVWIPELTAGLRCLFPHVHVYQRFCVASPSAS

SEQ ID NO: 51010 - protein, 250 aa, Homo sapiens [sequence omitted]

SEQ ID NO: 51011 - protein, 49 aa, Homo sapiens
MFRIKRALDLNLKHQILPKEQWTKYEEKKTTLSLTCEMILLKLLSKSLI

SEQ ID NO: 51012 - protein, 39 aa, Homo sapiens
MFRIKRALDLNLKHQILPKEQWTKYEEVAQLYLPDSVAH

SEQ ID NO: 51013 - protein, 99 aa, Homo sapiens [sequence omitted]

SEQ ID NO: 51014 - protein, 30 aa, Homo sapiens
MSSLIRRVISTAKAPGAIGPYRLLKTWVKF

SEQ ID NO: 51015 - protein, 418 aa, Homo sapiens
MQQCDSPYVVKYYGSYFKNTDLWIVMEYCGAGSVSDIIRLRNKTLIEDEIATILKSTLKGLEYLHFMRKIHRDIKAGNILLNTEGHAKLADFGVAGQLTDTMAKRNTVIGTPFWMAPEVIQEIGYNCVADIWSLGITSIEMAEGKPPYADIHPMRAIFMIPTNPPPTFRKPELWSDDFTDFVKKCLVKNPEQRATATQLLQHPFIKNAKPVSILRDLITEAMEIKAKRHEEQQRELEEEEENSDEDELDSHTMVKTSVESVGTMRATSTMSEGAQTMIEHNSTMLESDLGTMVINSEDEEEEDGTMKRNATSPQVQRPSFMDYFDKQDFKNKSHENCNQNMHEPFPMSKNVFPDNWKVPQDGDFDFLKNLSLEELQMRLKALDPMMEREIEELRQRYTAKRQPILDAMDAKKRRQQNF

SEQ ID NO: 51016 - protein, 14 aa, Homo sapiens
MTFPSCAPRCLDRV

SEQ ID NO: 51017 - protein, 3987 aa, Homo sapiens [sequence omitted]

SEQ ID NO: 51018 - protein, 4012 aa, Homo sapiens
MSYVNRYIKNLKPSDLQLSLWGGDVVLSKLELKLDVLEQELKLPFTFLSGHIHELRIHVPWTKLGSEPVVITINTMECILKLKDGIQDDHESCGSNSTNRSTAESTKSSIKPRRMQQAAPTDPDLPPGYVQSLIRRVVNNVNIVINNLILKYVEDDIVLSVNITSAECYTVGELWDRAFMDISATDLVLRKVINFSDCTVCLDKRNASGKIEFYQDPLLYKCSFRTRLHFTYENLNSKMPSVIKIHTLVESLKLSITDQQLPMFIRIMQLGIALYYGEIGNFKEGEIEDLTCHNKDMLGNITGSEDETRIDMQYPAQHKGQELYSQQDEEQPQGWVSWAWSFVPAIVSYDDGEEDFVGNDPASTMHQQKAQTLKDPIVSIGFYCTKATVTFKLTEMQVESSYYSPQKVKSKEVLCWEQEGTTVEALMMGEPFFDCQIGFVGCRAMCLKGIMGVKDFEENMNRSETEACFFICGDNLSTKGFTYLTNSLFDYRSPENNGTRAEFILDSTHHKETYTEIAGMQRFGAFYMDYLYTMENTSGKGSTNQQDFSSGKSEDLGTVQEKSTKSLVIGPLDFRLDSSAVHRILKMIVCALEHEYEPYSRLKSDIKDENETILNPEEVALLEEYIPTRHTSVTLLKCTCTISMAEFNLLDHLLPVIMGEKNSSNFMNTTNFQSLRPLPSIRILVDKINLEHSVPMYAEQLVHVVSSLTQPSDNLLHYCYVHCYLKIFGFQAGLTSLDCSGSYCLPVPVIPSFSTALYGKLLKLPTCWTKRSQIAITEGIFELPNLTIQATRAQTLLLQAIYQSWSHLGNVSSSAVIEALINEIFLSIGVKSKNPLPTLEGSIQNVELKYCSTSLVKCASGTMGSIKICAKAPVDSGKEKLIPLLQGPSDTKDLHSTKWLNESRKPESLLAPDLMAFTIQVPQYIDYCHNSGAVLLCSIQGLAVNIDPILYTWLIYQPQKRTSRHMQQQPVVAVPLVMPVCRRKEDEVSIGSAPLAKQQSYQASEYASSPVKTKTVTESRPLSVPVKAMLNISESCRSPEERMKEFIGIVWNAVKHLTLQLEVQSCCVFIPNDSLPSPSTIVSGDIPGTVRSWYHGQTSMPGTLVLCLPQIKIISAGHKYMEPLQEIPFVIPRPILEEGDAFPWTISLHNFSIYTLLGKQVTLCLVEPMGCTSTLAVTSQKLLATGPDTRHSFVVCLHVDLESLEIKCSNPQVQLFYELTDIMNKVWNKIQKRGNLNLSPTSPETMAGPVPTSPVRSSIGTAPPDTSTCSPSADIGTTTEGDSIQAGEESPFSDSVTLEQTTSNIGGTSGRVSLWMQWVLPKITIKLFAPDPENKGTEVCMVSELEDLSASIDVQDVYTKVKCKIESFNIDHYRSSLGEECWSLGQCGGVFLSCTDKLNRRTLLVRPISKQDPFSNCSGFFPSTTTKLLDGTHQQHGFLSLTYTKAVTKNVRHKLTSRNERRSFHKLSEGLMDGSPHFLHEILLSAQAFDIVLYFPLLNAIASIFQAKLPKTQKEKRKSPGQPMRTHTLTSRNLPLIYVNTSVIRIFIPKTEEMQPTVEANQAAKEDTVVLKIGSVAMAPQADNPLGRSVLRKDIYQRALNLGILRDPGSEIEDRQYQIDLQSINIGTAQWHQLKPEKESVSGGVVTETERNSQNPALEWNMASSIRRHQERRAILTPVLTDFSVRITGAPAVIFTKVVSPENLHTEEILVCGHSLEVNITTNLDFFLSVAQVQLLHQLIVANMTGLEPSNKAAEISKQEQKKVDIFDGGMAETSSRYSGAQDSGIGSDSVKIRIVQIEQHSGASQHRIARPSRQSSIVKNLNFIPFDIFITASRISLMTYSCMALSKSKSQEQKNNEKTDKSSLNLPEVDSDVAKPNQACISTVTAEDLLRSSISFPSGKKIGVLSLESLHASTRSSARQALGITIVRQPGRRGTGDLQLEPFLYFIVSQPSLLLSCHHRKQRVEVSIFDAVLKGVASDYKCIDPGKTLPEALDYCTVWLQTVPGEIDSKSGIPPSFITLQIKDFLNGPADVNLDISKPLKANLSFTKLDQINLFLKKIKNAHSLAHSEETSAMSNTMVNKDDLPVSKYYRGKLSKPKIHGDGVQKISAQENMWRAVSCFQKISVQTTQIVISMETVPHTSKPCLLASLSNLNGSLSVKATQKVPGIILGSSFLLSINDFLLKTSLKERSRILIGPCCATANLEAKWCKHSGNPGPEQSIPKISIDLRGGLLQVFWGQEHLNCLVLLHELLNGYLNEEGNFEVQVSEPVPQMSSPVEKNQTFKSEQSSDDLRTGLFQYVQDAESLKLPGVYEVLFYNETEDCPGMMLWRYPEPRVLTLVRITPVPFNTTEDPDISTADLGDVLQVPCSLEYWDELQKVFVAFREFNLSESKVCELQLPDINLVNDQKKLVSSDLWRIVLNSSQNGADDQSSASESGSQSTCDPLVTPTALAACTRVDSCFTPWFVPSLCVSFQFAHLEFHLCHHLDQLGTAAPQYLQPFVSDRNMPSELEYMIVSFREPHMYLRQWNNGSVCQEIQFLAQADCKLLECRNVTMQSVVKPFSIFGQMAVSSDVVEKLLDCTVIVDSVFVNLGQHVVHSLNTAIQAWQQNKCPEVEELVFSHFVICNDTQETLRFGQVDTDENILLASLHSHQYSWRSHKSPQLLHICIEGWGNWRWSEPFSVDHAGTFIRTIQYRGRTASLIIKVQQLNGVQKQIIICGRQIICSYLSQSIELKVVQHYIGQDGQAVVREHFDCLTAKQKLPSYILENNELTELCVKAKGDEDWSRDVCLESKAPEYSIVIQVPSSNSSIIYVWCTVLTLEPNSQVQQRMIVFSPLFIMRSHLPDPIIIHLEKRSLGLSETQIIPGKGQEKPLQNIEPDLVHHLTFQAREEYDPSDCAVPISTSLIKQIATKVHPGGTVNQILDEFYGPEKSLQPIWPYNKKDSDRNEQLSQWDSPMRVKLSIWKPYVRTLLIELLPWALLINESKWDLWLFEGEKIVLQVPAGKIIIPPNFQEAFQIGIYWANTNTVHKSVAIKLVHNLTSPKWKDGGNGEVVTLDEEAFVDTEIRLGAFPGHQKLCQFCISSMVQQGIQIIQIEDKTTIINNTPYQIFYKPQLSVCNPHSGKEYFRVPDSATFSICPGGEQPAMKSSSLPCWDLMPDISQSVLDASLLQKQIMLGFSPAPGADSSQCWSLPAIVRPEFPRQSVAVPLGNFRENGFCTRAIVLTYQEHLGVTYLTLSEDPSPRVIIHNRCPVKMLIKENIKDIPKFEVYCKKIPSECSIHHELYHQISSYPDCKTKDLLPSLLLRVEPLDEVTTEWSDAIDINSQGTQVVFLTGFGYVYVDVVHQCGTVFITVAPEGKAGPILTNTNRAPEKIVTFKMFITQLSLAVFDDLTHHKASAELLRLTLDNIFLCVAPGAGPLPGEEPVAALFELYCVEICCGDLQLDNQLYNKSNFHFAVLVCQGEKAEPIQCSKMQSLLISNKELEEYKEKCFIKLCITLNEGKSILCDINEFSFELKPARLYVEDTFVYYIKTLFDTYLPNSRLAGHSTHLSGGKQVLPMQVTQHARALVNPVKLRKLVIQPVNLLVSIHASLKLYIASDHTPLSFSVFERGPIFTTARQLVHALAMHYAAGALFRAGWVVGSLDILGSPASLVRSIGNGVADFFRLPYEGLTRGPGAFVSGVSRGTTSFVKHISKGTLTSITNLATSLARNMDRLSLDEEHYNRQEEWRRQLPESLGEGLRQGLSRLGISLLGAIAGIVDQPMQNFQKTSEAQASAGHKAKGVISGVGKGIMGVFTKPIGGAAELVSQTGYGILHGAGLSQLPKQRHQPSDLHADQAPNSHVKYVWKMLQSLGRPEVHMALDVVLVRGSGQEHEGCLLLTSEVLFVVSVSEDTQQQAFPVTEIDCAQDSKQNNLLTVQLKQPRVACDVEVDGVRERLSEQQYNRLVDYITKTSCHLAPSCSSMQIPCPVVAAEPPPSTVKTYHYLVDPHFAQVFLSKFTMVKNKALRKGFP

SEQ ID NO: 51019 - protein, 76 aa, Homo sapiens
MVVPRSSNVLSEDQDSYLCNVTLFRKAVDDFRHKARENKFIVRDFQYNEEEMKADKEEMNRLSTDKKKQFVCVFNI

SEQ ID NO: 51020 - protein, 337 aa, Homo sapiens [sequence omitted]

SEQ ID NO: 51021 - protein, 634 aa, Homo sapiens
MFDPHKNDPLVQENGCEEYGIMCPMEEVMSAAMYKEILDSKIKESLPIDIDQLSGRDFCHSKKMTGSNTEEIDSRIRDAGNDSASTAPRSTEESLSEDVFTESELSPIREELVSSDELRQDKSSGASSESVQTVNQAEVESLTVKSESTGTPGHLRSDTEHSTNEVGTLCHKTDLNNLEMAIKEDQIADNFQGISGPKEDSTSIKGNSDQDSFLHENSLHQEESQKENMPCGETAEFKQKQSVNKGKQGKEQNQDSQTEAEELRKLWKTHTMQQTKQQRENIQQVSQKEAKHKITSADGHIESSALLKEKQRHRLHKFLCLRVGKPMRKTFVSQASATMQQYAQRDKKHEYWFAVPQERTDHLYAFFIQWSPEIYAEDTGEYTREPGFIVVKKIEESETIEDSSNQAAAREWEVVSVAEYHRRIDALNTEELRTLCRRLQITTREDINSKQVATVKADLESESFRPNLSDPSELLLPDQIEKLTKHLPPRTIGYPWTLVYGTGKHGTSLKTLYRTMTGLDTPVLMVIKDSDGQVFGALASEPLKVSDGFYGTGETFVFTFCPEFEVFKWTGDNMFFIKGDMDSLAFGGGGGEFALWLDGDLYHGRSHSCKTFGNRTLSKKEDFFIQDIEIWAFE

SEQ ID NO: 51022 - protein, 607 aa, Homo sapiens
MFDPHKNDPLVQENGCEEYGIMCPMEEVMSAAMYKEILDSKIKESLPIDIDQLSGRDFCHSKKMTGSNTEEIDSRIRDAGNDSASTAPRSTEESLSEDVFTESELSPIREELVSSDELRQDKSSGASSESVQTVNQAEVESLTVKSESTGTPGHLRSDTEHSTNEVGTLCHKTDLNNLEMAIKEDQIADNFQGISGPKEDSTSIKGNSDQDSFLHENSLHQEESQKENMPCGETAEFKQKQSVNKGKQGKEQNQDSQTEAEELRKLWKTHTMQQTKQQRENIQQVSQKEAKHKITSADGHIESSALLKEKQRHRLHKFLCLRVGKPMRKTFVSQASATMQQYAQRDKKHEYWFAVPQERTDHLYAFFIQWSPEIYAEDTGEYTREPGFIVVKKIEESETIEDSSNQAAAREWEITTREDINSKQVATVKADLESESFRPNLSDPSELLLPDQIEKLTKHLPPRTIGYPWTLVYGTGKHGTSLKTLYRTMTGLDTPVLMVIKDSDGQVFGALASEPLKVSDGFYGTGETFVFTFCPEFEVFKWTGDNMFFIKGDMDSLAFGGGGGEFALWLDGDLYHGRSHSCKTFGNRTLSKKEDFFIQDIEIWAFE

SEQ ID NO: 51023 - protein, 386 aa, Homo sapiens
MAQIQQNAVQNHTATMLEIGTSLLSQTAEQTRKLTDVETQVLNQTSRLEIQLLENSLSTYKLEKQLLQQTNEILKIHEKNSLLEHKILEMEGKHKEELDTLKEEKENLQGLVTRQTYIIQELEKQLNRATTNNSVLQKQQLELMDTVHNLVNLCTKEVLLKGGKREEEKPFRDCADVYQAGFNKSGIYTIYINNMPEPKKVFCNMDVNGGGWTVIQHREDGSLDFQRGWKEYKMGFGNPSGEYWLGNEFIFAITSQRQYMLRIELMDWEGNRAYSQYDRFHIGNEKQNYRLYLKGHTGTAGKQSSLILHGADFSTKDADNDNCMCKCALMLTGGWWFDACGPSNLNGMFYTAGQNHGKLNGIKWHYFKGPSYSLRSTTMMIRPLDF

SEQ ID NO: 51024 - protein, 387 aa, Homo sapiens [sequence omitted]

SEQ ID NO: 51025 - protein, 28 aa, Homo sapiens
MAKVSELYDVTWEVPRSGLAHRHLGNIS

SEQ ID NO: 51026 - protein, 252 aa, Homo sapiens
MEMMRSLRHVNIDHLHVGWYQSTYYGSFVTRALLDSQFSYQHAIEESVVLIYDPIKTAQGSLSLKAYRLTPKLMEVCKEKDFSPEALKKANITFEYMFEEVPIVIKNSHLINVLMWELEKKSAVADKHELLSLASSNHLGKNLQLLMDRVDEMSQDIVKYNTYMRNTSKQQQQKHQYQQRRQQENMQRQSRGEPPLPEEDLSKLFKPPQPPARMDSLLIAGQINTYCQNIKEFTAQNLGKLFMAQALQEYNN

SEQ ID NO: 51027 - protein, 168 aa, Homo sapiens [sequence omitted]

SEQ ID NO: 51028 - protein, 249 aa, Homo sapiens
MDFTPAPLEDTSSRPQFCKWPCECPPSPPRCPLGVSLITDGCECCKMCAQQLGDNCTEAAICDPHRGLYCDYSGDRPRYAIGVCAHAVGEVEAWHRNCIAYTSPWSPCSTSCGLGVSTRISNVNAQCWPEQESRLCNLRPCDVDIHTLIKAGKKCLAVYQPEASMNFTLAGCISTRSYQPKYCGVCMDNRCCIPYKSKTIDVSFQCPDGLGFSRQVLWINACFCNLSCRNPNDIFADLESYPDFSEIAN

SEQ ID NO: 51029 - protein, 336 aa, Homo sapiens
MDFTPAPLEDTSSRPQFCKWPCECPPSPPRCPLGVSLITDGCECCKMCAQQLGDNCTEAAICDPHRGLYCDYSGDRPRYAIGVCAQVVGVGCVLDGVRYNNGQSFQPNCKYNCTCIDGAVGCTPLCLRVRPPRLWCPHPRRVSIPGHCCEQWVCEDDAKRPRKTAPRDTGAFDAVGEVEAWHRNCIAYTSPWSPCSTSCGLGVSTRISNVNAQCWPEQESRLCNLRPCDVDIHTLIKAGKKCLAVYQPEASMNFTLAGCISTRSYQPKYCGVCMDNRCCIPYKSKTIDVSFQCPDGLGFSRQVLWINACFCNLSCRNPNDIFADLESYPDFSEIAN

SEQ ID NO: 51030 - protein, 955 aa, Homo sapiens
MEMLLMSGYELRIRYLPKGFLNQFTEDKPTLNFFYQQVKSDYMLEIADQVDQEIALKLGCLEIRRSYWEMRGNALEKKSNYEVLEKDVGLKRFFPKSLLDSVKAKTLRKLIQQTFRQFANLNREESILKFFEILSPVYRFDKECFKCALGSSWIISVELAIGPEEGISYLTDKGCNPTHLADFTQVQTIQYSNSEDKDRKGMLQLKIAGAPEPLTVTAPSLTIAENMADLIDGYCRLVNGTSQSFIIRPQKEGERALPSIPKLANSEKQGMRTHAVSVSDEISGDETDDYAEIIDEEDTYTMPSKSYGIDEARDYEIQRERIELGRCIGEGQFGDVHQGIYMSPENPALAVAIKTCKNCTSDSVREKFLQEALTMRQFDHPHIVKLIGVITENPVWIIMELCTLGELRSFLQVRKYSLDLASLILYAYQLSTALAYLESKRFVHRDIAARNVLVSSNDCVKLGDFGLSRYMEDSTYYKASKGKLPIKWMAPESINFRRFTSASDVWMFGVCMWEILMHGVKPFQGVKNNDVIGRIENGERLPMPPNCPPTLYSLMTKCWAYDPSRRPRFTELKAQLSTILEEEKAQQEERMRMESRRQATVSWDSGGSDEAPPKPSRPGYPSPRSSEGFYPSPQHMVQTNHYQVSGYPGSHGITAMAGSIYPGQASLLDQTDSWNHRPQEIAMWQPNVEDSTVLDLRGIGQVLPTHLMEERLIRQQQEMEEDQRWLEKEERFLKPDVRLSRGSIDREDGSLQGPIGNQHIYQPVGKPDPAAPPKKPPRPGAPGHLGSLASLSSPADSYNEGVKPWRLQPQEISPPPTANLDRSNDKVYENVTGLVKAVIEMSSKIQPAPPEEYVPMVKEVGLALRTLLATVDETIPLLPASTHREIEMAQKLLNSDLGELINKMKLAQQYVMTSLQQEYKKQMLTAAHALAVDAKNLLDVIDQARLKMLGQTRPH

SEQ ID NO: 51031 - protein, 647 aa, Homo sapiens
MPSTRDYEIQRERIELGRCIGEGQFGDVHQGIYMSPENPALAVAIKTCKNCTSDSVREKFLQEALTMRQFDHPHIVKLIGVITENPVWIIMELCTLGELRSFLQVRKYSLDLASLILYAYQLSTALAYLESKRFVHRDIAARNVLVSSNDCVKLGDFGLSRYMEDSTYYKASKGKLPIKWMAPESINFRRFTSASDVWMFGVCMWEILMHGVKPFQGVKNNDVIGRIENGERLPMPPNCPPTLYSLMTKCWAYDPSRRPRFTELKAQLSTILEEEKAQQEERMRMESRRQATVSWDSGGSDEAPPKPSRPGYPSPRSSEGFYPSPQHMVQTNHYQVSGYPGSHGITAMAGSIYPGQASLLDQTDSWNHRPQEIAMWQPNVEDSTVLDLRGIGQVLPTHLMEERLIRQQQEMEEDQRWLEKEERFLKPDVRLSRGSIDREDGSLQGPIGNQHIYQPVGKPDPAAPPKKPPRPGAPGHLGSLASLSSPADSYNEGVKPWRLQPQEISPPPTANLDRSNDKVYENVTGLVKAVIEMSSKIQPAPPEEYVPMVKEVGLALRTLLATVDETIPLLPASTHREIEMAQKLLNSDLGELINKMKLAQQYVMTSLQQEYKKQMLTAAHALAVDAKNLLDVIDQARLKMLGQTRPH

SEQ ID NO: 51032 - protein, 1030 aa, Homo sapiens [sequence omitted]

SEQ ID NO: 51033 - protein, 514 aa, Homo sapiens [sequence omitted]

SEQ ID NO: 51034 - protein, 154 aa, Homo sapiens
MRILVTGGSGLVGKAIQKVVADGAGLPGEDWVFVSSKDADLTDTAQTRALFEKVQPTHVIHLAAMVGGLFRNIKYNLDFWRKNVHMNDNVLHSAFEVGARKVVSCLSTCIFPDKTTYPIDETMIHNGPPHNSNFGYSYAKRMIDVQNRSSRPSC

SEQ ID NO: 51035 - protein, 127 aa, Homo sapiens
MGLALYVLPVLGQHVATQHFPVAEAEAVVLTLLAIYAAGLALPHNTHRVVSTQAPDRGWMALKLVALIYLALQLGCIALTNFSLGFLLATTMVPTAALAKPHGPRYVWISPTSPNACALITDRTLIQ

SEQ ID NO: 51036 - protein, 394 aa, Homo sapiens
MLILSNARLFLENLIKYGILVDPIQVVSLFLKDPYSWPAPCLVIAANVFAVAAFQVEKRLAVGALTEQAGLLLHVANLATILCFPAAVVLLVESITPVGSLLALMAHTILFLKLFSYRDVNSWCRRARAKAASAGKKASSAAAPHTVSYPDNLTYRDLYYFLFAPTLCYELNFPRSPRIRKRFLLRRILEMLFFTQLQVGLIQQWMVPTIQNSMKPFKDMDYSRIIERLLKLAVPNHLIWLIFFYWLFHSCLNAVAELMQFGDREFYRDWWNSESVTYFWQNWNIPVHKWCIRHFYKPMLRRGSSKWMARTGVFLASAFFHEYLVSVPLRMFRLWAFTGMMAQIPLAWFVGRFFQGNYGNAAVWLSLIIGQPIAVLMYVHDYYVLNYEAPAAEA

SEQ ID NO: 51037 - protein, 1299 aa, Homo sapiens
MEDYPAALQHQHQYLELAHSLRNHTELQRAWATIGRTHLDIYDHCQSRDALLQAQAAFEKSLAIVDEELEGTLAQGELNEMRTRLYLNLGLTFESLQQTALCNDYFRKSIFLAEQNHLYEDLFRARYNLGTIHWRAGQHSQAMRCLEGARECAHTMRKRFMESECCVVIAQVLQDLGDFLAAKRALKKAYRLGSQKPVQRAAICQNLQHVLAVVRLQQQLEEAEGRDPQGAMVICEQLGDLFSKAGDFPRAAEAYQKQLRFAELLDRPGAERAIIHVSLATTLGDMKDHHGAVRHYEEELRLRSGNVLEEAKTWLNIALSREEAGDAYELLAPCFQKALSCAQQAQRPQLQRQVLQHLHTVQLRLQPQEAPETETRLRELSVAEDEDEEEEAEEAAATAESEALEAGEVELSEGEDDTDGLTPQLEEDEELQGHLGRRKGSKWNRRNDMGETLLHRACIEGQLRRVQDLVRQGHPLNPRDYCGWTPLHEACNYGHLEIVRFLLDHGAAVDDPGGQGCEGITPLHDALNCGHFEVAELLLERGASVTLRTRKGLSPLETLQQWVKLYRRDLDLETRQKARAMEMLLQAAASGQDPHSSQAFHTPSSLLFDPETSPPLSPCPEPPSNSTRLPEASQAHVRVSPGQAAPAMARPRRSRHGPASSSSSSEGEDSAGPARPSQKRPRCSATAQRVAAWTPGPASNREAATASTSRAAYQAAIRGVGSAQSRLGPGPPRGHSKALAPQAALIPEEECLAGDWLELDMPLTRSRRPRPRGTGDNRRPSSTSGSDSEESRPRARAKQVRLTCMQSCSAPVNAGPSSLASEPPGSPSTPRVSEPSGDSSAAGQPLGPAPPPPIRVRVQVQDHLFLIPVPHSSDTHSVAWLAEQAAQRYYQTCGLLPRLTLRKEGALLAPQDLIPDVLQSNDEVLAEVTSWDLPPLTDRYRRACQSLGQGEHQQVLQAVELQGLGLSFSACSLALDQAQLTPLLRALKLHTALRELRLAGNRLGDKCVAELVAALGTMPSLALLDLSSNHLGPEGLRQLAMGLPGQATLQSLEELDLSMNPLGDGCGQSLASLLHACPLLSTLRLQACGFGPSFFLSHQTALGSAFQDAEHLKTLSLSYNALGAPALARTLQSLPAGTLLHLELSSVAAGKGDSDLMEPVFRYLAKEGCALAHLTLSANHLGDKAVRDLCRCLSLCPSLISLDLSANPEISCASLEELLSTLQKRPQGLSFLGLSGCAVQGPLGLGLWDKIAAQLRELQLCSRRLCAEDRDALRQLQPSRPGPGECTLDHGSKLFFRRL

SEQ ID NO: 51038 - protein, 624 aa, Homo sapiens
MYSQNTGGNYFDTQGSSAQVTTVVSSHSMVGTGGIQMGVTGGQLISSSGGTYLIGNSMENSGHSVTHTTRASPATIEMAIETLQKSDGLSTHRSSLLNSHLQWLLDNYETAEGVSLPRSTLYNHYLRHCQEHKLDPVNAASFGKLIRSIFMGLRTRRLGTRGNSKYHYYGIRVKPDSPLNRLQEDMQYMAMRQQPMQQKQRYKPMQKVDGVADGFTGSGQQTGTSVEQTVIAQSQHHQQFLDASRALPEFGEVEISSLPDGTTFEDIKSLQSLYREHCEAILDVVVNLQFSLIEKLWQTFWRYSPSTPTDGTTITESSNLSEIESRLPKAKLITLCKHESILKWMCNCDHGMYQALVEILIPDVLRPIPSALTQAIRNFAKSLEGWLSNAMNNIPQRMIQTKVAAVSAFAQTLRRYTSLNHLAQAARAVLQNTSQINQMLSDLNRVDFANVQEQASWVCQCDDNMVQRLETDFKMTLQQQSTLEQWAAWLDNVMMQALKPYEGRPSFPKAARQFLLKWSFYSSMVIRDLTLRSAASFGSFHLIRLLYDEYMFYLVEHRVAQATGETPIAVMGEVREAERAVTHWVIKNKPELHFSLNTLLIKTMVPNQVSLRARRDCGVIARVP

SEQ ID NO: 51039 - protein, 1049 aa, Homo sapiens
MFALMSETERIWYPPNHVFHIDESTRHNVLYRIRFYFPRWYCSGSNRAYRHGISRGAEAPLLDDFVMSYLFAQWRHDFVHGWIKVPVTHETQEECLGMAVLDMMRIAKENDQTPLAIYNSISYKTFLPKCIRAKIQDYHILTRKRIRYRFRRFIQQFSQCKATARNLKLKYLINLETLQSAFYTEKFEVKEPGSGPSGEEIFATIIITGNGGIQWSRGKHKESETLTEQDLQLYCDFPNIIDVSIKQANQEGSNESRVVTIHKQDGKNLEIELSSLREALSFVSLIDGYYRLTADAHHYLCKEVAPPAVLENIQSNCHGPISMDFAISKLKKAGNQTGLYVLRCSPKDFNKYFLTFAVERENVIEYKHCLITKNENEEYNLSGTKKNFSSLKDLLNCYQMETVRSDNIIFQFTKCCPPKPKDKSNLLVFRTNGVSDVPTSPTLQRPTHMNQMVFHKIRNEDLIFNESLGQGTFTKIFKGVRREVGDYGQLHETEVLLKVLDKAHRNYSESFFEAASMMSKLSHKHLVLNYGVCVCGDENILVQEFVKFGSLDTYLKKNKNCINILWKLEVAKQLAWAMHFLEENTLIHGNVCAKNILLIREEDRKTGNPPFIKLSDPGISITVLPKDILQERIPWVPPECIENPKNLNLATDKWSFGTTLWEICSGGDKPLSALDSQRKLQFYEDRHQLPAPKWAELANLINNCMDYEPDFRPSFRAIIRDLNSLFTPDYELLTENDMLPNMRIGALGFSGAFEDRDPTQFEERHLKFLQQLGKGNFGSVEMCRYDPLQDNTGEVVAVKKLQHSTEEHLRDFEREIEILKSLQHDNIVKYKGVCYSAGRRNLKLIMEYLPYGSLRDYLQKHKERIDHIKLLQYTSQICKGMEYLGTKRYIHRDLATRNILVENENRVKIGDFGLTKVLPQDKEYYKVKEPGESPIFWYAPESLTESKFSVASDVWSFGVVLYELFTYIEKSKSPPAEFMRMIGNDKQGQMIVFHLIELLKNNGRLPRPDGCPDEIYMIMTECWNNNVNQRPSFRDLALRVDQIRDNMAG

SEQ ID NO: 51040 - protein, 579 aa, Homo sapiens
MNVKDLRPRARTILKWNELNVGDVVMVNYNVESPGQRGFWFDAEITTLKTISRTKKELRVKIFLGGSEGTLNDCKIISVDEIFKIERPGAHPLSFADGKFLRRNDPECDLCGGDPEKKCHSCSCRVCGGKHEPNMQLLCDECNVAYHIYCLNPPLDKVPEEEYWYCPSCKTDSSEVVKAGERLKMSKKKAKMPSASTESRRDWGRGMACVGRTRECTIVPSNHYGPIPGIPVGSTWRFRVQVSEAGVHRPHVGGIHGRSNDGAYSLVLAGGFADEVDRGDEFTYTGSGGKNLAGNKRIGAPSADQTLTNMNRALALNCDAPLDDKIGAESRNWRAGKPVRVIRSFKGRKISKYAPEEGNRYDGIYKVVKYWPEISSSHGFLVWRYLLRRDDVEPAPWTSEGIERSRRLCLRLQYPAGYPSDKEGKKPKGQSKKQPSGTTKRPISDDDCPSASKVYKASDSAEAIEAFQLTPQQQHLIREDCQNQKLWDEVLSHLVEGPNFLKKLEQSFMCVCCQELVYQPVTTECFHNVCKDCLQRSFKAQVFSCPACRHDLGQNYIMIPNEILQTLLDLFFPGYSKGR

SEQ ID NO: 51041 - protein, 181 aa, Homo sapiens
MTLVKQQAPSDEELPEVLSIEEEVEETESWAKPLIHLWQTKSPNFAAEQEYNATVARMKPHCAICTLLMPYHKPDSSNEENDARWETKLDEVVTSEGKTKPLIPEMCFIYSEENIEYSPPNAFLEEDGTSLLISCAKCCVRVHASKWIYNSSITGFSAFHIIFISHFFGTCQICCMDYWHS

SEQ ID NO: 51042 - protein, 1942 aa, Homo sapiens
MAQGRHVEVFELLKPPSGGLGFSVVGLRSENRGELGIFVQEIQEGSVAHRDGRLKETDQILAINGQALDQTITHQQAISILQKAKDTVQLVIARGSLPQLVSPIVSRSPSAASTISAHSNPVHWQHMETIELVNDGSGLGFGIIGGKATGVIVKTILPGGVADQHGRLCSGDHILKIGDTDLAGMSSEQVAQVLRQCGNRVKLMIARGAIEERTAPTALGITLSSSPTSTPELRVDASTQKGEESETFDVELTKNVQGLGITIAGYIGDKKLEPSGIFVKSITKSSAVEHDGRIQIGDQIIAVDGTNLQGFTNQQAVEVLRHTGQTVLLTLMRRGMKQEAELMSREDVTKDADLSPVNASIIKENYEKDEDFLSSTRNTNILPTEEEGYPLLSAEIEEIEDAQKQEAALLTKWQRIMGINYEIVVAHVSKFSENSGLGISLEATVGHHFIRSVLPEGPVGHSGKLFSGDELLEVNGITLLGENHQDVVNILKELPIEVTMVCCRRTVPPTTQSELDSLDLCDIELTEKPHVDLGEFIGSSETEDPVLAMTDAGQSTEEVQAPLAMWEAGIQHIELEKGSKGLGFSILDYQDPIDPASTVIIIRSLVPGGIAEKDGRLLPGDRLMFVNDVNLENSSLEEAVEALKGAPSGTVRIGVAKPLPLSPEEGYVSAKEDSFLYPPHSCEEAGLADKPLFRADLALVGTNDADLVDESTFESPYSPENDSIYSTQASILSLHGSSCGDGLNYGSSLPSSPPKDVIENSCDPVLDLHMSLEELYTQNLLQRQDENTPSVDISMGPASGFTINDYTPANAIEQQYECENTIVWTESHLPSEVISSAELPSVLPDSAGKGSEYLLEQSSLACNAECVMLQNVSKESFERTINIAKGNSSLGMTVSANKDGLGMIVRSIIHGGAISRDGRIAIGDCILSINEESTISVTNAQARAMLRRHSLIGPDIKITYVPAEHLEEFKISLGQQSGRVMALDIFSSYTGRDIPELPEREEGEGEESELQNTAYSNWNQPRRVELWREPSKSLGISIVGGRGMGSRLSNGEVMRGIFIKHVLEDSPAGKNGTLKPGDRIVEVDGMDLRDASHEQAVEAIRKAGNPVVFMVQSIINRPRKSPLPSLLHNLYPKYNFSSTNPFADSLQINADKAPSQSESEPEKAPLCSVPPPPPSAFAEMGSDHTQSSASKISQDVDKEDEFGYSWKNIRERYGTLTGELHMIELEKGHSGLGLSLAGNKDRSRMSVFIVGIDPNGAAGKDGRLQIADELLEINGQILYGRSHQNASSIIKCAPSKVKIIFIRNKDAVNQMAVCPGNAVEPLPSNSENLQNKETEPTVTTSDAAVDLSSFKNVQHLELPKDQGGLGIAISEEDTLSGVIIKSLTEHGVAATDGRLKVGDQILAVDDEIVVGYPIEKFISLLKTAKMTVKLTIHAENPDSQAVPSAAGAASGEKKNSSQSLMVPQSGSPEPESIRNTSRSSTPAIFASDPATCPIIPGCETTIEISKGRTGLGLSIVGGSDTLLGAIIIHEVYEEGAACKDGRLWAGDQILEVNGIDLRKATHDEAINVLRQTPQRVRLTLYRDEAPYKEEEVCDTLTIELQKKPGKGLGLSIVGKRNDTGVFVSDIVKGGIADADGRLMQGDQILMVNGEDVRNATQEAVAALLKCSLGTVTLEVGRIKAGPFHSERRPSQSSQVSEGSLSSFTFPLSGSSTSESLESSSKKNALASEIQGLRTVEMKKGPTDSLGISIAGGVGSPLGDVPIFIAMMHPTGVAAQTQKLRVGDRIVTICGTSTEGMTHTQAVNLLKNASGSIEMQVVAGGDVSVVTGHQQEPASSSLSFTGLTSSSIFQDDLGPPQCKSITLERGPDGLGFSIVGGYGSPHGDLPIYVKTVFAKGAASEDGRLKRGDQIIAVNGQSLEGVTHEEAVAILKRTKGTVTLMVLS

SEQ ID NO: 51043 - protein, 1909 aa, Homo sapiens
MAQGRHVEVFELLKPPSGGLGFSVVGLRSENRGELGIFVQEIQEGSVAHRDGRLKETDQILAINGQALDQTITHQQAISILQKAKDTVQLVIARGSLPQLVSPIVSRSPSAASTISAHSNPVHWQHMETIELVNDGSGLGFGIIGGKATGVIVKTILPGGVADQHGRLCSGDHILKIGDTDLAGMSSEQVAQVLRQCGNRVKLMIARGAIEERTAPTALGITLSSSPTSTPELRVDASTQKGEESETFDVELTKNVQGLGITIAGYIGDKKLEPSGIFVKSITKSSAVEHDGRIQIGDQIIAVDGTNLQGFTNQQAVEVLRHTGQTVLLTLMRRGMKQEAELMSREDVTKDADLSPVNASIIKENYEKDEDFLSSTRNTNILPTEEEGYPLLSAEIEEIEDAQKQEAALLTKWQRIMGINYEIVVAHVSKFSENSGLGISLEATVGHHFIRSVLPEGPVGHSGKLFSGDELLEVNGITLLGENHQDVVNILKELPIEVTMVCCRRTVPPTTQSELDSLDLCDIELTEKPHVDLGEFIGSSETEDPVLAMTDAGQSTEEVQAPLAMWEAGIQHIELEKGSKGLGFSILDYQDPIDPASTVIIIRSLVPGGIAEKDGRLLPGDRLMFVNDVNLENSSLEEAVEALKGAPSGTVRIGVAKPLPLSPEEGYVSAKEDSFLYPPHSCEEAGLADKPLFRADLALVGTNDADLVDESTFESPYSPENDSIYSTQASILSLHGSSCGDGLNYGSSLPSSPPKDVIENSCDPVLDLHMSLEELYTQNLLQRQDENTPSVDISMGPASGFTINDYTPANAIEQQYECENTIVWTESHLPSEVISSAELPSVLPDSAGKGSEYLLEQSSLACNAECVMLQNVSKESFERTINIAKGNSSLGMTVSANKDGLGMIVRSIIHGGAISRDGRIAIGDCILSINEESTISVTNAQARAMLRRHSLIGPDIKITYVPAEHLEEFKISLGQQSGRVMALDIFSSYTGRDIPELPEREEGEGEESELQNTAYSNWNQPRRVELWREPSKSLGISIVGGRGMGSRLSNGEVMRGIFIKHVLEDSPAGKNGTLKPGDRIVEVDGMDLRDASHEQAVEAIRKAGNPVVFMVQSIINRPRAPSQSESEPEKAPLCSVPPPPPSAFAEMGSDHTQSSASKISQDVDKEDEFGYSWKNIRERYGTLTGELHMIELEKGHSGLGLSLAGNKDRSRMSVFIVGIDPNGAAGKDGRLQIADELLEINGQILYGRSHQNASSIIKCAPSKVKIIFIRNKDAVNQMAVCPGNAVEPLPSNSENLQNKETEPTVTTSDAAVDLSSFKNVQHLELPKDQGGLGIAISEEDTLSGVIIKSLTEHGVAATDGRLKVGDQILAVDDEIVVGYPIEKFISLLKTAKMTVKLTIHAENPDSQAVPSAAGAASGEKKNSSQSLMVPQSGSPEPESIRNTSRSSTPAIFASDPATCPIIPGCETTIEISKGRTGLGLSIVGGSDTLLGAIIIHEVYEEGAACKDGRLWAGDQILEVNGIDLRKATHDEAINVLRQTPQRVRLTLYRDEAPYKEEEVCDTLTIELQKKPGKGLGLSIVGKRNDTGVFVSDIVKGGIADADGRLMQGDQILMVNGEDVRNATQEAVAALLKCSLGTVTLEVGRIKAGPFHSERRPSQSSQVSEGSLSSFTFPLSGSSTSESLESSSKKNALASEIQGLRTVEMKKGPTDSLGISIAGGVGSPLGDVPIFIAMMHPTGVAAQTQKLRVGDRIVTICGTSTEGMTHTQAVNLLKNASGSIEMQVVAGGDVSVVTGHQQEPASSSLSFTGLTSSSIFQDDLGPPQCKSITLERGPDGLGFSIVGGYGSPHGDLPIYVKTVFAKGAASEDGRLKRGDQIIAVNGQSLEGVTHEEAVAILKRTKGTVTLMVLS

SEQ ID NO: 51044 - protein, 229 aa, Homo sapiens
MLKGQHEKEAADRKRKQEEQMETEQQNKDEGKKPEVKKVEKKRETSMDSRLQRIHAEIKNSLKIDNLDVNRCIEALDELASLQVTMQQAQKHTEMITTLKKIRRFKVSQVIMEKSTMLYNKFKNMFLVGEGDSVITQVLNKSLAEQRQHEEANKTKDQGKKGPNKKLEKEQTGSKTLNGGSDAQDGNQPQHNGESNEDSKDNHEASTKKKPSSEERETEISLKDSTLDN

SEQ ID NO: 51045 - protein, 47 aa, Homo sapiens
MKGYPHWPARVDEVPDGAVKPPTNKLPIFFFGTHETLLGGRDLPCLR

SEQ ID NO: 51046 - protein, 16 aa, Homo sapiens
MTDPPGAPPPALAGRG

SEQ ID NO: 51047 - protein, 168 aa, Homo sapiens
MREGPAKNMVKQKALRVLKQKRMYEQQRDNLAQQSFNMEQANYTIQSLKDTKTTVDAMKLGVKEMKKAYKQVKIDQIEDLQDQLEDMMEDANEIQEALSRSYGTPELDEDDLEAELDALGDELLADEDSSYLDEAASAPAIPEGVPTDTKNKDGVLVDEFGLPQIPAS

SEQ ID NO: 51048 - protein, 167 aa, Homo sapiens
MEEIDRFQVPTAHSEMQPLDPAAASISDGDCDAREEKQRELARKGSLKNGSMGSPVNQQPKKNNVMARTRLVVPNKGYSSLDQSPDEKPLVALDTDSDDDFDMSRYSSSGYSSAEQINQDLNIQLLKDGYRLDEIPDDEDLDLIPPKSVNPTCMCCQATSSTACHIQ

SEQ ID NO: 51049 - protein, 184 aa, Homo sapiens
MEEIDRFQVPTAHSEMQPLDPAAASISDGDCDAREGESVAMNYKPSPLQVKLEKQRELARKGSLKNGSMGSPVNQQPKKNNVMARTRLVVPNKGYSSLDQSPDEKPLVALDTDSDDDFDMSRYSSSGYSSAEQINQDLNIQLLKDGYRLDEIPDDEDLDLIPPKSVNPTCMCCQATSSTACHIQ

SEQ ID NO: 51050 - protein, 101 aa, Homo sapiens [sequence omitted]

SEQ ID NO: 51051 - protein, 364 aa, Homo sapiens
MGNPQRALLYLVAALKEGSAWGPPLLEASRLYQQLGDTTAELESLELLVEALNVPCSSKAPQFLIEVELLLPPPDLASPLHCGTQSQTKHILASRCLQTGRAGDAAEHYLDLLALLLDSSEPRFSPPPSPPGPCMPEVFLEAAVALIQAGRAQDALTLCEELLSRTSSLLPKMSRLWEDARKGTKELPYCPLWVSATHLLQGQAWVQLGAQKVAISEFSRCLELLFRATPEEKEQGAAFNCEQGCKSDAALQQLRAAALISRGLEWVASGQDTKALQDFLLSVQMCPGNRDTYFHLLQTLKRLDRRDEATALWWRLEAQTKGSHEDALWSLPLYLESYLSWIRPSDRDAFLEEFRTSLPKSCDL

SEQ ID NO: 51052 - protein, 117 aa, Homo sapiens
MYVNSIHGFYRLSYLQIFSSKSESRLKHLLQRAPDYCPETMVEIWNCMNSSLPGVFKKSDGWVGLGCCELAIALECRQACKQASSKNDISKVCRKEYEPVLRYFSVLPSLVWISALP

SEQ ID NO: 51053 - protein, 113 aa, Homo sapiens
MERLEALDANSRKQEAEWKEKAIKELEEWYARQDEQLQKTKANNSTNINHPCYSLEQAAEEAFVNDIDESSPGTEWERVARLCDFNPKSSKQAKDVSRMRSVLISLKQAPLVH

SEQ ID NO: 51054 - protein, 618 aa, Homo sapiens
MNFSNIMNYMKLLGQSDLPRIKTEIEALKNLRHQHICQLYHVLETANKIFMVLEYCPGGELFDYIISQDRLSEEETRVVFRQIVSAVAYVHSQGYAHRDLKPENLLFDEYHKLKLIDFGLCAKPKGNKDYHLQTCCGSLAYAAPELIQGKSYLGSEADVWSMGILLYVLMCGFLPFDDDNVMALYKKIMRGKYDVPKWLSPSSILLLQQMLQVDPKKRISMKNLLNHPWIMQDYNYPVEWQSKNPFIHLDDDCVTELSVHHRNNRQTMEDLISLWQYDHLTATYLLLLAKKARGKPVRLRLSSFSCGQASATPFTDIKSNNWSLEDVTASDKNYVAGLIDYDWCEDDLSTGAATPRTSQFTKYWTESNGVESKSLTPALCRTPANKLKNKENVYTPKSAVKNEEYFMFPEPKTPVNKNQHKREILTTPNRYTTPSKARNQCLKETPIKIPVNSTGTDKLMTGVISPERRCRSVELDLNQAHMEETPKRKGAKVFGSLERGLDKVITVLTRSKRKGSARDGPRRLKLHYNVTTTRLVNPDQLLNEIMSILPKKHVDFVQKGYTLKCQTQSDFGKVTMQFELEVCQLQKPDVVGIRRQRLKGDAWVYKRLVEDILSSCKV

SEQ ID NO: 51055 - protein, 616 aa, Homo sapiens [sequence omitted]

SEQ ID NO: 51056 - protein, 618 aa, Homo sapiens [sequence omitted]

SEQ ID NO: 51057 - protein, 635 aa, Homo sapiens
MNKFCRSRVPAIRYKDVTFQLCKALKGCLSISSVLKNLELNGLILRERDLTILAKGLNKSASLVHLSLANCPIGDGGLEIICQGIKSSITLKTVNFTGCNLTWQGADHMAKILKYQTMRRHEETWAESLRYRRPDLDCMAGLRRITLNCNTLIGDLGACAFADSLSEDLWLRALDLQQCGLTNEGAKALLEALETNTTLVVLDIRKNPLIDHSMMKAVIKKVLQNGRSAKSEYQWITSPSVKEPSKTAKQKRRTIILGSGHKGKATIRIVGLATKKPVSSGRKHSLGKEYYAPAPLPPGVSGFLPWRTAERAKRHRGFPLIKTRDICNQLQQPGFPVTVTVESPSSSEVEEVDDSSESVHEVPEKTSIEQEALQEKLEECLKQLKEERVIRLKVDKRVSELEHENAQLRNINFSLSEALHAQSLTNMILDDEGVLGSIENSFQKFHAFLDLLKDAGLGQLATMAGIDQSDFQLLGHPQMTSTVSNPPKEEKKALEDEKPEPKQNALGQMQNIQVSICMQSAYNEGTLMKFQKITGDARIPLPLDSFPVPVSTPEGLGTSSNNLGVPATEQRQESFEGFIARMCSPSPDATSGTGSQRKEEELSRNSRSSSEKKTKTGEYTKKHSDKQHPGKDLHS

SEQ ID NO: 51058 - protein, 619 aa, Homo sapiens [sequence omitted]

SEQ ID NO: 51059 - protein, 618 aa, Homo sapiens [sequence omitted]

SEQ ID NO: 51060 - protein, 406 aa, Homo sapiens
MMKAVIKKVLQNGRSAKSEYQWITSPSVKEPSKTAKQKRRTIILGSGHKGKATIRIVGLATKKPVSSGRKHSLGKEYYAPAPLPPGVSGFLPWRTAERAKRHRGFPLIKTRDICNQLQQPGFPVTVTVESPSSSEVEEVDDSSESVHEVPEKTSIEQEALQEKLEECLKQLKEERVIRLKVDKRVSELEHENAQLRNINFSLSEALHAQSLTNMILDDEGVLGSIENSFQKFHAFLDLLKDAGLGQLATMAGIDQSDFQLLGHPQMTSTVSNPPKEEKKALEDEKPEPKQNALGQMQNIQVSICMQSAYNEGTLMKFQKITGDARIPLPLDSFPVPVSTPEGLGTSSNNLGVPATEQRQESFEGFIARMCSPSPDATSGTGSQRKEEELSRNSRSSSEKKTKTESH

SEQ ID NO: 51061 - protein, 578 aa, Homo sapiens
MNKQVFEQWLLTDLRDLEHPLLPDGILEIPKGELNGFYALQINSLVDVSQPAYSQIQKLRGKNTTNDLVTAEAQVTPKPWEAKPSRMLMLQLTDGIVQIQGMEYQPIPILHSDLPPGTKILIYGNISFRLGVLLLKPENVKVLGGEVDALLEEYAQEKVLARLIGEPDLVVSVIPNNSNENIPRVTDVLDPALGPSDEELLASLDENDELTANNDTSSERCFTTGSSSNTIPTRQSSFEPEFVISPRPKEEPSNLSIHVMDGELDDFSLEEALLLEETVQKEQMETKELQPLTFNRNADRSIERFSHNPNTTNNFSLTCKNGNNNWSEKNVSEQMTNEDKSFGCPSVRDQNRSIFSVHCNVPLAHDFTNKEKNLETDNKIKQTSSSDSHSLNNKILNREVVNYVQKRNSQISNENDCNLQSCSLRSSENSINLSIAMDLYSPPFVYLSVLMASKPKEVTTVKVKAFIVTLTGNLSSSGGIWSITAKVSDGTAYLDVDFVDEILTSLIGFSVPEMKQSKKDPLQYQKFLEGLQKCQRDLIDLCCLMTISFNPSLSKAMVLALQDVNMEHLENLKKRLNK

SEQ ID NO: 51062 - protein, 321 aa, Homo sapiens [sequence omitted]

SEQ ID NO: 51063 - protein, 36 aa, Homo sapiens
MEKERDAWPAPCCFSHVSEEGTRLVSGDTNLDVQPS

SEQ ID NO: 51064 - protein, 268 aa, Homo sapiens
MEDNQYVVQLKAVFPHGGGFVLAFEFMLSDLAEVVRHAQRPLAQAQVKSYLQMLLKGVAFCHANNIVHRDLKPANLLISASGQLKIADFGLARVFSPDGSRLYTHQVATRSVGCIMGELLNGSPLFPGKNDIEQLCYVLRILGTPNPQVWPELTELPDYNKISFKEQVPMPLEEVLPDVSPQALDLLGQFLLYPPHQRIAASKALLHQYFFTAPLPAHPSELPIPQRLGGPAPKAHPGPPHIHDFHVDRPLEESLLNPELIRPFILEG

SEQ ID NO: 51065 - protein, 429 aa, Homo sapiens
MKEFLGENYVHYGEVVQLPLEFVKQLCLKIQSERPESRCDKDLDTLSGYAMCLPNLTRLQTYRFAEHRPILCVEIKPKCGFIPFSSDVTHEMKHKVCRYCMHQHLKVATGKWKQISKYCPLDLYSGNKQRMHFALKSLLQEAQNNLKIFKNGELIYGCKDARSPVADWSELAHHLKPFFFPSNGLASGPHCTRAVIRELVHVITRVLLSGSDKGRAGTLSPGLGPQGPRVCEASPFSRSLRCQGKNTPERSGLPKGCLLYKTLQVQMLDLLDIEGLYPLYNRVERYLEEFPEERKTLQIDGPYDEAFYQKLLDLSTEDDGTVAFALTKVQQYRVAMTAKDCSIMIALSPCLQDASSDQRPVVPSSRSRFAFSVSVLDLDLKPYESIPHQYKLDGKIVNYYSKTVRAKDNAVMSTRFKESEDCTLVLHKV

SEQ ID NO: 51066 - protein, 426 aa, Homo sapiens
MNGLIQGVKGLLSFLSAPLIGALSDVWGRKPFLLGTVFFTCFPIPLMRISPWWYFAMISVSGVFSVTFSVIFAYVADVTQEHERSTAYGWVSATFAASLVSSPAIGAYLSASYGDSLVVLVATVVALLDICFILVAVPESLPEKMRPVSWGAQISWKQADPFASLKKVGKDSTVLLICITVFLSYLPEAGQYSSFFLYLRQVIGFGSVKIAAFIAMVGILSIVAQTAFLSILMRSLGNKNTVLLGLGFQMLQLAWYGFGSQAWMMWAAGTVAAMSSITFPAISALVSRNAESDQQGVAQGIITGIRGLCNGLGPALYGFIFYMFHVELTELGPKLNSNNVPLQGAVIPGPPFLFGACIVLMSFLVALFIPEYSKASGVQKHSNSSSGSLTNTPERGSDEDIEPLLQDSSIWELSSFEEPGNQCTEL

SEQ ID NO: 51067 - protein, 1401 aa, Homo sapiens
MGLGKTVQVISFLAAVLHKKGTREDIENNMPEFLLRSMKKEPLSSTAKKMFLIVAPLSVLYNWKDELDTWGYFRVTVLHGNRKDNELIRVKQRKCEIALTTYETLRLCLDELNSLEWSAVIVDEAHRIKNPKARVTEVMKALKCNVRIGLTGTILQNNMKELWCVMDWAVPGLLGSGTYFKKQFSDPVEHGQRHTATKRELATGRKAMQRLAKKMSGWFLRRTKTLIKDQLPKKEDRMVYCSLTDFQKAVYQTVLETEDVTLILQSSEPCTCRSGQKRRNCCYKTNSHGETVKTLYLSYLTVLQKVANHVALLQAASTSKQQETLIKRICDQVFSRFPDFVQKSKDAAFETLSDPKYSGKMKVLQQLLNHCRKNRDKVLLFSFSTKLLDVLQQYCMASGLDYRRLDGSTKSEERLKIVKEFNSTQDVNICLVSTMAGGLGLNFVGANVVVLFDPTWNPANDLQAIDRAYRIGQCRDVKVLRLISLGTVEEIMYLRQIYKQQLHCVVVGSENAKRYFEAVQGSKEHQGELFGIHNLFKFRSQGSCLTKDILEREGQVEAGIMTATTWLKEGPPAHKLEMPRQPDCQECRGTEQAAEPLAKEACDLCSDFSDEEPVGATGIKTAKNKAPDSSKASSSPGQLTLLQCGFSKLLETKCKAVEDSDGNTASDDESSDEQPTCLSTEAKDAGCEKNQDSLGTSKHQKLDNILNPKEKHIFYKSEKILEQNISSKSDEKKIKNTDKHCILQNVTESEDSDVICPTQYTTERFPDNSIRFKPPLEGSEDSETEHTVKTRNNDNSRNTDDKRNGIISKKLSPENTTLKSILKRKGTSDISDESDDIEISSKSRVRKRASSLRFKRIKETKKELHNSPKTMNKTNQVYAANEDHNSQFIDDYSSSDESLSVSHFSFSKQSHRPRTIRDRTSFSSKLPSHNKKNSTFIPRKPMKCSNEKVVNQEQSYESMDKFLDGVQEVAYIHSNQNVIGSSKAENHMSRWAAHDVFELKQFSQLPANIAVCSSKTYKEKVDADTLPHTKKGQQPSEGSISLPLYISNPVNQKKKKVYHTNQTTFIIGETPKGIRRKQFEEMASYFNSSSVNEFAKHITNATSEERQKMLRDFYASQYPEVKEFFVDSVSQFNNSSFEKGEQRTRKKSDKRESLIKPRLSDSETLSFKDSTNKISQVCSLKTYKRKSVKFQNHISYREEVFFNDAETKKSPVSSTQEIDSGKNSQASEDTVTSRSLNSESETRERRLENTMKDQQDLTRTGISRKEPLLKLENKKIENPVLENTSVISLLGDTSILDDLFKSHGNSPTQLPKKVLSGPMEKAKQRPKDFWDILNEQNDESLSKLTDLAVIETLCEKAPLAAPFKRREEPATSLWKSNEKFLWKKFSPSDTDENATNTQSTT

SEQ ID NO: 51068 - protein, 275 aa, Homo sapiens
MLERAERRSYREYRPYETERQADFTAEKFPDEKPGDRFDRDRPLRGRGGPRGGMRGRGRGGPGNRVFDAFDQRGKREFERYGGNDKIAVRTEDNMGGCGVRTWGSGKDTSDVEPTAPMEEPTVVEESQGTPEEESPAKVPELEVEEETQVQEMTLDEWKNLQEQTRPKPEFNIRKPESTVPSKAVVIHKSKYRDDMVKDDYEDDSHVFRKPANDITSQLEINFGNLPRPGRGARGGTRGGRGRIRRAENYGPRAEVVMQDVAPNPDDPEDFPALS

SEQ ID NO: 51069 - protein, 646 aa, Homo sapiens
MVAMFENFVSVTQEEDVPQVRRDWYVYAFLSSLPWVGKELYEKKDAEMDRIFANTESYLKRRQKTHVPMLQVWTADKPHPQEEYLDCLWAQIQKLKKDRWQERHILRPYLAFDSILCEALQHNLPPFTPPPHTEDSVYPMPRVIFRMFDYTDDPEGPVMPGSHSVERFVIEENLHCIIKSHWKERKTCAAQLVSYPGKNKIPLNYHIVEVIFAELFQLPAPPHIDVMYTTLLIELCKLQPGSLPQVLAQATEMLYMRLDTMNTTCVDRFINWFSHHLSNFQFRWSWEDWSDCLSQDPESPKPKFVREVLEKCMRLSYHQRILDIVPPTFSALCPANPTCIYKYGDESSNSLPGHSVALCLAVAFKSKATNDEIFSILKDVPNPNQDDDDDEGFSFNPLKIEVFVQTLLHLAAKSFSHSFSALAKFHEVFKTLAESDEGKLHVLRVMFEVWRNHPQMIAVLVDKMIRTQIVDCAAVANWIFSSELSRDFTRLFVWEILHSTIRKMNKHVLKIQKELEEAKEKLARQHKRRSDDDDRSSDRKDGVLEEQIERLQEKVESAQSEQKNLFLVIFQRFIMILTEHLVRCETDGTSVLTPWYKNCIERLQQIFLQHHQIIQQYMVTLENLLFTAELDPHILAVFQQFCALQA

SEQ ID NO: 51070 - protein, 237 aa, Homo sapiens [sequence omitted]

SEQ ID NO: 51071 - protein, 318 aa, Homo sapiens
MAKECGADCAKFQKSELEFKFNRKALERPYTSKHSWGKTYGEHKRHLEFSHDQYRELQRYAEEVGIFFTASGMDEMAVEFLHELNVPFFKVGSGDTNNFPYLEKTAKKGRPMVISSGMQSMDTMKQVYQIVKPLNPNFCFLQCTSAYPLQPEDVNLRVISEYQKLFPDIPIGYSGHETGIAISVAAVALGAKVLERHITLDKTWKGSDHSASLEPGELAELVRSVRLVERALGSPTKQLLPCEMACNEKLGKSVVAKVKIPEGTILTMDMLTVKVGEPKGYPPEDIFNLVGKKVLVTVEEDDTIMEELVDNHGKKIKS

SEQ ID NO: 51072 - protein, 10 aa, Homo sapiens
MCGRKPRAAF

SEQ ID NO: 51073 - protein, 240 aa, Homo sapiens
MKKNKFRVVIFQEKFRCPTSLSVVKDRNLTENQEEDDDDIFDPPVDLSSDEEYYVEESRSARLRKSGKEHIDNIKKAFSKENMQKTRQNLDKKVNRIRTRIVTPERRERLRQSGERLRQSGERLRQSGERFKKSISNAAPSKEAFKMRSLRKGKDRTVAEGEECAREMGVDIIARSESLGPISELYSDELSEPEHEAARPVYPPHEGREIPTPEPLKVTFKSQVKVEDDESLLLDLKHSS

SEQ ID NO: 51074 - protein, 227 aa, Homo sapiens
MCSSFATGPRQYDGIFYEFRSYYLKPSKMNEFLENFEKNAHLRTAHSELVGYWSVEFGGRMNTVFHIWKYDNFAHRTEVRKALAKDKEWQEQFLIPNLALIDKQESEITYLVPWCKLEKPPKEGVYELATFQMKPGGPALWGDAFKRAVHAHVNLGYTKLVGVFHTEYGALNRVHVLWWNESADSRAAGRHKSHEDPRVVAAVRESVNYLVSQQNMLLIPTSFSPLK

SEQ ID NO: 51075 - protein, 226 aa, Homo sapiens
MHFVEEVPHSRFIECRYKEARAFFQQYLDDNTVEAVAFRKSAKELLQLAAKTLNKLGVPFWLSSGTCLGWYRQCNIIPYSKDVDLGIFIQDYKSDIILAFQDAGLPLKHKFGKVEDSLELSFQGKDDVKLDVFFFYEETDHMWNGGTQAKTGKKFKYLFPKFTLCWTEFVDMKVHVPCETLEYIEANYGKTWKIPVKTWDWKRSPPNVQPNGIWPISEWDEVIQLY

SEQ ID NO: 51076 - protein, 242 aa, Homo sapiens [sequence omitted]

SEQ ID NO: 51077 - protein, 443 aa, Homo sapiens
MVNYYTPITPHLRSQPVYIQYSNHRELKTDNLPNQARAQAALQAVSAVQSGSLALSGGPSNEGTVLPGQSPVLRIIIENLFYPVTLEVLHQIFSKFGTVLKIITFTKNNQFQALLQYADPVNAHYAKMALDGQNIYNACCTLRIDFSKLTSLNVKYNNDKSRDFTRLDLPTGDGQPSLEPPMAAAFGAPGIISSPYAGAAGFAPAIGFPQATGLSVPAVPGALGPLTITSSAVTGRMAIPGASGIPGNSVLLVTNLNPDLITPHGLFILFGVYGDVHRVKIMFNKKENALVQMADANQAQLAMNHLSGQRLYGKVLRATLSKHQAVQLPREGQEDQGLTKDFSNSPLHRFKKPGSKNFQNIFPPSATLHLSNIPPSVTVDDLKNLFIEAGCSVKAFKFFQKDRKMALIQLGSVEEAIQALIELHNHDLGENHHLRVSFSKSTI

SEQ ID NO: 51078 - protein, 77 aa, Homo sapiens [sequence omitted]

SEQ ID NO: 51079 - protein, 1067 aa, Homo sapiens
MFESEKAAVEFNKQVCIAKCNSTSSLDAVLSQDLIVADGPAVEVGDSLEVAYTGWLFQNHVLGQVFDSTANKDKLLRLKLGSGKVIKGWEDGMLGMKKGGKRLLIVPPACAVGSEGVIGWTQATDSILVFEVEVRRVKFARDSGSDGHSVSSRDSAAPSPIPGADNLSADPVVSPPTSIPFKSGEPALRTKSNSLSEQLAINTSPDAVKAKLISRMAKMGQPMLPILPPQLDSNDSEIEDVNTLQGGGQPVVTPSVQPSLHPAHPALPQMTSQAPQPSVTGLQAPSAALMQVSSLDSHSAVSGNAQSFQPYAGMQAYAYPQASAVTSQLQPVRPLYPAPLSQPPHFQGSGDMASFLMTEARQHNTEIRMAVSKVADKMDHLMTKVEELQKHSAGNSMLIPSMSVTMETSMIMSNIQRIIQENERLKQEILEKSNRIEEQNDKISELIERNQRYVEQSNLMMEKRNNSLQTATENTQARVLHAEQEKAKVTEELAAATAQVSHLQLKMTAHQKKETELQMQLTESLKETDLLRGQLTKVQAKLSELQETSEQAQSKFKSEKQNRKQLELKVTSLEEELTDLRVEKESLEKNLSERKKKSAQERSQAEEEIDEIRKSYQEELDKLRQLLKKTRVSTDQAAAEQLSLVQAELQTQWEAKCEHLLASAKDEHLQQYQEVCAQRDAYQQKLVQLQEKCLALQAQITALTKQNEQHIKELEKNKSQMSGVEAAASDPSEKVKKIMNQVFQSLRREFELEESYNGRTILGTIMNTIKMVTLQLLNQQEQEKEESSSEEEEEKAEERPRRPSQEQSASASSGQPQAPLNRERPESPMVPSEQVVEEAVPLPPQALTTSQDGHRRKGDSEAEALSEIKDGSLPPELSCIPSHRVLGPPTSIPPEPLGPVSMDSECEESLAASPMAAKPDNPSGKVCVREVAPDGPLQESSTRLSLTSDPEEGDPLALGPESPGEPQPPQLKKDDVTSSTGPHKELSSTEAGSTVAGAALRPSHHSQRSSLSGDEEDELFKGATLKALRPKAQPEEEDEDEVSMKGRPPPTPLFGDDDDDDDIDWLG

SEQ ID NO: 51080 - protein, 281 aa, Homo sapiens [sequence omitted]

SEQ ID NO: 51081 - protein, 1178 aa, Homo sapiens
MGFQGNGFPDRLASTEQTEIMKDLSKGGCKNGYLRHTESKISDCDGAHAPGCLEEGAFINLLAPLFNEKATLLLESRPDLLKVVRELLLGQLFLTEQEVSGEHLDGKTEKTPKQKGELVHFVQTNSFSKPHDELKLSCEAQLVKAGEVPKVGLKDASVQTVATEGDLLRFKHEATREAWEEKPINTALSAEHRPENLHGVPGWQAALLSLPGITNREAKKSRLPILIKPSRSLGNMYRLPATQEVVTQLQSQILELQGELKEFKTCNKQLHQKLILAEAVMEGRPTPDKTLLNAQPPVGAAYQDSPGEQKGIKTTSSVWRDKEMDSDQQRSYEIDSEICPPDDLASLPSCKENPEDVLSPTSVATYLSSKSQPSAKVSVMGTDQSESINTSNETEYLKQKIHDLETELEGYQNFIFQLQKHSQCSEAIITVLCGTEGAQDGLSKPKNGSDGEEMTFSSLHQVRYVKHVKILGPLAPEMIDSRVLENLKQQLEEQEYKLQKEQNLNMQLFSEIHNLQNKFRDLSPPRYDSLVQSQARELSLQRQQIKDGHGICVISRQHMNTMIKAFEELLQASDVDYCVAEGFQEQLNQCAELLEKLEKLFLNGKSVGVEMNTQNELMERIEEDNLTYQHLLPESPEPSASHALSDYETSEKSFFSRDQKQDNETEKTSVMVNSFSQDLLMEHIQEIRTLRKRLEESIKTNEKLRKQLERQGSEFVQGSTSIFASGSELHSSLTSEIHFLRKQNQALNAMLIKGSRDKQKENDKLRESLSRKTVSLEHLQREYASVKEENERLQKEGSEKERHNQQLIQEVRCSGQELSRVQEEVKLRQQLLSQNDKLLQSLRVELKAYEKLDEEHRRLREASGEGWKGQDPFRDLHSLLMEIQALRLQLERSIETSSTLQSRLKEQLARGAEKAQEGALTLAVQAVSIPEVPLQPDKHDGDKYPMESDNSFDLFDSSQAVTPKSVSETPPLSGNDTDSLSCDSGSSATSTPCVSRLVTGHHLWASKNGRHVLGLIEDYEALLKQISQGQRLLAEMDIQTQEAPSSTSQELGTKGPHPAPLSKFVSSVSTAKLTLEEAYRRLKLLWRVSLPEDGQCPLHCEQIGEMKAEVTKLHKKLFEQEKKLQNTMKLLQLSKRQEKVIFDQLVVTHKILRKARGNLELRPGGAHPGTCSPSRPGS

SEQ ID NO: 51082 - protein, 74 aa, Homo sapiens
MGFVGAVYMYREYQNRKLNAPFWTIELKEDNISFSSYHDSIPNADVSGLLEDDGNEVAPNGQLTLTTPIHNYKA

SEQ ID NO: 51083 - protein, 193 aa, Homo sapiens
MRRGSSESELAARWEAEAVAAAKAAAKAEAEATAETVAEQVRVDAGAAGEPECKAGEEQPKVLAPAPAQPSAAEEGNTQVLQRPPPTLPPSKPKPVQGLCPHGKPRDKGRSCKRSSGHGSGENGSQRPVTVDSSKARTSLDALKISIRQLKWKEFPFGRRLPCDIYWHGVSFHDNDIFSGQVNKFPGSNGERR

SEQ ID NO: 51084 - protein, 38 aa, Homo sapiens
MAENPDAEYPAAPVYSYFKPPDKKRTTPYSRTAWKSRR

SEQ ID NO: 51085 - protein, 132 aa, Homo sapiens [sequence omitted]

SEQ ID NO: 51086 - protein, 928 aa, Homo sapiens
MQLKEEFRSYEALRREHDAQIVHIAMEAGLRISPEQWSSLLYGDLAHKSHMQSIIDKLQSPESFAKSVQELTIVLQRTGDPANLNRLRPHLELLANIDPNPDAVSPTWEQLENAMVAVKTVVHGLVDFIQNYSRKGHETPQPQPNSKYKTSMCRDLRQQGGCPRGTNCTFAHSQEELEKYRLRNKKINATVRTFPLLNKVGVNNTVTTTAGNVISVIGSTETTGKIVPSTNGISNAENSVSQLISRSTDSTLRALETVKKVGKVGANGQNAAGPSADSVTENKIGSPPKTPVSNVAATSAGPSNVGTELNSVPQKSSPFLTRVPVYPPHSENIQYFQDPRTQIPFEVPQYPQTGYYPPPPTVPAGVAPCVPRFVRSNNVPESSLPPASMPYADHYSTFSPRDRMNSSPYQPPPPQPYGPVPPVPSGMYAPVYDSRRIWRPPMYQRDDIIRSNSLPPMDVMHSSVYQTSLRERYNSLDGYYSVACQPPSEPRTTVPLPREPCGHLKTSCEEQIRRKPDQWAQYHTQKAPLVSSTLPVATQSPTPPSPLFSVDFRADFSESVSGTKFEEDHLSHYSPWSCGTIGSCINAIDSEPKDVIANSNAVLMDLDSGDVKRRVHLFETQRRTKEEDPIIPFSDGPIISKWGAISRSSRTGYHTTDPVQATASQGSATKPISVSDYVPYVNAVDSRWSSYGNEATSSAHYVERDRFIVTDLSGHRKHSSTGDLLSLELQQAKSNSLLLQREANALAMQQKWNSLDEGRHLTLNLLSKEIELRNGELQSDYTEDATDTKPDRDIELELSALDTDEPDGQSEPIEEILDIQLGISSQNDQLLNGMAVENGHPVQQHQKEPPKQKKQSLGEDHVILEEQKTILPVTSCFSQPLPVSISNASCLPITTSVSAGNLILKTHVMSEDKNDFLKPVANGKMVNS

SEQ ID NO: 51087 - protein, 233 aa, Homo sapiens
MMDAKARQDCVKEIGLLKQLNHPNIIKYLDSFIEDNELNIVLELADAGDLSQMIKYFKKQKRLIPERTVWKYFVQLCSAVEHMHSRRVMHRDIKPANVFITATGVVKLGDLGLGRFFSSETTAAHSLVGTPYYMSPERIHENGYNFKSDIWSLGCLLYEMAALQSPFYGDKMNLFSLCQKIEQCDYPPLPGEHYSEKLRELVSMCICPDPHQRPDIGYVHQVAKQMHIWMSST

SEQ ID NO: 51088 - protein, 227 aa, Homo sapiens
MGDFVDRGYYSLETFTYLLALKAKWPDRITLLRGNHESRQITQVYGFYDECQTKYGNANAWRYCTKVFDMLTVAALIDEQILCVHGGLSPDIKTLDQIRTIERNQEIPHKGAFCDLVWSDPEDVDTWAISPRGAGWLFGAKVTNEFVHINNLKLICRAHQLVHEGYKFMFDEKLVTVWSAPNYCYRCGNIASIMVFKDVNTREPKLFRAVPDSERVIPPRTTTPYFL

SEQ ID NO: 51089 - protein, 305 aa, Homo sapiens
MDLGKHQWDLDTCKGLLPRYEHASFIPSCTPDRIWVFGGANQSGNRNCLQVLNPETRTWTTPEVTSPPPSPRTFHTSSAAIGNQLYVFGGGERGAQPVQDTKLHVFDANTLTWSQPETLGNPPSPRHGHVMVAAGTKLFIHGGLAGDRFYDDLHCIDISDMKWQKLNPTGAAPAGCAAHSAVAMGKHVYIFGGMTPAGALDTMYQYHTEEQHWTLLKFDTLLPPGRLDHSMCIIPWPVTCASEKEDSNSLTLNHEAEKEDSADKVMSHSGDSHEESQTATLLCLVFGGMNTEGEIYDDCIVTVVD

SEQ ID NO: 51090 - protein, 199 aa, Homo sapiens [sequence omitted]

SEQ ID NO: 51091 - protein, 27 aa, Homo sapiens
MLMGKLAVIRGVTTKELYPEFGLDMND

SEQ ID NO: 51092 - protein, 581 aa, Homo sapiens [sequence omitted]

SEQ ID NO: 51093 - protein, 729 aa, Homo sapiens
MKISSLEASGSPEPGPELLAEELQHRLHVEAAVAEGAKNVVKLLSSRRTQDRKALAEAQAQLQESSQKLDLLRLALEQLLEQLPPAHPLRSRVTRELRAAVPGYPQPSGTPVKPTALTGTLQVRLLGCEQLLTAVPGRSPAAALASSPSEGWLRTKAKHQRGRGELASEVLAVLKVDNRVVGQTGWGQVAEQSWDQTFVIPLERARELEIGVHWRDWRQLCGVAFLRLEDFLDNACHQLSLSLVPQGLLFAQVTFCDPVIERRPRLQRQERIFSKRRGQDFLRASQMNLGMAAWGRLVMNLLPPCSSPSTISPPKGCPRTPTTLREASDPATPSNFLPKKTPLGEEMTPPPKPPRLYLPQEPTSEETPRTKRPHMEPRTRRGPSPPASPTRKPPRLQDFRCLAVLGRGHFGKVLLVQFKGTGKYYAIKALKKQEVLSRDEIESLYCEKRILEAVGCTGHPFLLSLLACFQTSSHACFVTEFVPGGDLMMQIHEDVFPEPQARFYVACVVLGLQFLHEKKIIYRDLKLDNLLLDAQGFLKIADFGLCKEGIGFGDRTSTFCGTPEFLAPEVLTQEAYTRAVDWWGLGVLLYEMLVGECPFPGDTEEEVFDCIVNMDAPYPGFLSVQGLEFIQKLLQKCPEKRLGAGEQDAEEIKVQPFFRTTNWQALLARTIQPPFVPTLCGPADLRYFEGEFTGLPPALTPPAPHSLLTARQQAAFRDFDFVSERFLEP

SEQ ID NO: 51094 - protein, 583 aa, Homo sapiens [sequence omitted]

SEQ ID NO: 51095 - protein, 140 aa, Homo sapiens
MKASSRFKAHQDALPRLPVPPLQQSLDHYLKALQPIVSEEEWAHTKQLVDEFQASGGVGERLQKGLERRARKTENWVSEGILTVTCCWLHMHSSPVPTALARPFVCCPEFREHILCVWHLAGCWVIKKDTVTSSLELTFK

SEQ ID NO: 51096 - protein, 78 aa, Homo sapiens
MQPSGSQPRFPALTQNGVALVRTPLTSVYLRVRPILPAGLCLGVTLPELAPTTVATVMLMCDCCQEPAHMTVWRKFFP
